United States Patent Application Publication US 2026/0272981 A1, published September 17, 2026 (application 19/166,848).

The application's sequence listing, which the Patent Office published only in electronic form, follows.

SEQUENCE LISTING (29325 sequences)

SEQ ID NO: 1 - RNA, 20 nt, synthetic construct
  source 1..20: mol_type = other RNA
aaatgagaataattttaaca

SEQ ID NO: 2 - RNA, 20 nt, synthetic construct
  source 1..20: mol_type = other RNA
aatgagaataattttaacaa

SEQ ID NO: 3 - RNA, 20 nt, synthetic construct
  source 1..20: mol_type = other RNA
acaagggcaatgacagagaa

SEQ ID NO: 4 - RNA, 20 nt, synthetic construct
  source 1..20: mol_type = other RNA
ggcaatgacagagaatggaa

SEQ ID NO: 5 - RNA, 20 nt, synthetic construct
  source 1..20: mol_type = other RNA
atgacagagaatggaaagga

SEQ ID NO: 6 - RNA, 20 nt, synthetic construct
  source 1..20: mol_type = other RNA
gagatttcagcagagtcaga

SEQ ID NO: 7 - RNA, 20 nt, synthetic construct
  source 1..20: mol_type = other RNA
tcagcagagtcagaaggatg

SEQ ID NO: 8 - RNA, 20 nt, synthetic construct
  source 1..20: mol_type = other RNA
gtggcaactgaaaacagcat

SEQ ID NO: 9 - RNA, 20 nt, synthetic construct
  source 1..20: mol_type = other RNA
tggcaactgaaaacagcatt

SEQ ID NO: 10 - RNA, 20 nt, synthetic construct
  source 1..20: mol_type = other RNA
ctgaaaacagcattgggaca

SEQ ID NO: 11 - RNA, 20 nt, synthetic construct
  source 1..20: mol_type = other RNA
tgaaaacagcattgggacaa

SEQ ID NO: 12 - RNA, 20 nt, synthetic construct
  source 1..20: mol_type = other RNA
taagaaaaagtcaaagtttc

SEQ ID NO: 13 - RNA, 20 nt, synthetic construct
  source 1..20: mol_type = other RNA
cacatcttatactgttactc

SEQ ID NO: 14 - RNA, 20 nt, synthetic construct
  source 1..20: mol_type = other RNA
ataagatgtgaactcagatt

SEQ ID NO: 15 - RNA, 20 nt, synthetic construct
  source 1..20: mol_type = other RNA
atgtgaactcagatttggaa

SEQ ID NO: 16 - RNA, 20 nt, synthetic construct
  source 1..20: mol_type = other RNA
tgtgaactcagatttggaaa

SEQ ID NO: 17 - RNA, 20 nt, synthetic construct
  source 1..20: mol_type = other RNA
tcagatttggaaagggagac

SEQ ID NO: 18 - RNA, 20 nt, synthetic construct
  source 1..20: mol_type = other RNA
ggagacaggaaattaagttt

SEQ ID NO: 19 - RNA, 20 nt, synthetic construct
  source 1..20: mol_type = other RNA
cagcaaaacattcatataag

SEQ ID NO: 20 - RNA, 20 nt, synthetic construct
  source 1..20: mol_type = other RNA
aacattcatataagaggaag

SEQ ID NO: 21 - RNA, 20 nt, synthetic construct
  source 1..20: mol_type = other RNA
caacaagtgtaaagatcaca

SEQ ID NO: 22 - RNA, 20 nt, synthetic construct
  source 1..20: mol_type = other RNA
aacaagtgtaaagatcacat

SEQ ID NO: 23 - RNA, 20 nt, synthetic construct
  source 1..20: mol_type = other RNA
acaagtgtaaagatcacatg

SEQ ID NO: 24 - RNA, 20 nt, synthetic construct
  source 1..20: mol_type = other RNA
catgtgatctttacacttgt

SEQ ID NO: 25 - RNA, 20 nt, synthetic construct
  source 1..20: mol_type = other RNA
atagaagtcacctgcaacac

SEQ ID NO: 26 - RNA, 20 nt, synthetic construct
  source 1..20: mol_type = other RNA
acctgcaacacaggcagaac

SEQ ID NO: 27 - RNA, 20 nt, synthetic construct
  source 1..20: mol_type = other RNA
tccagttctgcctgtgttgc

SEQ ID NO: 28 - RNA, 20 nt, synthetic construct
  source 1..20: mol_type = other RNA
ggcagaactggaagcttcgc

SEQ ID NO: 29 - RNA, 20 nt, synthetic construct
  source 1..20: mol_type = other RNA
aactggaagcttcgctggcc

SEQ ID NO: 30 - RNA, 20 nt, synthetic construct
  source 1..20: mol_type = other RNA
gtcagagtttaacatggacc

SEQ ID NO: 31 - RNA, 20 nt, synthetic construct
  source 1..20: mol_type = other RNA
gttaaactctgaccattctc

SEQ ID NO: 32 - RNA, 20 nt, synthetic construct
  source 1..20: mol_type = other RNA
ttaaactctgaccattctct

SEQ ID NO: 33 - RNA, 20 nt, synthetic construct
  source 1..20: mol_type = other RNA
taaactctgaccattctctg

SEQ ID NO: 34 - RNA, 20 nt, synthetic construct
  source 1..20: mol_type = other RNA
ggctggacagccccagagaa

SEQ ID NO: 35 - RNA, 20 nt, synthetic construct
  source 1..20: mol_type = other RNA
gggctgtccagcctttgcac

SEQ ID NO: 36 - RNA, 20 nt, synthetic construct
  source 1..20: mol_type = other RNA
ctgtccagcctttgcacagg

SEQ ID NO: 37 - RNA, 20 nt, synthetic construct
  source 1..20: mol_type = other RNA
cgcgccgcctgtgcaaaggc

SEQ ID NO: 38 - RNA, 20 nt, synthetic construct
  source 1..20: mol_type = other RNA
caaacgcgccgcctgtgcaa

SEQ ID NO: 39 - RNA, 20 nt, synthetic construct
  source 1..20: mol_type = other RNA
cgcgtttgtcttcagttttc

SEQ ID NO: 40 - RNA, 20 nt, synthetic construct
  source 1..20: mol_type = other RNA
gggagataagaaataggacg

SEQ ID NO: 41 - RNA, 20 nt, synthetic construct
  source 1..20: mol_type = other RNA
tgggagataagaaataggac

SEQ ID NO: 42 - RNA, 20 nt, synthetic construct
  source 1..20: mol_type = other RNA
ctgggagataagaaatagga

SEQ ID NO: 43 - RNA, 20 nt, synthetic construct
  source 1..20: mol_type = other RNA
ttcttatctcccagtgcctc

SEQ ID NO: 44 - RNA, 20 nt, synthetic construct
  source 1..20: mol_type = other RNA
cagaaaaggccagaggcact

SEQ ID NO: 45 - RNA, 20 nt, synthetic construct
  source 1..20: mol_type = other RNA
acagaaaaggccagaggcac

SEQ ID NO: 46 - RNA, 20 nt, synthetic construct
  source 1..20: mol_type = other RNA
ggagacacagaaaaggccag

SEQ ID NO: 47 - RNA, 20 nt, synthetic construct
  source 1..20: mol_type = other RNA
tctggagggagacacagaaa

SEQ ID NO: 48 - RNA, 20 nt, synthetic construct
  source 1..20: mol_type = other RNA
tgtctccctccagaatgagc

SEQ ID NO: 49 - RNA, 20 nt, synthetic construct
  source 1..20: mol_type = other RNA
gagctccagctcattctgga

SEQ ID NO: 50 - RNA, 20 nt, synthetic construct
  source 1..20: mol_type = other RNA
agagctccagctcattctgg

SEQ ID NO: 51 - RNA, 20 nt, synthetic construct
  source 1..20: mol_type = other RNA
aagagagctccagctcattc

SEQ ID NO: 52 - RNA, 20 nt, synthetic construct
  source 1..20: mol_type = other RNA
tgacctttgtgtagtctctg

SEQ ID NO: 53 - RNA, 20 nt, synthetic construct
  source 1..20: mol_type = other RNA
tgtgtagtctctgaggtctg

SEQ ID NO: 54 - RNA, 20 nt, synthetic construct
  source 1..20: mol_type = other RNA
agacctcagagactacacaa

SEQ ID NO: 55 - RNA, 20 nt, synthetic construct
  source 1..20: mol_type = other RNA
ttgagggtcagacatagtga

SEQ ID NO: 56 - RNA, 20 nt, synthetic construct
  source 1..20: mol_type = other RNA
agtcaacaaatattttttga

SEQ ID NO: 57 - RNA, 20 nt, synthetic construct
  source 1..20: mol_type = other RNA
aaaaatatttgttgactgac

SEQ ID NO: 58 - RNA, 20 nt, synthetic construct
  source 1..20: mol_type = other RNA
gcttattcctgttgttgccc

SEQ ID NO: 59 - RNA, 20 nt, synthetic construct
  source 1..20: mol_type = other RNA
ttcttttccagggcaacaac

SEQ ID NO: 60 - RNA, 20 nt, synthetic construct
  source 1..20: mol_type = other RNA
ggcagggtaattcttttcca

SEQ ID NO: 61 - RNA, 20 nt, synthetic construct
  source 1..20: mol_type = other RNA
gggcagggtaattcttttcc

SEQ ID NO: 62 - RNA, 20 nt, synthetic construct
  source 1..20: mol_type = other RNA
aactgtgacttaatcgggca

SEQ ID NO: 63 - RNA, 20 nt, synthetic construct
  source 1..20: mol_type = other RNA
aaactgtgacttaatcgggc

SEQ ID NO: 64 - RNA, 20 nt, synthetic construct
  source 1..20: mol_type = other RNA
gaagaaactgtgacttaatc

SEQ ID NO: 65 - RNA, 20 nt, synthetic construct
  source 1..20: mol_type = other RNA
ggaagaaactgtgacttaat

SEQ ID NO: 66 - RNA, 20 nt, synthetic construct
  source 1..20: mol_type = other RNA
gtcacagtttcttccttctt

SEQ ID NO: 67 - RNA, 20 nt, synthetic construct
  source 1..20: mol_type = other RNA
tcacagtttcttccttctta

SEQ ID NO: 68 - RNA, 20 nt, synthetic construct
  source 1..20: mol_type = other RNA
ttaactacgctgccctaaga

SEQ ID NO: 69 - RNA, 20 nt, synthetic construct
  source 1..20: mol_type = other RNA
tagttaacaacctcaacacc

SEQ ID NO: 70 - RNA, 20 nt, synthetic construct
  source 1..20: mol_type = other RNA
aagacaatttcctggtgttg

SEQ ID NO: 71 - RNA, 20 nt, synthetic construct
  source 1..20: mol_type = other RNA
tgatgaggaagacaatttcc

SEQ ID NO: 72 - RNA, 20 nt, synthetic construct
  source 1..20: mol_type = other RNA
tgtcttcctcatcacatacc

SEQ ID NO: 73 - RNA, 20 nt, synthetic construct
  source 1..20: mol_type = other RNA
gtcttcctcatcacatacca

SEQ ID NO: 74 - RNA, 20 nt, synthetic construct
  source 1..20: mol_type = other RNA
taataccctggtatgtgatg

SEQ ID NO: 75 - RNA, 20 nt, synthetic construct
  source 1..20: mol_type = other RNA
aaactgcatgaataataccc

SEQ ID NO: 76 - RNA, 20 nt, synthetic construct
  source 1..20: mol_type = other RNA
aattgttagctttatttcaa

SEQ ID NO: 77 - RNA, 20 nt, synthetic construct
  source 1..20: mol_type = other RNA
taattgttagctttatttca

SEQ ID NO: 78 - RNA, 20 nt, synthetic construct
  source 1..20: mol_type = other RNA
caaagatttacacatttcct

SEQ ID NO: 79 - RNA, 20 nt, synthetic construct
  source 1..20: mol_type = other RNA
aaagatttacacatttccta

SEQ ID NO: 80 - RNA, 20 nt, synthetic construct
  source 1..20: mol_type = other RNA
ttaaaaagttgactgaccct

SEQ ID NO: 81 - RNA, 20 nt, synthetic construct
  source 1..20: mol_type = other RNA
acaaagccaacttttagtag

SEQ ID NO: 82 - RNA, 20 nt, synthetic construct
  source 1..20: mol_type = other RNA
aagccaacttttagtagtgg

SEQ ID NO: 83 - RNA, 20 nt, synthetic construct
  source 1..20: mol_type = other RNA
ccaacttttagtagtggtgg

SEQ ID NO: 84 - RNA, 20 nt, synthetic construct
  source 1..20: mol_type = other RNA
acttttagtagtggtggcgg

SEQ ID NO: 85 - RNA, 20 nt, synthetic construct
  source 1..20: mol_type = other RNA
ccgccaccactactaaaagt

SEQ ID NO: 86 - RNA, 20 nt, synthetic construct
  source 1..20: mol_type = other RNA
tttagtagtggtggcggtgg

SEQ ID NO: 87 - RNA, 20 nt, synthetic construct
  source 1..20: mol_type = other RNA
ttagtagtggtggcggtggc

SEQ ID NO: 88 - RNA, 20 nt, synthetic construct
  source 1..20: mol_type = other RNA
tagtagtggtggcggtggcg

SEQ ID NO: 89 - RNA, 20 nt, synthetic construct
  source 1..20: mol_type = other RNA
agtagtggtggcggtggcgg

SEQ ID NO: 90 - RNA, 20 nt, synthetic construct
  source 1..20: mol_type = other RNA
gtagtggtggcggtggcggg

SEQ ID NO: 91 - RNA, 20 nt, synthetic construct
  source 1..20: mol_type = other RNA
tagtggtggcggtggcgggg

SEQ ID NO: 92 - RNA, 20 nt, synthetic construct
  source 1..20: mol_type = other RNA
ggaacagaaaaagcaaagaa

SEQ ID NO: 93 - RNA, 20 nt, synthetic construct
  source 1..20: mol_type = other RNA
aggaacagaaaaagcaaaga

SEQ ID NO: 94 - RNA, 20 nt, synthetic construct
  source 1..20: mol_type = other RNA
ttcctgaaatacaaaagtga

SEQ ID NO: 95 - RNA, 20 nt, synthetic construct
  source 1..20: mol_type = other RNA
taccatcacttttgtatttc

SEQ ID NO: 96 - RNA, 20 nt, synthetic construct
  source 1..20: mol_type = other RNA
cttcagaatttctctatgag

SEQ ID NO: 97 - RNA, 20 nt, synthetic construct
  source 1..20: mol_type = other RNA
ttcagaatttctctatgaga

SEQ ID NO: 98 - RNA, 20 nt, synthetic construct
  source 1..20: mol_type = other RNA
tttctctatgagagggtctc

SEQ ID NO: 99 - RNA, 20 nt, synthetic construct
  source 1..20: mol_type = other RNA
ctcaggcactgcactcacgc

SEQ ID NO: 100 - RNA, 20 nt, synthetic construct
  source 1..20: mol_type = other RNA
cactgcactcacgctggagt

SEQ ID NO: 101 - RNA, 20 nt, synthetic construct
  source 1..20: mol_type = other RNA
actgcactcacgctggagtt

SEQ ID NO: 102 - RNA, 20 nt, synthetic construct
  source 1..20: mol_type = other RNA
ctgcactcacgctggagttg

SEQ ID NO: 103 - RNA, 20 nt, synthetic construct
  source 1..20: mol_type = other RNA
tgcactcacgctggagttgg

SEQ ID NO: 104 - RNA, 20 nt, synthetic construct
  source 1..20: mol_type = other RNA
actcacgctggagttggggg

SEQ ID NO: 105 - RNA, 20 nt, synthetic construct
  source 1..20: mol_type = other RNA
acgctggagttgggggtggc

SEQ ID NO: 106 - RNA, 20 nt, synthetic construct
  source 1..20: mol_type = other RNA
gctggtccttttcttgaacc

SEQ ID NO: 107 - RNA, 20 nt, synthetic construct
  source 1..20: mol_type = other RNA
gcaaaacctggttcaagaaa

SEQ ID NO: 108 - RNA, 20 nt, synthetic construct
  source 1..20: mol_type = other RNA
aaccaggttttgcagagaat

SEQ ID NO: 109 - RNA, 20 nt, synthetic construct
  source 1..20: mol_type = other RNA
gaccaattctctgcaaaacc

SEQ ID NO: 110 - RNA, 20 nt, synthetic construct
  source 1..20: mol_type = other RNA
cctagtaaagagtatttgtg

SEQ ID NO: 111 - RNA, 20 nt, synthetic construct
  source 1..20: mol_type = other RNA
ctagtaaagagtatttgtgt

SEQ ID NO: 112 - RNA, 20 nt, synthetic construct
  source 1..20: mol_type = other RNA
gtaaagagtatttgtgtggg

SEQ ID NO: 113 - RNA, 20 nt, synthetic construct
  source 1..20: mol_type = other RNA
ccacacaaatactctttact

SEQ ID NO: 114 - RNA, 20 nt, synthetic construct
  source 1..20: mol_type = other RNA
gtatttgtgtgggaggagtt

SEQ ID NO: 115 - RNA, 20 nt, synthetic construct
  source 1..20: mol_type = other RNA
gtgggaggagtttggcttgc

SEQ ID NO: 116 - RNA, 20 nt, synthetic construct
  source 1..20: mol_type = other RNA
ggaggagtttggcttgctgg

SEQ ID NO: 117 - RNA, 20 nt, synthetic construct
  source 1..20: mol_type = other RNA
gaggagtttggcttgctggc

SEQ ID NO: 118 - RNA, 20 nt, synthetic construct
  source 1..20: mol_type = other RNA
aggagtttggcttgctggcg

SEQ ID NO: 119 - RNA, 20 nt, synthetic construct
  source 1..20: mol_type = other RNA
gcttgctggcggggagtatt

SEQ ID NO: 120 - RNA, 20 nt, synthetic construct
  source 1..20: mol_type = other RNA
ggggagtatttggataatac

SEQ ID NO: 121 - RNA, 20 nt, synthetic construct
  source 1..20: mol_type = other RNA
ggaggcaagagatgcatttg

SEQ ID NO: 122 - RNA, 20 nt, synthetic construct
  source 1..20: mol_type = other RNA
ttttgaataagatacttttg

SEQ ID NO: 123 - RNA, 20 nt, synthetic construct
  source 1..20: mol_type = other RNA
tcaaaagtatcttattcaaa

SEQ ID NO: 124 - RNA, 20 nt, synthetic construct
  source 1..20: mol_type = other RNA
aatggaatttggcaggtggg

SEQ ID NO: 125 - RNA, 20 nt, synthetic construct
  source 1..20: mol_type = other RNA
tagaatggaatttggcaggt

SEQ ID NO: 126 - RNA, 20 nt, synthetic construct
  source 1..20: mol_type = other RNA
atagaatggaatttggcagg

SEQ ID NO: 127 - RNA, 20 nt, synthetic construct
  source 1..20: mol_type = other RNA
aaaatagaatggaatttggc

SEQ ID NO: 128 - RNA, 20 nt, synthetic construct
  source 1..20: mol_type = other RNA
gaagaaaatagaatggaatt

SEQ ID NO: 129 - RNA, 20 nt, synthetic construct
  source 1..20: mol_type = other RNA
ccattctattttcttcccac

SEQ ID NO: 130 - RNA, 20 nt, synthetic construct
  source 1..20: mol_type = other RNA
cattctattttcttcccaca

SEQ ID NO: 131 - RNA, 20 nt, synthetic construct
  source 1..20: mol_type = other RNA
cctgtgggaagaaaatagaa

SEQ ID NO: 132 - RNA, 20 nt, synthetic construct
  source 1..20: mol_type = other RNA
ccacagggagtttccctgat

SEQ ID NO: 133 - RNA, 20 nt, synthetic construct
  source 1..20: mol_type = other RNA
cacagggagtttccctgatt

SEQ ID NO: 134 - RNA, 20 nt, synthetic construct
  source 1..20: mol_type = other RNA
caatcagggaaactccctgt

SEQ ID NO: 135 - RNA, 20 nt, synthetic construct
  source 1..20: mol_type = other RNA
gggagtttccctgattggga

SEQ ID NO: 136 - RNA, 20 nt, synthetic construct
  source 1..20: mol_type = other RNA
ggagtttccctgattgggaa

SEQ ID NO: 137 - RNA, 20 nt, synthetic construct
  source 1..20: mol_type = other RNA
atacaggcccttcccaatca

SEQ ID NO: 138 - RNA, 20 nt, synthetic construct
  source 1..20: mol_type = other RNA
aatacaggcccttcccaatc

SEQ ID NO: 139 - RNA, 20 nt, synthetic construct
  source 1..20: mol_type = other RNA
ctgtatttcccgcgagcgtt

SEQ ID NO: 140 - RNA, 20 nt, synthetic construct
  source 1..20: mol_type = other RNA
ctaacgctcgcgggaaatac

SEQ ID NO: 141 - RNA, 20 nt, synthetic construct
  source 1..20: mol_type = other RNA
gcgagcgttaggagatgtgc

SEQ ID NO: 142 - RNA, 20 nt, synthetic construct
  source 1..20: mol_type = other RNA
gcacatctcctaacgctcgc

SEQ ID NO: 143 - RNA, 20 nt, synthetic construct
  source 1..20: mol_type = other RNA
tgcacatctcctaacgctcg

SEQ ID NO: 144 - RNA, 20 nt, synthetic construct
  source 1..20: mol_type = other RNA
agatgtgcaggtctattcat

SEQ ID NO: 145 - RNA, 20 nt, synthetic construct
  source 1..20: mol_type = other RNA
gatgtgcaggtctattcatt

SEQ ID NO: 146 - RNA, 20 nt, synthetic construct
  source 1..20: mol_type = other RNA
atgtgcaggtctattcattg

SEQ ID NO: 147 - RNA, 20 nt, synthetic construct
  source 1..20: mol_type = other RNA
tgtgcaggtctattcattgg

SEQ ID NO: 148 - RNA, 20 nt, synthetic construct
  source 1..20: mol_type = other RNA
cattgggggagcccaattcc

SEQ ID NO: 149 - RNA, 20 nt, synthetic construct
  source 1..20: mol_type = other RNA
attgggggagcccaattccc

SEQ ID NO: 150 - RNA, 20 nt, synthetic construct
  source 1..20: mol_type = other RNA
gggggagcccaattcccggg

SEQ ID NO: 151 - RNA, 20 nt, synthetic construct
  source 1..20: mol_type = other RNA
cccaattcccgggaggattt

SEQ ID NO: 152 - RNA, 20 nt, synthetic construct
  source 1..20: mol_type = other RNA
ccaattcccgggaggattta

SEQ ID NO: 153 - RNA, 20 nt, synthetic construct
  source 1..20: mol_type = other RNA
cctaaatcctcccgggaatt

SEQ ID NO: 154 - RNA, 20 nt, synthetic construct
  source 1..20: mol_type = other RNA
ccctaaatcctcccgggaat

SEQ ID NO: 155 - RNA, 20 nt, synthetic construct
  source 1..20: mol_type = other RNA
ccgggaggatttagggatca

SEQ ID NO: 156 - RNA, 20 nt, synthetic construct
  source 1..20: mol_type = other RNA
cgggaggatttagggatcac

SEQ ID NO: 157 - RNA, 20 nt, synthetic construct
  source 1..20: mol_type = other RNA
gaggatttagggatcacggg

SEQ ID NO: 158 - RNA, 20 nt, synthetic construct
  source 1..20: mol_type = other RNA
aggatttagggatcacggga

SEQ ID NO: 159 - RNA, 20 nt, synthetic construct
  source 1..20: mol_type = other RNA
tttagggatcacgggagggc

SEQ ID NO: 160 - RNA, 20 nt, synthetic construct
  source 1..20: mol_type = other RNA
ttagggatcacgggagggcc

SEQ ID NO: 161 - RNA, 20 nt, synthetic construct
  source 1..20: mol_type = other RNA
tagggatcacgggagggccg

SEQ ID NO: 162 - RNA, 20 nt, synthetic construct
  source 1..20: mol_type = other RNA
ggagggccggggcgttctcc

SEQ ID NO: 163 - RNA, 20 nt, synthetic construct
  source 1..20: mol_type = other RNA
gggccggggcgttctcctgg

SEQ ID NO: 164 - RNA, 20 nt, synthetic construct
  source 1..20: mol_type = other RNA
ggccggggcgttctcctggt

SEQ ID NO: 165 - RNA, 20 nt, synthetic construct
  source 1..20: mol_type = other RNA
gccggggcgttctcctggtg

SEQ ID NO: 166 - RNA, 20 nt, synthetic construct
  source 1..20: mol_type = other RNA
tccccaccaggagaacgccc

SEQ ID NO: 167 - RNA, 20 nt, synthetic construct
  source 1..20: mol_type = other RNA
ttctcctggtggggatttta

SEQ ID NO: 168 - RNA, 20 nt, synthetic construct
  source 1..20: mol_type = other RNA
gcggccttaaaatccccacc

SEQ ID NO: 169 - RNA, 20 nt, synthetic construct
  source 1..20: mol_type = other RNA
aggccgctcagagccacgac

SEQ ID NO: 170 - RNA, 20 nt, synthetic construct
  source 1..20: mol_type = other RNA
ggccgctcagagccacgact

SEQ ID NO: 171 - RNA, 20 nt, synthetic construct
  source 1..20: mol_type = other RNA
ctcccagtcgtggctctgag

SEQ ID NO: 172 - RNA, 20 nt, synthetic construct
  source 1..20: mol_type = other RNA
ctaagggtagctcccagtcg

SEQ ID NO: 173 - RNA, 20 nt, synthetic construct
  source 1..20: mol_type = other RNA
ccttagccagcgccccaagc

SEQ ID NO: 174 - RNA, 20 nt, synthetic construct
  source 1..20: mol_type = other RNA
cttagccagcgccccaagcc

SEQ ID NO: 175 - RNA, 20 nt, synthetic construct
  source 1..20: mol_type = other RNA
cggcttggggcgctggctaa

SEQ ID NO: 176 - RNA, 20 nt, synthetic construct
  source 1..20: mol_type = other RNA
ccggcttggggcgctggcta

SEQ ID NO: 177 - RNA, 20 nt, synthetic construct
  source 1..20: mol_type = other RNA
agcgccccaagccgggagta

SEQ ID NO: 178 - RNA, 20 nt, synthetic construct
  source 1..20: mol_type = other RNA
gtactcccggcttggggcgc

SEQ ID NO: 179 - RNA, 20 nt, synthetic construct
  source 1..20: mol_type = other RNA
agaaccgtactcccggcttg

SEQ ID NO: 180 - RNA, 20 nt, synthetic construct
  source 1..20: mol_type = other RNA
gagaaccgtactcccggctt

SEQ ID NO: 181 - RNA, 20 nt, synthetic construct
  source 1..20: mol_type = other RNA
ccgggagtacggttctctgc

SEQ ID NO: 182 - RNA, 20 nt, synthetic construct
  source 1..20: mol_type = other RNA
cgggagtacggttctctgca

SEQ ID NO: 183 - RNA, 20 nt, synthetic construct
  source 1..20: mol_type = other RNA
cctgcagagaaccgtactcc

SEQ ID NO: 184 - RNA, 20 nt, synthetic construct
  source 1..20: mol_type = other RNA
cggttctctgcagggtagcc

SEQ ID NO: 185 - RNA, 20 nt, synthetic construct
  source 1..20: mol_type = other RNA
ctctgcagggtagcccggct

SEQ ID NO: 186 - RNA, 20 nt, synthetic construct
  source 1..20: mol_type = other RNA
tctgcagggtagcccggctc

SEQ ID NO: 187 - RNA, 20 nt, synthetic construct
  source 1..20: mol_type = other RNA
ctgcagggtagcccggctcg

SEQ ID NO: 188 - RNA, 20 nt, synthetic construct
  source 1..20: mol_type = other RNA
tgcagggtagcccggctcgg

SEQ ID NO: 189 - RNA, 20 nt, synthetic construct
  source 1..20: mol_type = other RNA
agggtagcccggctcggggg

SEQ ID NO: 190 - RNA, 20 nt, synthetic construct
  source 1..20: mol_type = other RNA
gcccggctcgggggtggcga

SEQ ID NO: 191 - RNA, 20 nt, synthetic construct
  source 1..20: mol_type = other RNA
cggctcgggggtggcgaagg

SEQ ID NO: 192 - RNA, 20 nt, synthetic construct
  source 1..20: mol_type = other RNA
gccttcgccacccccgagcc

SEQ ID NO: 193 - RNA, 20 nt, synthetic construct
  source 1..20: mol_type = other RNA
cgccttcgccacccccgagc

SEQ ID NO: 194 - RNA, 20 nt, synthetic construct
  source 1..20: mol_type = other RNA
ggggtggcgaaggcggtgaa

SEQ ID NO: 195 - RNA, 20 nt, synthetic construct
  source 1..20: mol_type = other RNA
gaaggcggtgaatggagacc

SEQ ID NO: 196 - RNA, 20 nt, synthetic construct
  source 1..20: mol_type = other RNA
aaggcggtgaatggagaccc

SEQ ID NO: 197 - RNA, 20 nt, synthetic construct
  source 1..20: mol_type = other RNA
aggcggtgaatggagacccg

SEQ ID NO: 198 - RNA, 20 nt, synthetic construct
  source 1..20: mol_type = other RNA
ggcggtgaatggagacccgg

SEQ ID NO: 199 - RNA, 20 nt, synthetic construct
  source 1..20: mol_type = other RNA
gcggtgaatggagacccggg

SEQ ID NO: 200 - RNA, 20 nt, synthetic construct
  source 1..20: mol_type = other RNA
cggtgaatggagacccgggg

SEQ ID NO: 201 - RNA, 20 nt, synthetic construct
  source 1..20: mol_type = other RNA
ggtgaatggagacccggggg

SEQ ID NO: 202 - RNA, 20 nt, synthetic construct
  source 1..20: mol_type = other RNA
gaatggagacccgggggggg

SEQ ID NO: 203 - RNA, 20 nt, synthetic construct
  source 1..20: mol_type = other RNA
aatggagacccggggggggc

SEQ ID NO: 204 - RNA, 20 nt, synthetic construct
  source 1..20: mol_type = other RNA
atggagacccggggggggcg

SEQ ID NO: 205 - RNA, 20 nt, synthetic construct
  source 1..20: mol_type = other RNA
tggagacccggggggggcgg

SEQ ID NO: 206 - RNA, 20 nt, synthetic construct
  source 1..20: mol_type = other RNA
agacccggggggggcggggg

SEQ ID NO: 207 - RNA, 20 nt, synthetic construct
  source 1..20: mol_type = other RNA
gacccggggggggcgggggc

SEQ ID NO: 208 - RNA, 20 nt, synthetic construct
  source 1..20: mol_type = other RNA
acccggggggggcgggggcg

SEQ ID NO: 209 - RNA, 20 nt, synthetic construct
  source 1..20: mol_type = other RNA
ggggggcgggggcggggccg

SEQ ID NO: 210 - RNA, 20 nt, synthetic construct
  source 1..20: mol_type = other RNA
ggccccgcccccgccccccc

SEQ ID NO: 211 - RNA, 20 nt, synthetic construct
  source 1..20: mol_type = other RNA
gggcgggggcggggccgcgg

SEQ ID NO: 212 - RNA, 20 nt, synthetic construct
  source 1..20: mol_type = other RNA
ggcgggggcggggccgcggc

SEQ ID NO: 213 - RNA, 20 nt, synthetic construct
  source 1..20: mol_type = other RNA
gggggcggggccgcggcggg

SEQ ID NO: 214 - RNA, 20 nt, synthetic construct
  source 1..20: mol_type = other RNA
ggggcggggccgcggcgggc

SEQ ID NO: 215 - RNA, 20 nt, synthetic construct
  source 1..20: mol_type = other RNA
gggcggggccgcggcgggcg

SEQ ID NO: 216 - RNA, 20 nt, synthetic construct
  source 1..20: mol_type = other RNA
cggggccgcggcgggcgggg

SEQ ID NO: 217 - RNA, 20 nt, synthetic construct
  source 1..20: mol_type = other RNA
ggggccgcggcgggcggggc

SEQ ID NO: 218 - RNA, 20 nt, synthetic construct
  source 1..20: mol_type = other RNA
gggccgcggcgggcggggcg

SEQ ID NO: 219 - RNA, 20 nt, synthetic construct
  source 1..20: mol_type = other RNA
ccgcggcgggcggggcgggg

SEQ ID NO: 220 - RNA, 20 nt, synthetic construct
  source 1..20: mol_type = other RNA
cgcggcgggcggggcggggc

SEQ ID NO: 221 - RNA, 20 nt, synthetic construct
  source 1..20: mol_type = other RNA
gcggcgggcggggcggggcg

SEQ ID NO: 222 - RNA, 20 nt, synthetic construct
  source 1..20: mol_type = other RNA
ccgccccgccccgcccgccg

SEQ ID NO: 223 - RNA, 20 nt, synthetic construct
  source 1..20: mol_type = other RNA
cggggcggggcggggcgagt

SEQ ID NO: 224 - RNA, 20 nt, synthetic construct
  source 1..20: mol_type = other RNA
ggggcggggcggggcgagtc

SEQ ID NO: 225 - RNA, 20 nt, synthetic construct
  source 1..20: mol_type = other RNA
gggcggggcgagtcgggccg

SEQ ID NO: 226 - RNA, 20 nt, synthetic construct
  source 1..20: mol_type = other RNA
gggcgagtcgggccgaggcc

SEQ ID NO: 227 - RNA, 20 nt, synthetic construct
  source 1..20: mol_type = other RNA
ggcgagtcgggccgaggccc

SEQ ID NO: 228 - RNA, 20 nt, synthetic construct
  source 1..20: mol_type = other RNA
gcgagtcgggccgaggcccg

SEQ ID NO: 229 - RNA, 20 nt, synthetic construct
  source 1..20: mol_type = other RNA
cgagtcgggccgaggcccgg

SEQ ID NO: 230 - RNA, 20 nt, synthetic construct
  source 1..20: mol_type = other RNA
gtcgggccgaggcccggggg

SEQ ID NO: 231 - RNA, 20 nt, synthetic construct
  source 1..20: mol_type = other RNA
tcgggccgaggcccgggggc

SEQ ID NO: 232 - RNA, 20 nt, synthetic construct
  source 1..20: mol_type = other RNA
cgggccgaggcccgggggcg

SEQ ID NO: 233 - RNA, 20 nt, synthetic construct
  source 1..20: mol_type = other RNA
cgaggcccgggggcggggcc

SEQ ID NO: 234 - RNA, 20 nt, synthetic construct
  source 1..20: mol_type = other RNA
ctggccccgcccccgggcct

SEQ ID NO: 235 - RNA, 20 nt, synthetic construct
  source 1..20: mol_type = other RNA
cgggggcggggccaggcgcg

SEQ ID NO: 236 - RNA, 20 nt, synthetic construct
  source 1..20: mol_type = other RNA
gcgcgcctggccccgccccc

SEQ ID NO: 237 - RNA, 20 nt, synthetic construct
  source 1..20: mol_type = other RNA
ggcggggccaggcgcgcggc

SEQ ID NO: 238 - RNA, 20 nt, synthetic construct
  source 1..20: mol_type = other RNA
ggccaggcgcgcggctggcc

SEQ ID NO: 239 - RNA, 20 nt, synthetic construct
  source 1..20: mol_type = other RNA
gccaggcgcgcggctggcct

SEQ ID NO: 240 - RNA, 20 nt, synthetic construct
  source 1..20: mol_type = other RNA
cgcgcggctggcctgggcct

SEQ ID NO: 241 - RNA, 20 nt, synthetic construct
  source 1..20: mol_type = other RNA
gcctgggcctaggccgctgc

SEQ ID NO: 242 - RNA, 20 nt, synthetic construct
  source 1..20: mol_type = other RNA
cctgggcctaggccgctgct

SEQ ID NO: 243 - RNA, 20 nt, synthetic construct
  source 1..20: mol_type = other RNA
cccagcagcggcctaggccc

SEQ ID NO: 244 - RNA, 20 nt, synthetic construct
  source 1..20: mol_type = other RNA
gcggagcccagcagcggcct

SEQ ID NO: 245 - RNA, 20 nt, synthetic construct
  source 1..20: mol_type = other RNA
ctgctgggctccgcctcgcc

SEQ ID NO: 246 - RNA, 20 nt, synthetic construct
  source 1..20: mol_type = other RNA
ggcgaggcggagcccagcag

SEQ ID NO: 247 - RNA, 20 nt, synthetic construct
  source 1..20: mol_type = other RNA
tccgcctcgcccggctacgc

SEQ ID NO: 248 - RNA, 20 nt, synthetic construct
  source 1..20: mol_type = other RNA
gcctcgcccggctacgcagg

SEQ ID NO: 249 - RNA, 20 nt, synthetic construct
  source 1..20: mol_type = other RNA
gcctgcgtagccgggcgagg

SEQ ID NO: 250 - RNA, 20 nt, synthetic construct
  source 1..20: mol_type = other RNA
cgcccggctacgcaggcggc

SEQ ID NO: 251 - RNA, 20 nt, synthetic construct
  source 1..20: mol_type = other RNA
gcccggctacgcaggcggca

SEQ ID NO: 252 - RNA, 20 nt, synthetic construct
  source 1..20: mol_type = other RNA
gccgcctgcgtagccgggcg

SEQ ID NO: 253 - RNA, 20 nt, synthetic construct
  source 1..20: mol_type = other RNA
ctacgcaggcggcagggctg

SEQ ID NO: 254 - RNA, 20 nt, synthetic construct
  source 1..20: mol_type = other RNA
agccctgccgcctgcgtagc

SEQ ID NO: 255 - RNA, 20 nt, synthetic construct
  source 1..20: mol_type = other RNA
caggcggcagggctgcggca

SEQ ID NO: 256 - RNA, 20 nt, synthetic construct
  source 1..20: mol_type = other RNA
aggcggcagggctgcggcac

SEQ ID NO: 257 - RNA, 20 nt, synthetic construct
  source 1..20: mol_type = other RNA
ggcagggctgcggcacgggc

SEQ ID NO: 258 - RNA, 20 nt, synthetic construct
  source 1..20: mol_type = other RNA
gcagggctgcggcacgggcc

SEQ ID NO: 259 - RNA, 20 nt, synthetic construct
  source 1..20: mol_type = other RNA
gggctgcggcacgggccggg

SEQ ID NO: 260 - RNA, 20 nt, synthetic construct
  source 1..20: mol_type = other RNA
gcacgggccgggcggcacca

SEQ ID NO: 261 - RNA, 20 nt, synthetic construct
  source 1..20: mol_type = other RNA
cgggccgggcggcaccatgg

SEQ ID NO: 262 - RNA, 20 nt, synthetic construct
  source 1..20: mol_type = other RNA
gccgggcggcaccatggcgg

SEQ ID NO: 263 - RNA, 20 nt, synthetic construct
  source 1..20: mol_type = other RNA
gggcggcaccatggcggcgg

SEQ ID NO: 264 - RNA, 20 nt, synthetic construct
  source 1..20: mol_type = other RNA
gccgccgccatggtgccgcc

SEQ ID NO: 265 - RNA, 20 nt, synthetic construct
  source 1..20: mol_type = other RNA
agcaggcgccgccgccgcca

SEQ ID NO: 266 - RNA, 20 nt, synthetic construct
  source 1..20: mol_type = other RNA
ggcggcggcgcctgctgctg

SEQ ID NO: 267 - RNA, 20 nt, synthetic construct
  source 1..20: mol_type = other RNA
ggcggcgcctgctgctgcgg

SEQ ID NO: 268 - RNA, 20 nt, synthetic construct
  source 1..20: mol_type = other RNA
tgctgcggcggcttcttccg

SEQ ID NO: 269 - RNA, 20 nt, synthetic construct
  source 1..20: mol_type = other RNA
ggcttcttccgaggcgccag

SEQ ID NO: 270 - RNA, 20 nt, synthetic construct
  source 1..20: mol_type = other RNA
cgcactcgccgctggcgcct

SEQ ID NO: 271 - RNA, 20 nt, synthetic construct
  source 1..20: mol_type = other RNA
tctgcagtcgcactcgccgc

SEQ ID NO: 272 - RNA, 20 nt, synthetic construct
  source 1..20: mol_type = other RNA
gagtgcgactgcagagcccg

SEQ ID NO: 273 - RNA, 20 nt, synthetic construct
  source 1..20: mol_type = other RNA
gcgactgcagagcccgaggc

SEQ ID NO: 274 - RNA, 20 nt, synthetic construct
  source 1..20: mol_type = other RNA
cgactgcagagcccgaggcc

SEQ ID NO: 275 - RNA, 20 nt, synthetic construct
  source 1..20: mol_type = other RNA
gactgcagagcccgaggccg

SEQ ID NO: 276 - RNA, 20 nt, synthetic construct
  source 1..20: mol_type = other RNA
agagcccgaggccggggacc

SEQ ID NO: 277 - RNA, 20 nt, synthetic construct
  source 1..20: mol_type = other RNA
ctgtcctggtccccggcctc

SEQ ID NO: 278 - RNA, 20 nt, synthetic construct
  source 1..20: mol_type = other RNA
actgtcctggtccccggcct

SEQ ID NO: 279 - RNA, 20 nt, synthetic construct
  source 1..20: mol_type = other RNA
cggggaccaggacagtcgcg

SEQ ID NO: 280 - RNA, 20 nt, synthetic construct
  source 1..20: mol_type = other RNA
ctcgcgactgtcctggtccc

SEQ ID NO: 281 - RNA, 20 nt, synthetic construct
  source 1..20: mol_type = other RNA
ctcgaacctcgcgactgtcc

SEQ ID NO: 282 - RNA, 20 nt, synthetic construct
  source 1..20: mol_type = other RNA
ttcgagtgttgcagagcctg

SEQ ID NO: 283 - RNA, 20 nt, synthetic construct
  source 1..20: mol_type = other RNA
tcgagtgttgcagagcctgc

SEQ ID NO: 284 - RNA, 20 nt, synthetic construct
  source 1..20: mol_type = other RNA
cgagtgttgcagagcctgcg

SEQ ID NO: 285 - RNA, 20 nt, synthetic construct
  source 1..20: mol_type = other RNA
tgcggggcaagatctgtaag

SEQ ID NO: 286 - RNA, 20 nt, synthetic construct
  source 1..20: mol_type = other RNA
gcggggcaagatctgtaagc

SEQ ID NO: 287 - RNA, 20 nt, synthetic construct
  source 1..20: mol_type = other RNA
cggggcaagatctgtaagcg

SEQ ID NO: 288 - RNA, 20 nt, synthetic construct
  source 1..20: mol_type = other RNA
ggggcaagatctgtaagcgg

SEQ ID NO: 289 - RNA, 20 nt, synthetic construct
  source 1..20: mol_type = other RNA
caagatctgtaagcgggggc

SEQ ID NO: 290 - RNA, 20 nt, synthetic construct
  source 1..20: mol_type = other RNA
aagatctgtaagcgggggct

SEQ ID NO: 291 - RNA, 20 nt, synthetic construct
  source 1..20: mol_type = other RNA
tgtaagcgggggctgggctg

SEQ ID NO: 292 - RNA, 20 nt, synthetic construct
  source 1..20: mol_type = other RNA
gtaagcgggggctgggctga

SEQ ID NO: 293 - RNA, 20 nt, synthetic construct
  source 1..20: mol_type = other RNA
taagcgggggctgggctgag

SEQ ID NO: 294 - RNA, 20 nt, synthetic construct
  source 1..20: mol_type = other RNA
tttgaaatctgaaatacttc

SEQ ID NO: 295 - RNA, 20 nt, synthetic construct
  source 1..20: mol_type = other RNA
ggtcctaagcatttcagata

SEQ ID NO: 296 - RNA, 20 nt, synthetic construct
  source 1..20: mol_type = other RNA
gtcctaagcatttcagataa

SEQ ID NO: 297 - RNA, 20 nt, synthetic construct
  source 1..20: mol_type = other RNA
atcccttatctgaaatgctt

SEQ ID NO: 298 - RNA, 20 nt, synthetic construct
  source 1..20: mol_type = other RNA
ttaactggcttgaatgactc

SEQ ID NO: 299 - RNA, 20 nt, synthetic construct
  source 1..20: mol_type = other RNA
ccagttaatgccaaattctg

SEQ ID NO: 300 - RNA, 20 nt, synthetic construct
  source 1..20: mol_type = other RNA
ccacagaatttggcattaac

SEQ ID NO: 301 - RNA, 20 nt, synthetic construct
  source 1..20: mol_type = other RNA
gagacagaatccacagaatt

SEQ ID NO: 302 - RNA, 20 nt, synthetic construct
  source 1..20: mol_type = other RNA
aaaaaatagaagagctacta

SEQ ID NO: 303 - RNA, 20 nt, synthetic construct
  source 1..20: mol_type = other RNA
aggtaacaaagggagatagg

SEQ ID NO: 304 - RNA, 20 nt, synthetic construct
  source 1..20: mol_type = other RNA
ttaaggtaacaaagggagat

SEQ ID NO: 305 - RNA, 20 nt, synthetic construct
  source 1..20: mol_type = other RNA
tccctttgttaccttaatgt

SEQ ID NO: 306 - RNA, 20 nt, synthetic construct
  source 1..20: mol_type = other RNA
gcctacattaaggtaacaaa

SEQ ID NO: 307 - RNA, 20 nt, synthetic construct
  source 1..20: mol_type = other RNA
agcctacattaaggtaacaa

SEQ ID NO: 308 - RNA, 20 nt, synthetic construct
  source 1..20: mol_type = other RNA
agtctgaagagcctacatta

SEQ ID NO: 309 - RNA, 20 nt, synthetic construct
  source 1..20: mol_type = other RNA
ttctgtgtggttcatacttc

SEQ ID NO: 310 - RNA, 20 nt, synthetic construct
  source 1..20: mol_type = other RNA
ggtcgctaaaagtttctgtg

SEQ ID NO: 311 - RNA, 20 nt, synthetic construct
  source 1..20: mol_type = other RNA
ctttattcagtaggcaacaa

SEQ ID NO: 312 - RNA, 20 nt, synthetic construct
  source 1..20: mol_type = other RNA
actttattcagtaggcaaca

SEQ ID NO: 313 - RNA, 20 nt, synthetic construct
  source 1..20: mol_type = other RNA
aaggtttaactttattcagt

SEQ ID NO: 314 - RNA, 20 nt, synthetic construct
  source 1..20: mol_type = other RNA
aataaagttaaaccttagct

SEQ ID NO: 315 - RNA, 20 nt, synthetic construct
  source 1..20: mol_type = other RNA
aaaccttagcttggcatttt

SEQ ID NO: 316 - RNA, 20 nt, synthetic construct
  source 1..20: mol_type = other RNA
gaacctaaaatgccaagcta

SEQ ID NO: 317 - RNA, 20 nt, synthetic construct
  source 1..20: mol_type = other RNA
tgagagggaaaagattataa

SEQ ID NO: 318 - RNA, 20 nt, synthetic construct
  source 1..20: mol_type = other RNA
gagatgaagggggaatgaga

SEQ ID NO: 319 - RNA, 20 nt, synthetic construct
  source 1..20: mol_type = other RNA
agagatgaagggggaatgag

SEQ ID NO: 320 - RNA, 20 nt, synthetic construct
  source 1..20: mol_type = other RNA
agcataaagagagatgaagg

SEQ ID NO: 321 - RNA, 20 nt, synthetic construct
  source 1..20: mol_type = other RNA
aagcataaagagagatgaag

SEQ ID NO: 322 - RNA, 20 nt, synthetic construct
  source 1..20: mol_type = other RNA
aaagcataaagagagatgaa

SEQ ID NO: 323 - RNA, 20 nt, synthetic construct
  source 1..20: mol_type = other RNA
taaagcataaagagagatga

SEQ ID NO: 324 - RNA, 20 nt, synthetic construct
  source 1..20: mol_type = other RNA
actattcactgcctcctcga

SEQ ID NO: 325 - RNA, 20 nt, synthetic construct
  source 1..20: mol_type = other RNA
caagaagagcaccatcgagg

SEQ ID NO: 326 - RNA, 20 nt, synthetic construct
  source 1..20: mol_type = other RNA
caacaagaagagcaccatcg

SEQ ID NO: 327 - RNA, 20 nt, synthetic construct
  source 1..20: mol_type = other RNA
catgaacaagttctggaggg

SEQ ID NO: 328 - RNA, 20 nt, synthetic construct
  source 1..20: mol_type = other RNA
taacatgaacaagttctgga

SEQ ID NO: 329 - RNA, 20 nt, synthetic construct
  source 1..20: mol_type = other RNA
ataacatgaacaagttctgg

SEQ ID NO: 330 - RNA, 20 nt, synthetic construct
  source 1..20: mol_type = other RNA
ggcataacatgaacaagttc

SEQ ID NO: 331 - RNA, 20 nt, synthetic construct
  source 1..20: mol_type = other RNA
ttcatgttatgccttcctcc

SEQ ID NO: 332 - RNA, 20 nt, synthetic construct
  source 1..20: mol_type = other RNA
aggataacgttccaggagga

SEQ ID NO: 333 - RNA, 20 nt, synthetic construct
  source 1..20: mol_type = other RNA
tcggaggataacgttccagg

SEQ ID NO: 334 - RNA, 20 nt, synthetic construct
  source 1..20: mol_type = other RNA
ggatcggaggataacgttcc

SEQ ID NO: 335 - RNA, 20 nt, synthetic construct
  source 1..20: mol_type = other RNA
atacagaaattggggatcgg

SEQ ID NO: 336 - RNA, 20 nt, synthetic construct
  source 1..20: mol_type = other RNA
aaaatacagaaattggggat

SEQ ID NO: 337 - RNA, 20 nt, synthetic construct
  source 1..20: mol_type = other RNA
ttttcaaaatacagaaattg

SEQ ID NO: 338 - RNA, 20 nt, synthetic construct
  source 1..20: mol_type = other RNA
attttcaaaatacagaaatt

SEQ ID NO: 339 - RNA, 20 nt, synthetic construct
  source 1..20: mol_type = other RNA
tattttcaaaatacagaaat

SEQ ID NO: 340 - RNA, 20 nt, synthetic construct
  source 1..20: mol_type = other RNA
gtattaatttattcagtaag

SEQ ID NO: 341 - RNA, 20 nt, synthetic construct
  source 1..20: mol_type = other RNA
tggtagctattattatgatt

SEQ ID NO: 342 - RNA, 20 nt, synthetic construct
  source 1..20: mol_type = other RNA
ccccaaataatccttaactt

SEQ ID NO: 343 - RNA, 20 nt, synthetic construct
  source 1..20: mol_type = other RNA
ccaaagttaaggattatttg

SEQ ID NO: 344 - RNA, 20 nt, synthetic construct
  source 1..20: mol_type = other RNA
tccaaagttaaggattattt

SEQ ID NO: 345 - RNA, 20 nt, synthetic construct
  source 1..20: mol_type = other RNA
atccaaagttaaggattatt

SEQ ID NO: 346 - RNA, 20 nt, synthetic construct
  source 1..20: mol_type = other RNA
aactttggatcatcttgtcc

SEQ ID NO: 347 - RNA, 20 nt, synthetic construct
  source 1..20: mol_type = other RNA
gacaagatgatccaaagtta

SEQ ID NO: 348 - RNA, 20 nt, synthetic construct
  source 1..20: mol_type = other RNA
gatcatcttgtccaggaccc

SEQ ID NO: 349 - RNA, 20 nt, synthetic construct
  source 1..20: mol_type = other RNA
actgcaaagagccagggtcc

SEQ ID NO: 350 - RNA, 20 nt, synthetic construct
  source 1..20: mol_type = other RNA
tggctctttgcagtttttct

SEQ ID NO: 351 - RNA, 20 nt, synthetic construct
  source 1..20: mol_type = other RNA
ggctctttgcagtttttcta

SEQ ID NO: 352 - RNA, 20 nt, synthetic construct
  source 1..20: mol_type = other RNA
gctctttgcagtttttctag

SEQ ID NO: 353 - RNA, 20 nt, synthetic construct
  source 1..20: mol_type = other RNA
tagaaaaactgcaaagagcc

SEQ ID NO: 354 - RNA, 20 nt, synthetic construct
  source 1..20: mol_type = other RNA
ttctaggggattaatcccac

SEQ ID NO: 355 - RNA, 20 nt, synthetic construct
  source 1..20: mol_type = other RNA
tctaggggattaatcccact

SEQ ID NO: 356 - RNA, 20 nt, synthetic construct
  source 1..20: mol_type = other RNA
aatcccactgggacccatgt

SEQ ID NO: 357 - RNA, 20 nt, synthetic construct
  source 1..20: mol_type = other RNA
gcgccaacatgggtcccagt

SEQ ID NO: 358 - RNA, 20 nt, synthetic construct
  source 1..20: mol_type = other RNA
ggcgccaacatgggtcccag

SEQ ID NO: 359 - RNA, 20 nt, synthetic construct
  source 1..20: mol_type = other RNA
acaagggtaggcgccaacat

SEQ ID NO: 360 - RNA, 20 nt, synthetic construct
  source 1..20: mol_type = other RNA
tacaagggtaggcgccaaca

SEQ ID NO: 361 - RNA, 20 nt, synthetic construct
  source 1..20: mol_type = other RNA
ggcgcctacccttgtacttc

SEQ ID NO: 362 - RNA, 20 nt, synthetic construct
  source 1..20: mol_type = other RNA
gttacctgaagtacaagggt

SEQ ID NO: 363 - RNA, 20 nt, synthetic construct
  source 1..20: mol_type = other RNA
aaaggttacctgaagtacaa

SEQ ID NO: 364 - RNA, 20 nt, synthetic construct
  source 1..20: mol_type = other RNA
caaaggttacctgaagtaca

SEQ ID NO: 365 - RNA, 20 nt, synthetic construct
  source 1..20: mol_type = other RNA
ggtaacctttgaagcagacc

SEQ ID NO: 366 - RNA, 20 nt, synthetic construct
  source 1..20: mol_type = other RNA
taggtccaggtctgcttcaa

SEQ ID NO: 367 - RNA, 20 nt, synthetic construct
  source 1..20: mol_type = other RNA
gaaagagatgtagtaggtcc

SEQ ID NO: 368 - RNA, 20 nt, synthetic construct
  source 1..20: mol_type = other RNA
cctactacatctctttcaga

SEQ ID NO: 369 - RNA, 20 nt, synthetic construct
  source 1..20: mol_type = other RNA
ctactacatctctttcagat

SEQ ID NO: 370 - RNA, 20 nt, synthetic construct
  source 1..20: mol_type = other RNA
ccatctgaaagagatgtagt

SEQ ID NO: 371 - RNA, 20 nt, synthetic construct
  source 1..20: mol_type = other RNA
gtctttctattcaactctta

SEQ ID NO: 372 - RNA, 20 nt, synthetic construct
  source 1..20: mol_type = other RNA
gagttgaatagaaagactct

SEQ ID NO: 373 - RNA, 20 nt, synthetic construct
  source 1..20: mol_type = other RNA
aatagaaagactctaggctt

SEQ ID NO: 374 - RNA, 20 nt, synthetic construct
  source 1..20: mol_type = other RNA
acatagctggtaaggttatc

SEQ ID NO: 375 - RNA, 20 nt, synthetic construct
  source 1..20: mol_type = other RNA
attcagttacatagctggta

SEQ ID NO: 376 - RNA, 20 nt, synthetic construct
  source 1..20: mol_type = other RNA
aaaaaattcagttacatagc

SEQ ID NO: 377 - RNA, 20 nt, synthetic construct
  source 1..20: mol_type = other RNA
tttttttcttaatttatgaa

SEQ ID NO: 378 - RNA, 20 nt, synthetic construct
  source 1..20: mol_type = other RNA
ttttttcttaatttatgaaa

SEQ ID NO: 379 - RNA, 20 nt, synthetic construct
  source 1..20: mol_type = other RNA
aatagtaatgcttatctcac

SEQ ID NO: 380 - RNA, 20 nt, synthetic construct
  source 1..20: mol_type = other RNA
atagtaatgcttatctcaca

SEQ ID NO: 381 - RNA, 20 nt, synthetic construct
  source 1..20: mol_type = other RNA
tctcaaatgtttcatttgat

SEQ ID NO: 382 - RNA, 20 nt, synthetic construct
  source 1..20: mol_type = other RNA
gaaaatatttaacactgtct

SEQ ID NO: 383 - RNA, 20 nt, synthetic construct
  source 1..20: mol_type = other RNA
tccctgtagtgtcctcccct

SEQ ID NO: 384 - RNA, 20 nt, synthetic construct
  source 1..20: mol_type = other RNA
tcctaggggaggacactaca

SEQ ID NO: 385 - RNA, 20 nt, synthetic construct
  source 1..20: mol_type = other RNA
gtcctaggggaggacactac

SEQ ID NO: 386 - RNA, 20 nt, synthetic construct
  source 1..20: mol_type = other RNA
gtttcttcatgtcctagggg

SEQ ID NO: 387 - RNA, 20 nt, synthetic construct
  source 1..20: mol_type = other RNA
tatgtttcttcatgtcctag

SEQ ID NO: 388 - RNA, 20 nt, synthetic construct
  source 1..20: mol_type = other RNA
gtatgtttcttcatgtccta

SEQ ID NO: 389 - RNA, 20 nt, synthetic construct
  source 1..20: mol_type = other RNA
tgtatgtttcttcatgtcct

SEQ ID NO: 390 - RNA, 20 nt, synthetic construct
  source 1..20: mol_type = other RNA
aaacatacatgcaaaccttc

SEQ ID NO: 391 - RNA, 20 nt, synthetic construct
  source 1..20: mol_type = other RNA
gtgcatgcatttatacctga

SEQ ID NO: 392 - RNA, 20 nt, synthetic construct
  source 1..20: mol_type = other RNA
taatcctcaaacatccacat

SEQ ID NO: 393 - RNA, 20 nt, synthetic construct
  source 1..20: mol_type = other RNA
aaacatccacataggcacat

SEQ ID NO: 394 - RNA, 20 nt, synthetic construct
  source 1..20: mol_type = other RNA
tgtgcctatgtggatgtttg

SEQ ID NO: 395 - RNA, 20 nt, synthetic construct
  source 1..20: mol_type = other RNA
tatgtacctatgtgcctatg

SEQ ID NO: 396 - RNA, 20 nt, synthetic construct
  source 1..20: mol_type = other RNA
ctttgatagtagcctgatat

SEQ ID NO: 397 - RNA, 20 nt, synthetic construct
  source 1..20: mol_type = other RNA
caatatcaggctactatcaa

SEQ ID NO: 398 - RNA, 20 nt, synthetic construct
  source 1..20: mol_type = other RNA
aggacaaaaattccaatatc

SEQ ID NO: 399 - RNA, 20 nt, synthetic construct
  source 1..20: mol_type = other RNA
tgtcctagataaaatttata

SEQ ID NO: 400 - RNA, 20 nt, synthetic construct
  source 1..20: mol_type = other RNA
ctagataaaatttatatggt

SEQ ID NO: 401 - RNA, 20 nt, synthetic construct
  source 1..20: mol_type = other RNA
ctaccatataaattttatct

SEQ ID NO: 402 - RNA, 20 nt, synthetic construct
  source 1..20: mol_type = other RNA
actgtctgatgactgttaca

SEQ ID NO: 403 - RNA, 20 nt, synthetic construct
  source 1..20: mol_type = other RNA
tgatcttgtacatagagagt

SEQ ID NO: 404 - RNA, 20 nt, synthetic construct
  source 1..20: mol_type = other RNA
actgttaagattaacagaaa

SEQ ID NO: 405 - RNA, 20 nt, synthetic construct
  source 1..20: mol_type = other RNA
tcttaacagttttgatttga

SEQ ID NO: 406 - RNA, 20 nt, synthetic construct
  source 1..20: mol_type = other RNA
catgtctctcctcttttttc

SEQ ID NO: 407 - RNA, 20 nt, synthetic construct
  source 1..20: mol_type = other RNA
gcataaatacctgaaaaaag

SEQ ID NO: 408 - RNA, 20 nt, synthetic construct
  source 1..20: mol_type = other RNA
gaaatgaggtagctcaagga

SEQ ID NO: 409 - RNA, 20 nt, synthetic construct
  source 1..20: mol_type = other RNA
ttgagctacctcatttcttg

SEQ ID NO: 410 - RNA, 20 nt, synthetic construct
  source 1..20: mol_type = other RNA
acaagaaatgaggtagctca

SEQ ID NO: 411 - RNA, 20 nt, synthetic construct
  source 1..20: mol_type = other RNA
tatgggcaccacaagaaatg

SEQ ID NO: 412 - RNA, 20 nt, synthetic construct
  source 1..20: mol_type = other RNA
tgcccatacttattagtatt

SEQ ID NO: 413 - RNA, 20 nt, synthetic construct
  source 1..20: mol_type = other RNA
ggcctaatactaataagtat

SEQ ID NO: 414 - RNA, 20 nt, synthetic construct
  source 1..20: mol_type = other RNA
tggcctaatactaataagta

SEQ ID NO: 415 - RNA, 20 nt, synthetic construct
  source 1..20: mol_type = other RNA
gataaataagtaaaaatgta

SEQ ID NO: 416 - RNA, 20 nt, synthetic construct
  source 1..20: mol_type = other RNA
ccatgtgtgttagcctaata

SEQ ID NO: 417 - RNA, 20 nt, synthetic construct
  source 1..20: mol_type = other RNA
ccttattaggctaacacaca

SEQ ID NO: 418 - RNA, 20 nt, synthetic construct
  source 1..20: mol_type = other RNA
aaaaagtctgtgtccttatt

SEQ ID NO: 419 - RNA, 20 nt, synthetic construct
  source 1..20: mol_type = other RNA
tcatatcctagcagcttagt

SEQ ID NO: 420 - RNA, 20 nt, synthetic construct
  source 1..20: mol_type = other RNA
tgagtacctactaagctgct

SEQ ID NO: 421 - RNA, 20 nt, synthetic construct
  source 1..20: mol_type = other RNA
gaatgtgtgaacttcagcac

SEQ ID NO: 422 - RNA, 20 nt, synthetic construct
  source 1..20: mol_type = other RNA
aaagattctttaagtgcttt

SEQ ID NO: 423 - RNA, 20 nt, synthetic construct
  source 1..20: mol_type = other RNA
tgcttttggtaactgtatac

SEQ ID NO: 424 - RNA, 20 nt, synthetic construct
  source 1..20: mol_type = other RNA
gagactttttaaaaaatctt

SEQ ID NO: 425 - RNA, 20 nt, synthetic construct
  source 1..20: mol_type = other RNA
ataaatcaacttaaatgaaa

SEQ ID NO: 426 - RNA, 20 nt, synthetic construct
  source 1..20: mol_type = other RNA
gaagtttacatacaatttta

SEQ ID NO: 427 - RNA, 20 nt, synthetic construct
  source 1..20: mol_type = other RNA
caattttatggtttgtgatg

SEQ ID NO: 428 - RNA, 20 nt, synthetic construct
  source 1..20: mol_type = other RNA
tatggtttgtgatgtggtat

SEQ ID NO: 429 - RNA, 20 nt, synthetic construct
  source 1..20: mol_type = other RNA
ctttggcatgggcaaaaaag

SEQ ID NO: 430 - RNA, 20 nt, synthetic construct
  source 1..20: mol_type = other RNA
tgtgtatataactttggcat

SEQ ID NO: 431 - RNA, 20 nt, synthetic construct
  source 1..20: mol_type = other RNA
gtgtgtatataactttggca

SEQ ID NO: 432 - RNA, 20 nt, synthetic construct
  source 1..20: mol_type = other RNA
aatgcgtgtgtatataactt

SEQ ID NO: 433 - RNA, 20 nt, synthetic construct
  source 1..20: mol_type = other RNA
tcattatatattttatgcta

SEQ ID NO: 434 - RNA, 20 nt, synthetic construct
  source 1..20: mol_type = other RNA
tatatattttatgctaagga

SEQ ID NO: 435 - RNA, 20 nt, synthetic construct
  source 1..20: mol_type = other RNA
ctaaggatggtgctaagaat

SEQ ID NO: 436 - RNA, 20 nt, synthetic construct
  source 1..20: mol_type = other RNA
ctataaacttcttgaggaag

SEQ ID NO: 437 - RNA, 20 nt, synthetic construct
  source 1..20: mol_type = other RNA
actataaacttcttgaggaa

SEQ ID NO: 438 - RNA, 20 nt, synthetic construct
  source 1..20: mol_type = other RNA
aactataaacttcttgagga

SEQ ID NO: 439 - RNA, 20 nt, synthetic construct
  source 1..20: mol_type = other RNA
actgaactataaacttcttg

SEQ ID NO: 440 - RNA, 20 nt, synthetic construct
  source 1..20: mol_type = other RNA
acaaccaaactgcttttgct

SEQ ID NO: 441 - RNA, 20 nt, synthetic construct
  source 1..20: mol_type = other RNA
acaaccaagcaaaagcagtt

SEQ ID NO: 442 - RNA, 20 nt, synthetic construct
  source 1..20: mol_type = other RNA
ggctctctaatgttttgagg

SEQ ID NO: 443 - RNA, 20 nt, synthetic construct
  source 1..20: mol_type = other RNA
caaaacattagagagccctg

SEQ ID NO: 444 - RNA, 20 nt, synthetic construct
  source 1..20: mol_type = other RNA
cagggctctctaatgttttg

SEQ ID NO: 445 - RNA, 20 nt, synthetic construct
  source 1..20: mol_type = other RNA
aatttgaagactgagcctca

SEQ ID NO: 446 - RNA, 20 nt, synthetic construct
  source 1..20: mol_type = other RNA
aaatttgaagactgagcctc

SEQ ID NO: 447 - RNA, 20 nt, synthetic construct
  source 1..20: mol_type = other RNA
tgtgattttgtattgtctct

SEQ ID NO: 448 - RNA, 20 nt, synthetic construct
  source 1..20: mol_type = other RNA
gagacaatacaaaatcacaa

SEQ ID NO: 449 - RNA, 20 nt, synthetic construct
  source 1..20: mol_type = other RNA
ctcaaattttttctctatct

SEQ ID NO: 450 - RNA, 20 nt, synthetic construct
  source 1..20: mol_type = other RNA
tatctaggaccctttgtcct

SEQ ID NO: 451 - RNA, 20 nt, synthetic construct
  source 1..20: mol_type = other RNA
acaatctgtccaaggacaaa

SEQ ID NO: 452 - RNA, 20 nt, synthetic construct
  source 1..20: mol_type = other RNA
gacaatctgtccaaggacaa

SEQ ID NO: 453 - RNA, 20 nt, synthetic construct
  source 1..20: mol_type = other RNA
ttggacagattgtctgcact

SEQ ID NO: 454 - RNA, 20 nt, synthetic construct
  source 1..20: mol_type = other RNA
aagtgcagacaatctgtcca

SEQ ID NO: 455 - RNA, 20 nt, synthetic construct
  source 1..20: mol_type = other RNA
tgtctgcacttggatgtata

SEQ ID NO: 456 - RNA, 20 nt, synthetic construct
  source 1..20: mol_type = other RNA
tcaatacagtctcttgaatt

SEQ ID NO: 457 - RNA, 20 nt, synthetic construct
  source 1..20: mol_type = other RNA
tgaatttggtccccaacaag

SEQ ID NO: 458 - RNA, 20 nt, synthetic construct
  source 1..20: mol_type = other RNA
agagacacagcctcttgttg

SEQ ID NO: 459 - RNA, 20 nt, synthetic construct
  source 1..20: mol_type = other RNA
tagagacacagcctcttgtt

SEQ ID NO: 460 - RNA, 20 nt, synthetic construct
  source 1..20: mol_type = other RNA
ctagagacacagcctcttgt

SEQ ID NO: 461 - RNA, 20 nt, synthetic construct
  source 1..20: mol_type = other RNA
agagtcttagtctgagcagc

SEQ ID NO: 462 - RNA, 20 nt, synthetic construct
  source 1..20: mol_type = other RNA
caccctgcagtaaatcctgt

SEQ ID NO: 463 - RNA, 20 nt, synthetic construct
  source 1..20: mol_type = other RNA
agccaacaggatttactgca

SEQ ID NO: 464 - RNA, 20 nt, synthetic construct
  source 1..20: mol_type = other RNA
gagccaacaggatttactgc

SEQ ID NO: 465 - RNA, 20 nt, synthetic construct
  source 1..20: mol_type = other RNA
attttgaagatggagccaac

SEQ ID NO: 466 - RNA, 20 nt, synthetic construct
  source 1..20: mol_type = other RNA
ttgggcatgtattttgaaga

SEQ ID NO: 467 - RNA, 20 nt, synthetic construct
  source 1..20: mol_type = other RNA
ctggagagaatgggtcattt

SEQ ID NO: 468 - RNA, 20 nt, synthetic construct
  source 1..20: mol_type = other RNA
tctggagagaatgggtcatt

SEQ ID NO: 469 - RNA, 20 nt, synthetic construct
  source 1..20: mol_type = other RNA
gacacgggtctggagagaat

SEQ ID NO: 470 - RNA, 20 nt, synthetic construct
  source 1..20: mol_type = other RNA
agacacgggtctggagagaa

SEQ ID NO: 471 - RNA, 20 nt, synthetic construct
  source 1..20: mol_type = other RNA
gggcagagcagacacgggtc

SEQ ID NO: 472 - RNA, 20 nt, synthetic construct
  source 1..20: mol_type = other RNA
gggaggggcagagcagacac

SEQ ID NO: 473 - RNA, 20 nt, synthetic construct
  source 1..20: mol_type = other RNA
ggggaggggcagagcagaca

SEQ ID NO: 474 - RNA, 20 nt, synthetic construct
  source 1..20: mol_type = other RNA
aaacttgcaggtcaggggag

SEQ ID NO: 475 - RNA, 20 nt, synthetic construct
  source 1..20: mol_type = other RNA
aaaacttgcaggtcagggga

SEQ ID NO: 476 - RNA, 20 nt, synthetic construct
  source 1..20: mol_type = other RNA
gaaaacttgcaggtcagggg

SEQ ID NO: 477 - RNA, 20 nt, synthetic construct
  source 1..20: mol_type = other RNA
agcgaaaacttgcaggtcag

SEQ ID NO: 478 - RNA, 20 nt, synthetic construct
  source 1..20: mol_type = other RNA
gagcgaaaacttgcaggtca

SEQ ID NO: 479 - RNA, 20 nt, synthetic construct
  source 1..20: mol_type = other RNA
tgagcgaaaacttgcaggtc

SEQ ID NO: 480 - RNA, 20 nt, synthetic construct
  source 1..20: mol_type = other RNA
ctcaatgagcgaaaacttgc

SEQ ID NO: 481 - RNA, 20 nt, synthetic construct
  source 1..20: mol_type = other RNA
gaagcaggtgactagatagg

SEQ ID NO: 482 - RNA, 20 nt, synthetic construct
  source 1..20: mol_type = other RNA
gtagaagcaggtgactagat

SEQ ID NO: 483 - RNA, 20 nt, synthetic construct
  source 1..20: mol_type = other RNA
cagaggggaaaggtagaagc

SEQ ID NO: 484 - RNA, 20 nt, synthetic construct
  source 1..20: mol_type = other RNA
aaaatcagtgcagaggggaa

SEQ ID NO: 485 - RNA, 20 nt, synthetic construct
  source 1..20: mol_type = other RNA
gttttaaaatcagtgcagag

SEQ ID NO: 486 - RNA, 20 nt, synthetic construct
  source 1..20: mol_type = other RNA
tgttttaaaatcagtgcaga

SEQ ID NO: 487 - RNA, 20 nt, synthetic construct
  source 1..20: mol_type = other RNA
ttgttttaaaatcagtgcag

SEQ ID NO: 488 - RNA, 20 nt, synthetic construct
  source 1..20: mol_type = other RNA
aaggattttcagcataaaaa

SEQ ID NO: 489 - RNA, 20 nt, synthetic construct
  source 1..20: mol_type = other RNA
gtcagatggtaaggttttga

SEQ ID NO: 490 - RNA, 20 nt, synthetic construct
  source 1..20: mol_type = other RNA
tttttgtgtgtcagatggta

SEQ ID NO: 491 - RNA, 20 nt, synthetic construct
  source 1..20: mol_type = other RNA
ggctttttttgtgtgtcaga

SEQ ID NO: 492 - RNA, 20 nt, synthetic construct
  source 1..20: mol_type = other RNA
tacaggcacgggaaagtctt

SEQ ID NO: 493 - RNA, 20 nt, synthetic construct
  source 1..20: mol_type = other RNA
aaataaggtcttacaggcac

SEQ ID NO: 494 - RNA, 20 nt, synthetic construct
  source 1..20: mol_type = other RNA
taaataaggtcttacaggca

SEQ ID NO: 495 - RNA, 20 nt, synthetic construct
  source 1..20: mol_type = other RNA
caggttaaataaggtcttac

SEQ ID NO: 496 - RNA, 20 nt, synthetic construct
  source 1..20: mol_type = other RNA
gggaggagacaggttaaata

SEQ ID NO: 497 - RNA, 20 nt, synthetic construct
  source 1..20: mol_type = other RNA
gtaagggtatgggaggagac

SEQ ID NO: 498 - RNA, 20 nt, synthetic construct
  source 1..20: mol_type = other RNA
agatggagtaagggtatggg

SEQ ID NO: 499 - RNA, 20 nt, synthetic construct
  source 1..20: mol_type = other RNA
aagagatggagtaagggtat

SEQ ID NO: 500 - RNA, 20 nt, synthetic construct
  source 1..20: mol_type = other RNA
taagagatggagtaagggta

SEQ ID NO: 501 - RNA, 20 nt, synthetic construct
  source 1..20: mol_type = other RNA
gatagtaagagatggagtaa

SEQ ID NO: 502 - RNA, 20 nt, synthetic construct
  source 1..20: mol_type = other RNA
agatagtaagagatggagta

SEQ ID NO: 503 - RNA, 20 nt, synthetic construct
  source 1..20: mol_type = other RNA
agggaggagatagtaagaga

SEQ ID NO: 504 - RNA, 20 nt, synthetic construct
  source 1..20: mol_type = other RNA
taagcaaagtggggagaggg

SEQ ID NO: 505 - RNA, 20 nt, synthetic construct
  source 1..20: mol_type = other RNA
caataagcaaagtggggaga

SEQ ID NO: 506 - RNA, 20 nt, synthetic construct
  source 1..20: mol_type = other RNA
gcaataagcaaagtggggag

SEQ ID NO: 507 - RNA, 20 nt, synthetic construct
  source 1..20: mol_type = other RNA
acaaagcaataagcaaagtg

SEQ ID NO: 508 - RNA, 20 nt, synthetic construct
  source 1..20: mol_type = other RNA
tacaaagcaataagcaaagt

SEQ ID NO: 509 - RNA, 20 nt, synthetic construct
  source 1..20: mol_type = other RNA
ctacaaagcaataagcaaag

SEQ ID NO: 510 - RNA, 20 nt, synthetic construct
  source 1..20: mol_type = other RNA
gagtggcaaggagggcagta

SEQ ID NO: 511 - RNA, 20 nt, synthetic construct
  source 1..20: mol_type = other RNA
cactggaggagtggcaagga

SEQ ID NO: 512 - RNA, 20 nt, synthetic construct
  source 1..20: mol_type = other RNA
acactggaggagtggcaagg

SEQ ID NO: 513 - RNA, 20 nt, synthetic construct
  source 1..20: mol_type = other RNA
ggcacactggaggagtggca

SEQ ID NO: 514 - RNA, 20 nt, synthetic construct
  source 1..20: mol_type = other RNA
agtttggcacactggaggag

SEQ ID NO: 515 - RNA, 20 nt, synthetic construct
  source 1..20: mol_type = other RNA
aggatagtttggcacactgg

SEQ ID NO: 516 - RNA, 20 nt, synthetic construct
  source 1..20: mol_type = other RNA
gtgccaaactatcctgtctc

SEQ ID NO: 517 - RNA, 20 nt, synthetic construct
  source 1..20: mol_type = other RNA
tgccaaactatcctgtctca

SEQ ID NO: 518 - RNA, 20 nt, synthetic construct
  source 1..20: mol_type = other RNA
ggccctgagacaggatagtt

SEQ ID NO: 519 - RNA, 20 nt, synthetic construct
  source 1..20: mol_type = other RNA
atgtgcaaaggccctgagac

SEQ ID NO: 520 - RNA, 20 nt, synthetic construct
  source 1..20: mol_type = other RNA
agaaagaataaaatgtgcaa

SEQ ID NO: 521 - RNA, 20 nt, synthetic construct
  source 1..20: mol_type = other RNA
atctggggaaggagacggac

SEQ ID NO: 522 - RNA, 20 nt, synthetic construct
  source 1..20: mol_type = other RNA
tccttccccagatatctgta

SEQ ID NO: 523 - RNA, 20 nt, synthetic construct
  source 1..20: mol_type = other RNA
gccatacagatatctgggga

SEQ ID NO: 524 - RNA, 20 nt, synthetic construct
  source 1..20: mol_type = other RNA
ataagccatacagatatctg

SEQ ID NO: 525 - RNA, 20 nt, synthetic construct
  source 1..20: mol_type = other RNA
tataagccatacagatatct

SEQ ID NO: 526 - RNA, 20 nt, synthetic construct
  source 1..20: mol_type = other RNA
gtataagccatacagatatc

SEQ ID NO: 527 - RNA, 20 nt, synthetic construct
  source 1..20: mol_type = other RNA
taccctcaatgacttccttc

SEQ ID NO: 528 - RNA, 20 nt, synthetic construct
  source 1..20: mol_type = other RNA
tacctgaaggaagtcattga

SEQ ID NO: 529 - RNA, 20 nt, synthetic construct
  source 1..20: mol_type = other RNA
atacctgaaggaagtcattg

SEQ ID NO: 530 - RNA, 20 nt, synthetic construct
  source 1..20: mol_type = other RNA
atatttaagcagatacctga

SEQ ID NO: 531 - RNA, 20 nt, synthetic construct
  source 1..20: mol_type = other RNA
gcttaaatattttaattgaa

SEQ ID NO: 532 - RNA, 20 nt, synthetic construct
  source 1..20: mol_type = other RNA
tttatatagggaagcaggga

SEQ ID NO: 533 - RNA, 20 nt, synthetic construct
  source 1..20: mol_type = other RNA
ttattttatatagggaagca

SEQ ID NO: 534 - RNA, 20 nt, synthetic construct
  source 1..20: mol_type = other RNA
gttattttatatagggaagc

SEQ ID NO: 535 - RNA, 20 nt, synthetic construct
  source 1..20: mol_type = other RNA
ggtcaatgttattttatata

SEQ ID NO: 536 - RNA, 20 nt, synthetic construct
  source 1..20: mol_type = other RNA
aggtcaatgttattttatat

SEQ ID NO: 537 - RNA, 20 nt, synthetic construct
  source 1..20: mol_type = other RNA
tcctccctgtctctaccctc

SEQ ID NO: 538 - RNA, 20 nt, synthetic construct
  source 1..20: mol_type = other RNA
cctccctgtctctaccctct

SEQ ID NO: 539 - RNA, 20 nt, synthetic construct
  source 1..20: mol_type = other RNA
agagggtagagacagggagg

SEQ ID NO: 540 - RNA, 20 nt, synthetic construct
  source 1..20: mol_type = other RNA
cccagagggtagagacaggg

SEQ ID NO: 541 - RNA, 20 nt, synthetic construct
  source 1..20: mol_type = other RNA
aggcccagagggtagagaca

SEQ ID NO: 542 - RNA, 20 nt, synthetic construct
  source 1..20: mol_type = other RNA
caggcccagagggtagagac

SEQ ID NO: 543 - RNA, 20 nt, synthetic construct
  source 1..20: mol_type = other RNA
tagggaatggcaggcccaga

SEQ ID NO: 544 - RNA, 20 nt, synthetic construct
  source 1..20: mol_type = other RNA
ttagggaatggcaggcccag

SEQ ID NO: 545 - RNA, 20 nt, synthetic construct
  source 1..20: mol_type = other RNA
taagagagttagggaatggc

SEQ ID NO: 546 - RNA, 20 nt, synthetic construct
  source 1..20: mol_type = other RNA
aggttaagagagttagggaa

SEQ ID NO: 547 - RNA, 20 nt, synthetic construct
  source 1..20: mol_type = other RNA
aaagcaggttaagagagtta

SEQ ID NO: 548 - RNA, 20 nt, synthetic construct
  source 1..20: mol_type = other RNA
caaagcaggttaagagagtt

SEQ ID NO: 549 - RNA, 20 nt, synthetic construct
  source 1..20: mol_type = other RNA
gctattcaagaaaacaaagc

SEQ ID NO: 550 - RNA, 20 nt, synthetic construct
  source 1..20: mol_type = other RNA
gcatatagtatttattgtca

SEQ ID NO: 551 - RNA, 20 nt, synthetic construct
  source 1..20: mol_type = other RNA
tatgcttatttaagagtttg

SEQ ID NO: 552 - RNA, 20 nt, synthetic construct
  source 1..20: mol_type = other RNA
actgttgtacaatatataca

SEQ ID NO: 553 - RNA, 20 nt, synthetic construct
  source 1..20: mol_type = other RNA
aactgttgtacaatatatac

SEQ ID NO: 554 - RNA, 20 nt, synthetic construct
  source 1..20: mol_type = other RNA
tattgtacaacagtttcgta

SEQ ID NO: 555 - RNA, 20 nt, synthetic construct
  source 1..20: mol_type = other RNA
attgtacaacagtttcgtat

SEQ ID NO: 556 - RNA, 20 nt, synthetic construct
  source 1..20: mol_type = other RNA
atataacagtgaataaaaac

SEQ ID NO: 557 - RNA, 20 nt, synthetic construct
  source 1..20: mol_type = other RNA
aggcactgttctaagtgctg

SEQ ID NO: 558 - RNA, 20 nt, synthetic construct
  source 1..20: mol_type = other RNA
gaggcactgttctaagtgct

SEQ ID NO: 559 - RNA, 20 nt, synthetic construct
  source 1..20: mol_type = other RNA
cgaggcactgttctaagtgc

SEQ ID NO: 560 - RNA, 20 nt, synthetic construct
  source 1..20: mol_type = other RNA
gaacagtgcctcgtgtgttt

SEQ ID NO: 561 - RNA, 20 nt, synthetic construct
  source 1..20: mol_type = other RNA
actaagtgcctaaacacacg

SEQ ID NO: 562 - RNA, 20 nt, synthetic construct
  source 1..20: mol_type = other RNA
atcactgtagtagagatgca

SEQ ID NO: 563 - RNA, 20 nt, synthetic construct
  source 1..20: mol_type = other RNA
caaggtacagtagaaacaca

SEQ ID NO: 564 - RNA, 20 nt, synthetic construct
  source 1..20: mol_type = other RNA
aaggtacagtagaaacacat

SEQ ID NO: 565 - RNA, 20 nt, synthetic construct
  source 1..20: mol_type = other RNA
aaagagtgacatgactacat

SEQ ID NO: 566 - RNA, 20 nt, synthetic construct
  source 1..20: mol_type = other RNA
acatgactacataggaattg

SEQ ID NO: 567 - RNA, 20 nt, synthetic construct
  source 1..20: mol_type = other RNA
tgcccttaagcagagctctt

SEQ ID NO: 568 - RNA, 20 nt, synthetic construct
  source 1..20: mol_type = other RNA
ctccaaagagctctgcttaa

SEQ ID NO: 569 - RNA, 20 nt, synthetic construct
  source 1..20: mol_type = other RNA
tctccaaagagctctgctta

SEQ ID NO: 570 - RNA, 20 nt, synthetic construct
  source 1..20: mol_type = other RNA
agctctttggagagaaaaac

SEQ ID NO: 571 - RNA, 20 nt, synthetic construct
  source 1..20: mol_type = other RNA
ctttggagagaaaaacaggt

SEQ ID NO: 572 - RNA, 20 nt, synthetic construct
  source 1..20: mol_type = other RNA
tttggagagaaaaacaggta

SEQ ID NO: 573 - RNA, 20 nt, synthetic construct
  source 1..20: mol_type = other RNA
atagcattgcagatacacag

SEQ ID NO: 574 - RNA, 20 nt, synthetic construct
  source 1..20: mol_type = other RNA
atgagagaacagtgtgttca

SEQ ID NO: 575 - RNA, 20 nt, synthetic construct
  source 1..20: mol_type = other RNA
tactgctacagcataatttg

SEQ ID NO: 576 - RNA, 20 nt, synthetic construct
  source 1..20: mol_type = other RNA
actgctacagcataatttgt

SEQ ID NO: 577 - RNA, 20 nt, synthetic construct
  source 1..20: mol_type = other RNA
ctgctacagcataatttgtg

SEQ ID NO: 578 - RNA, 20 nt, synthetic construct
  source 1..20: mol_type = other RNA
tgctacagcataatttgtgg

SEQ ID NO: 579 - RNA, 20 nt, synthetic construct
  source 1..20: mol_type = other RNA
gggtaaagatgaactagatg

SEQ ID NO: 580 - RNA, 20 nt, synthetic construct
  source 1..20: mol_type = other RNA
tagtagatagcacctgatca

SEQ ID NO: 581 - RNA, 20 nt, synthetic construct
  source 1..20: mol_type = other RNA
tagatagcacctgatcatgg

SEQ ID NO: 582 - RNA, 20 nt, synthetic construct
  source 1..20: mol_type = other RNA
agatagcacctgatcatgga

SEQ ID NO: 583 - RNA, 20 nt, synthetic construct
  source 1..20: mol_type = other RNA
agcacctgatcatggaggga

SEQ ID NO: 584 - RNA, 20 nt, synthetic construct
  source 1..20: mol_type = other RNA
acctgatcatggagggatgg

SEQ ID NO: 585 - RNA, 20 nt, synthetic construct
  source 1..20: mol_type = other RNA
cctgatcatggagggatgga

SEQ ID NO: 586 - RNA, 20 nt, synthetic construct
  source 1..20: mol_type = other RNA
ccctccatccctccatgatc

SEQ ID NO: 587 - RNA, 20 nt, synthetic construct
  source 1..20: mol_type = other RNA
agggtttttgtgccagacta

SEQ ID NO: 588 - RNA, 20 nt, synthetic construct
  source 1..20: mol_type = other RNA
aaatctaaaattccttagtc

SEQ ID NO: 589 - RNA, 20 nt, synthetic construct
  source 1..20: mol_type = other RNA
ttagattttgtcctgtcaag

SEQ ID NO: 590 - RNA, 20 nt, synthetic construct
  source 1..20: mol_type = other RNA
tagattttgtcctgtcaagt

SEQ ID NO: 591 - RNA, 20 nt, synthetic construct
  source 1..20: mol_type = other RNA
ttgtcctgtcaagtgggcag

SEQ ID NO: 592 - RNA, 20 nt, synthetic construct
  source 1..20: mol_type = other RNA
tctaccactgcccacttgac

SEQ ID NO: 593 - RNA, 20 nt, synthetic construct
  source 1..20: mol_type = other RNA
ccattgaagacttctaagca

SEQ ID NO: 594 - RNA, 20 nt, synthetic construct
  source 1..20: mol_type = other RNA
cattgaagacttctaagcaa

SEQ ID NO: 595 - RNA, 20 nt, synthetic construct
  source 1..20: mol_type = other RNA
ccttgcttagaagtcttcaa

SEQ ID NO: 596 - RNA, 20 nt, synthetic construct
  source 1..20: mol_type = other RNA
tgtgtgtgtacgtattaaaa

SEQ ID NO: 597 - RNA, 20 nt, synthetic construct
  source 1..20: mol_type = other RNA
ggtaactagcaacattgtga

SEQ ID NO: 598 - RNA, 20 nt, synthetic construct
  source 1..20: mol_type = other RNA
atttaagatatgtatgattt

SEQ ID NO: 599 - RNA, 20 nt, synthetic construct
  source 1..20: mol_type = other RNA
aaaacaattactatcacatg

SEQ ID NO: 600 - RNA, 20 nt, synthetic construct
  source 1..20: mol_type = other RNA
aaacaattactatcacatgt

SEQ ID NO: 601 - RNA, 20 nt, synthetic construct
  source 1..20: mol_type = other RNA
tactatcacatgtgggcgag

SEQ ID NO: 602 - RNA, 20 nt, synthetic construct
  source 1..20: mol_type = other RNA
aggatatttcattttatatt

SEQ ID NO: 603 - RNA, 20 nt, synthetic construct
  source 1..20: mol_type = other RNA
tttatatttggacaaaatca

SEQ ID NO: 604 - RNA, 20 nt, synthetic construct
  source 1..20: mol_type = other RNA
acaaaatcatggatgtatag

SEQ ID NO: 605 - RNA, 20 nt, synthetic construct
  source 1..20: mol_type = other RNA
caaaatcatggatgtatagt

SEQ ID NO: 606 - RNA, 20 nt, synthetic construct
  source 1..20: mol_type = other RNA
gtatagtgggaagatgttct

SEQ ID NO: 607 - RNA, 20 nt, synthetic construct
  source 1..20: mol_type = other RNA
gaaagagaagaaatgcacaa

SEQ ID NO: 608 - RNA, 20 nt, synthetic construct
  source 1..20: mol_type = other RNA
agagaagaaatgcacaatgg

SEQ ID NO: 609 - RNA, 20 nt, synthetic construct
  source 1..20: mol_type = other RNA
aagtcttctttcttaaaggg

SEQ ID NO: 610 - RNA, 20 nt, synthetic construct
  source 1..20: mol_type = other RNA
ttaaagtcttctttcttaaa

SEQ ID NO: 611 - RNA, 20 nt, synthetic construct
  source 1..20: mol_type = other RNA
tttaaagtcttctttcttaa

SEQ ID NO: 612 - RNA, 20 nt, synthetic construct
  source 1..20: mol_type = other RNA
gtacactagaaaagtgctta

SEQ ID NO: 613 - RNA, 20 nt, synthetic construct
  source 1..20: mol_type = other RNA
ttttcttgttgattcataac

SEQ ID NO: 614 - RNA, 20 nt, synthetic construct
  source 1..20: mol_type = other RNA
tcaacctcctttcttcgtag

SEQ ID NO: 615 - RNA, 20 nt, synthetic construct
  source 1..20: mol_type = other RNA
tttcttcgtagaggaacagt

SEQ ID NO: 616 - RNA, 20 nt, synthetic construct
  source 1..20: mol_type = other RNA
aactgttcctctacgaagaa

SEQ ID NO: 617 - RNA, 20 nt, synthetic construct
  source 1..20: mol_type = other RNA
tgatcttgatttattgttga

SEQ ID NO: 618 - RNA, 20 nt, synthetic construct
  source 1..20: mol_type = other RNA
ttcaacaataaatcaagatc

SEQ ID NO: 619 - RNA, 20 nt, synthetic construct
  source 1..20: mol_type = other RNA
caaatctatactgtttgctg

SEQ ID NO: 620 - RNA, 20 nt, synthetic construct
  source 1..20: mol_type = other RNA
aaatctatactgtttgctgt

SEQ ID NO: 621 - RNA, 20 nt, synthetic construct
  source 1..20: mol_type = other RNA
aacaatgtatctgcctttgt

SEQ ID NO: 622 - RNA, 20 nt, synthetic construct
  source 1..20: mol_type = other RNA
agcagacatttgtcctacaa

SEQ ID NO: 623 - RNA, 20 nt, synthetic construct
  source 1..20: mol_type = other RNA
tgtctgcttttgcatattgc

SEQ ID NO: 624 - RNA, 20 nt, synthetic construct
  source 1..20: mol_type = other RNA
tgcacagaatttttgaaatg

SEQ ID NO: 625 - RNA, 20 nt, synthetic construct
  source 1..20: mol_type = other RNA
gcacagaatttttgaaatga

SEQ ID NO: 626 - RNA, 20 nt, synthetic construct
  source 1..20: mol_type = other RNA
tttacttgcatttgaatgaa

SEQ ID NO: 627 - RNA, 20 nt, synthetic construct
  source 1..20: mol_type = other RNA
ttccaaattttttatatttt

SEQ ID NO: 628 - RNA, 20 nt, synthetic construct
  source 1..20: mol_type = other RNA
gacctaaaatataaaaaatt

SEQ ID NO: 629 - RNA, 20 nt, synthetic construct
  source 1..20: mol_type = other RNA
gtcctatattgcgacctagt

SEQ ID NO: 630 - RNA, 20 nt, synthetic construct
  source 1..20: mol_type = other RNA
gtccaactaggtcgcaatat

SEQ ID NO: 631 - RNA, 20 nt, synthetic construct
  source 1..20: mol_type = other RNA
ttttaaacgaaagtccaact

SEQ ID NO: 632 - RNA, 20 nt, synthetic construct
  source 1..20: mol_type = other RNA
aaaagtctaaattatgcaga

SEQ ID NO: 633 - RNA, 20 nt, synthetic construct
  source 1..20: mol_type = other RNA
aaagtctaaattatgcagaa

SEQ ID NO: 634 - RNA, 20 nt, synthetic construct
  source 1..20: mol_type = other RNA
aagggagacgtcaaagaaaa

SEQ ID NO: 635 - RNA, 20 nt, synthetic construct
  source 1..20: mol_type = other RNA
ggagagactgaagaacaaga

SEQ ID NO: 636 - RNA, 20 nt, synthetic construct
  source 1..20: mol_type = other RNA
agaattgctagacagtgtcc

SEQ ID NO: 637 - RNA, 20 nt, synthetic construct
  source 1..20: mol_type = other RNA
attgctagacagtgtcctgg

SEQ ID NO: 638 - RNA, 20 nt, synthetic construct
  source 1..20: mol_type = other RNA
ttgctagacagtgtcctgga

SEQ ID NO: 639 - RNA, 20 nt, synthetic construct
  source 1..20: mol_type = other RNA
cagtgtcctggagggacaag

SEQ ID NO: 640 - RNA, 20 nt, synthetic construct
  source 1..20: mol_type = other RNA
agtgtcctggagggacaaga

SEQ ID NO: 641 - RNA, 20 nt, synthetic construct
  source 1..20: mol_type = other RNA
cctggagggacaagagggaa

SEQ ID NO: 642 - RNA, 20 nt, synthetic construct
  source 1..20: mol_type = other RNA
ctggagggacaagagggaat

SEQ ID NO: 643 - RNA, 20 nt, synthetic construct
  source 1..20: mol_type = other RNA
tggagggacaagagggaatg

SEQ ID NO: 644 - RNA, 20 nt, synthetic construct
  source 1..20: mol_type = other RNA
ccattccctcttgtccctcc

SEQ ID NO: 645 - RNA, 20 nt, synthetic construct
  source 1..20: mol_type = other RNA
gaatggggtagagagagcac

SEQ ID NO: 646 - RNA, 20 nt, synthetic construct
  source 1..20: mol_type = other RNA
gtagagagagcacaggtaaa

SEQ ID NO: 647 - RNA, 20 nt, synthetic construct
  source 1..20: mol_type = other RNA
acaggtaaatggatgagctt

SEQ ID NO: 648 - RNA, 20 nt, synthetic construct
  source 1..20: mol_type = other RNA
attttaaattttatgccaac

SEQ ID NO: 649 - RNA, 20 nt, synthetic construct
  source 1..20: mol_type = other RNA
aaattttttgcttcacctgt

SEQ ID NO: 650 - RNA, 20 nt, synthetic construct
  source 1..20: mol_type = other RNA
aaaaatttattgccatatct

SEQ ID NO: 651 - RNA, 20 nt, synthetic construct
  source 1..20: mol_type = other RNA
attttgtggggtccaagata

SEQ ID NO: 652 - RNA, 20 nt, synthetic construct
  source 1..20: mol_type = other RNA
aaacaatctctcattttgtg

SEQ ID NO: 653 - RNA, 20 nt, synthetic construct
  source 1..20: mol_type = other RNA
gaaacaatctctcattttgt

SEQ ID NO: 654 - RNA, 20 nt, synthetic construct
  source 1..20: mol_type = other RNA
agaaacaatctctcattttg

SEQ ID NO: 655 - RNA, 20 nt, synthetic construct
  source 1..20: mol_type = other RNA
ttgtttctgtaccataaatt

SEQ ID NO: 656 - RNA, 20 nt, synthetic construct
  source 1..20: mol_type = other RNA
ctgtaccataaatttggacc

SEQ ID NO: 657 - RNA, 20 nt, synthetic construct
  source 1..20: mol_type = other RNA
ttcttcctggtccaaattta

SEQ ID NO: 658 - RNA, 20 nt, synthetic construct
  source 1..20: mol_type = other RNA
gggtacgataaacttcttcc

SEQ ID NO: 659 - RNA, 20 nt, synthetic construct
  source 1..20: mol_type = other RNA
agtttatcgtacccaagttg

SEQ ID NO: 660 - RNA, 20 nt, synthetic construct
  source 1..20: mol_type = other RNA
aagttgtggaaaaatcttta

SEQ ID NO: 661 - RNA, 20 nt, synthetic construct
  source 1..20: mol_type = other RNA
taaagatttttccacaactt

SEQ ID NO: 662 - RNA, 20 nt, synthetic construct
  source 1..20: mol_type = other RNA
ttaaagatttttccacaact

SEQ ID NO: 663 - RNA, 20 nt, synthetic construct
  source 1..20: mol_type = other RNA
tgtggaaaaatctttaaggt

SEQ ID NO: 664 - RNA, 20 nt, synthetic construct
  source 1..20: mol_type = other RNA
ttaaggttggtagaaaaaat

SEQ ID NO: 665 - RNA, 20 nt, synthetic construct
  source 1..20: mol_type = other RNA
aaaaatgggctagaaagaaa

SEQ ID NO: 666 - RNA, 20 nt, synthetic construct
  source 1..20: mol_type = other RNA
aaaattcttcactgaaaaat

SEQ ID NO: 667 - RNA, 20 nt, synthetic construct
  source 1..20: mol_type = other RNA
taaaattcttcactgaaaaa

SEQ ID NO: 668 - RNA, 20 nt, synthetic construct
  source 1..20: mol_type = other RNA
gacaaatactggaaagttct

SEQ ID NO: 669 - RNA, 20 nt, synthetic construct
  source 1..20: mol_type = other RNA
aaacatagaaagacaaatac

SEQ ID NO: 670 - RNA, 20 nt, synthetic construct
  source 1..20: mol_type = other RNA
ttacaaagagatctccgtat

SEQ ID NO: 671 - RNA, 20 nt, synthetic construct
  source 1..20: mol_type = other RNA
atgaatagtacatacctata

SEQ ID NO: 672 - RNA, 20 nt, synthetic construct
  source 1..20: mol_type = other RNA
ttgttttacttattttctgt

SEQ ID NO: 673 - RNA, 20 nt, synthetic construct
  source 1..20: mol_type = other RNA
acacaagtcttcttttttga

SEQ ID NO: 674 - RNA, 20 nt, synthetic construct
  source 1..20: mol_type = other RNA
gaagacttgtgtaatcacag

SEQ ID NO: 675 - RNA, 20 nt, synthetic construct
  source 1..20: mol_type = other RNA
atcacagtggcaaagaaact

SEQ ID NO: 676 - RNA, 20 nt, synthetic construct
  source 1..20: mol_type = other RNA
gcctgttgactccaattcag

SEQ ID NO: 677 - RNA, 20 nt, synthetic construct
  source 1..20: mol_type = other RNA
tgactccaattcagaggttc

SEQ ID NO: 678 - RNA, 20 nt, synthetic construct
  source 1..20: mol_type = other RNA
atttacctgaacctctgaat

SEQ ID NO: 679 - RNA, 20 nt, synthetic construct
  source 1..20: mol_type = other RNA
agaggttcaggtaaatatta

SEQ ID NO: 680 - RNA, 20 nt, synthetic construct
  source 1..20: mol_type = other RNA
tgtaatctttttgtcattat

SEQ ID NO: 681 - RNA, 20 nt, synthetic construct
  source 1..20: mol_type = other RNA
gtaatctttttgtcattata

SEQ ID NO: 682 - RNA, 20 nt, synthetic construct
  source 1..20: mol_type = other RNA
gttcattcagttttaattca

SEQ ID NO: 683 - RNA, 20 nt, synthetic construct
  source 1..20: mol_type = other RNA
aaaactgaatgaactgataa

SEQ ID NO: 684 - RNA, 20 nt, synthetic construct
  source 1..20: mol_type = other RNA
aatgaactgataacggagaa

SEQ ID NO: 685 - RNA, 20 nt, synthetic construct
  source 1..20: mol_type = other RNA
cttactgtacaacaagctgc

SEQ ID NO: 686 - RNA, 20 nt, synthetic construct
  source 1..20: mol_type = other RNA
tttattctaccttagcatca

SEQ ID NO: 687 - RNA, 20 nt, synthetic construct
  source 1..20: mol_type = other RNA
cttagcatcaaggcatgcca

SEQ ID NO: 688 - RNA, 20 nt, synthetic construct
  source 1..20: mol_type = other RNA
ttagcatcaaggcatgccat

SEQ ID NO: 689 - RNA, 20 nt, synthetic construct
  source 1..20: mol_type = other RNA
catggcatgccttgatgcta

SEQ ID NO: 690 - RNA, 20 nt, synthetic construct
  source 1..20: mol_type = other RNA
catgggttgcctctcataaa

SEQ ID NO: 691 - RNA, 20 nt, synthetic construct
  source 1..20: mol_type = other RNA
catttatgagaggcaaccca

SEQ ID NO: 692 - RNA, 20 nt, synthetic construct
  source 1..20: mol_type = other RNA
cagctttggccatttatgag

SEQ ID NO: 693 - RNA, 20 nt, synthetic construct
  source 1..20: mol_type = other RNA
ttgcataagggtcacagctt

SEQ ID NO: 694 - RNA, 20 nt, synthetic construct
  source 1..20: mol_type = other RNA
ttatgcaacagtttctctag

SEQ ID NO: 695 - RNA, 20 nt, synthetic construct
  source 1..20: mol_type = other RNA
tatgcaacagtttctctagt

SEQ ID NO: 696 - RNA, 20 nt, synthetic construct
  source 1..20: mol_type = other RNA
ctagagaaactgttgcataa

SEQ ID NO: 697 - RNA, 20 nt, synthetic construct
  source 1..20: mol_type = other RNA
actagagaaactgttgcata

SEQ ID NO: 698 - RNA, 20 nt, synthetic construct
  source 1..20: mol_type = other RNA
tttctctagtgggcccttct

SEQ ID NO: 699 - RNA, 20 nt, synthetic construct
  source 1..20: mol_type = other RNA
tcaataaatattacctagaa

SEQ ID NO: 700 - RNA, 20 nt, synthetic construct
  source 1..20: mol_type = other RNA
ttcaataaatattacctaga

SEQ ID NO: 701 - RNA, 20 nt, synthetic construct
  source 1..20: mol_type = other RNA
atatttattgaattattatt

SEQ ID NO: 702 - RNA, 20 nt, synthetic construct
  source 1..20: mol_type = other RNA
aaactctaccacattggaac

SEQ ID NO: 703 - RNA, 20 nt, synthetic construct
  source 1..20: mol_type = other RNA
tggtcattcctgttccaatg

SEQ ID NO: 704 - RNA, 20 nt, synthetic construct
  source 1..20: mol_type = other RNA
tctttacttttgtcttcttt

SEQ ID NO: 705 - RNA, 20 nt, synthetic construct
  source 1..20: mol_type = other RNA
taaaagatttcattaaactg

SEQ ID NO: 706 - RNA, 20 nt, synthetic construct
  source 1..20: mol_type = other RNA
taatgaaatcttttattttg

SEQ ID NO: 707 - RNA, 20 nt, synthetic construct
  source 1..20: mol_type = other RNA
tactaaaatattttgtttac

SEQ ID NO: 708 - RNA, 20 nt, synthetic construct
  source 1..20: mol_type = other RNA
tctggtgtaactactggatc

SEQ ID NO: 709 - RNA, 20 nt, synthetic construct
  source 1..20: mol_type = other RNA
ggactttctggtgtaactac

SEQ ID NO: 710 - RNA, 20 nt, synthetic construct
  source 1..20: mol_type = other RNA
caccagaaagtcccagttcc

SEQ ID NO: 711 - RNA, 20 nt, synthetic construct
  source 1..20: mol_type = other RNA
tacctggaactgggactttc

SEQ ID NO: 712 - RNA, 20 nt, synthetic construct
  source 1..20: mol_type = other RNA
gtcccagttccaggtagaag

SEQ ID NO: 713 - RNA, 20 nt, synthetic construct
  source 1..20: mol_type = other RNA
ccagttccaggtagaagagg

SEQ ID NO: 714 - RNA, 20 nt, synthetic construct
  source 1..20: mol_type = other RNA
ctcctcttctacctggaact

SEQ ID NO: 715 - RNA, 20 nt, synthetic construct
  source 1..20: mol_type = other RNA
cctcctcttctacctggaac

SEQ ID NO: 716 - RNA, 20 nt, synthetic construct
  source 1..20: mol_type = other RNA
caatgtcctcctcttctacc

SEQ ID NO: 717 - RNA, 20 nt, synthetic construct
  source 1..20: mol_type = other RNA
acattgaaaagctagaaatc

SEQ ID NO: 718 - RNA, 20 nt, synthetic construct
  source 1..20: mol_type = other RNA
tagaaatcaggtatgtgcct

SEQ ID NO: 719 - RNA, 20 nt, synthetic construct
  source 1..20: mol_type = other RNA
agaaatcaggtatgtgcctt

SEQ ID NO: 720 - RNA, 20 nt, synthetic construct
  source 1..20: mol_type = other RNA
gaaatcaggtatgtgccttg

SEQ ID NO: 721 - RNA, 20 nt, synthetic construct
  source 1..20: mol_type = other RNA
aaagccagttttcaattttc

SEQ ID NO: 722 - RNA, 20 nt, synthetic construct
  source 1..20: mol_type = other RNA
cgatcctgaaaattgaaaac

SEQ ID NO: 723 - RNA, 20 nt, synthetic construct
  source 1..20: mol_type = other RNA
caattttcaggatcgacttg

SEQ ID NO: 724 - RNA, 20 nt, synthetic construct
  source 1..20: mol_type = other RNA
aggatcgacttgtggaacaa

SEQ ID NO: 725 - RNA, 20 nt, synthetic construct
  source 1..20: mol_type = other RNA
ctagtccaagatgttttcct

SEQ ID NO: 726 - RNA, 20 nt, synthetic construct
  source 1..20: mol_type = other RNA
ctaggaaaacatcttggact

SEQ ID NO: 727 - RNA, 20 nt, synthetic construct
  source 1..20: mol_type = other RNA
tctcacctaggaaaacatct

SEQ ID NO: 728 - RNA, 20 nt, synthetic construct
  source 1..20: mol_type = other RNA
tgttttcctaggtgagatta

SEQ ID NO: 729 - RNA, 20 nt, synthetic construct
  source 1..20: mol_type = other RNA
caggaaccttaatctcacct

SEQ ID NO: 730 - RNA, 20 nt, synthetic construct
  source 1..20: mol_type = other RNA
tcagttcttaatacgttcac

SEQ ID NO: 731 - RNA, 20 nt, synthetic construct
  source 1..20: mol_type = other RNA
ctgattcctctcatcaagcc

SEQ ID NO: 732 - RNA, 20 nt, synthetic construct
  source 1..20: mol_type = other RNA
tcctctcatcaagcctggta

SEQ ID NO: 733 - RNA, 20 nt, synthetic construct
  source 1..20: mol_type = other RNA
cctctcatcaagcctggtaa

SEQ ID NO: 734 - RNA, 20 nt, synthetic construct
  source 1..20: mol_type = other RNA
cccttaccaggcttgatgag

SEQ ID NO: 735 - RNA, 20 nt, synthetic construct
  source 1..20: mol_type = other RNA
taaaatgctgggcccttacc

SEQ ID NO: 736 - RNA, 20 nt, synthetic construct
  source 1..20: mol_type = other RNA
atcacttatatttttacttt

SEQ ID NO: 737 - RNA, 20 nt, synthetic construct
  source 1..20: mol_type = other RNA
ttgctacagccaagagacaa

SEQ ID NO: 738 - RNA, 20 nt, synthetic construct
  source 1..20: mol_type = other RNA
gacttgtttccattgtctct

SEQ ID NO: 739 - RNA, 20 nt, synthetic construct
  source 1..20: mol_type = other RNA
gtcatccaaaactgatgacc

SEQ ID NO: 740 - RNA, 20 nt, synthetic construct
  source 1..20: mol_type = other RNA
tcatccaaaactgatgacct

SEQ ID NO: 741 - RNA, 20 nt, synthetic construct
  source 1..20: mol_type = other RNA
catccaaaactgatgacctg

SEQ ID NO: 742 - RNA, 20 nt, synthetic construct
  source 1..20: mol_type = other RNA
agaccccaggtcatcagttt

SEQ ID NO: 743 - RNA, 20 nt, synthetic construct
  source 1..20: mol_type = other RNA
tatttaatcgaagagacccc

SEQ ID NO: 744 - RNA, 20 nt, synthetic construct
  source 1..20: mol_type = other RNA
gtgcttccttcagagtacta

SEQ ID NO: 745 - RNA, 20 nt, synthetic construct
  source 1..20: mol_type = other RNA
aaaggaccatagtactctga

SEQ ID NO: 746 - RNA, 20 nt, synthetic construct
  source 1..20: mol_type = other RNA
tttagcagcaaagttttcaa

SEQ ID NO: 747 - RNA, 20 nt, synthetic construct
  source 1..20: mol_type = other RNA
tcttaacatacttgaacatc

SEQ ID NO: 748 - RNA, 20 nt, synthetic construct
  source 1..20: mol_type = other RNA
caagtatgttaagaatctta

SEQ ID NO: 749 - RNA, 20 nt, synthetic construct
  source 1..20: mol_type = other RNA
gatattggctaaatacagaa

SEQ ID NO: 750 - RNA, 20 nt, synthetic construct
  source 1..20: mol_type = other RNA
taagcagctgaggcagatat

SEQ ID NO: 751 - RNA, 20 nt, synthetic construct
  source 1..20: mol_type = other RNA
actcaaaatgtaagcagctg

SEQ ID NO: 752 - RNA, 20 nt, synthetic construct
  source 1..20: mol_type = other RNA
tgcagcagcagtcgtacaag

SEQ ID NO: 753 - RNA, 20 nt, synthetic construct
  source 1..20: mol_type = other RNA
gtgcagcagcagtcgtacaa

SEQ ID NO: 754 - RNA, 20 nt, synthetic construct
  source 1..20: mol_type = other RNA
ggtgcagcagcagtcgtaca

SEQ ID NO: 755 - RNA, 20 nt, synthetic construct
  source 1..20: mol_type = other RNA
caaaaggaacaagtttatca

SEQ ID NO: 756 - RNA, 20 nt, synthetic construct
  source 1..20: mol_type = other RNA
tgttccttttgccactgctg

SEQ ID NO: 757 - RNA, 20 nt, synthetic construct
  source 1..20: mol_type = other RNA
tcagccacagcagtggcaaa

SEQ ID NO: 758 - RNA, 20 nt, synthetic construct
  source 1..20: mol_type = other RNA
gtctaattcagccacagcag

SEQ ID NO: 759 - RNA, 20 nt, synthetic construct
  source 1..20: mol_type = other RNA
tgtggctgaattagacttga

SEQ ID NO: 760 - RNA, 20 nt, synthetic construct
  source 1..20: mol_type = other RNA
gatgcaaacacaatttttag

SEQ ID NO: 761 - RNA, 20 nt, synthetic construct
  source 1..20: mol_type = other RNA
aatttttagaggaaattccc

SEQ ID NO: 762 - RNA, 20 nt, synthetic construct
  source 1..20: mol_type = other RNA
ttccctggctacccgatgtc

SEQ ID NO: 763 - RNA, 20 nt, synthetic construct
  source 1..20: mol_type = other RNA
atccagacatcgggtagcca

SEQ ID NO: 764 - RNA, 20 nt, synthetic construct
  source 1..20: mol_type = other RNA
catccagacatcgggtagcc

SEQ ID NO: 765 - RNA, 20 nt, synthetic construct
  source 1..20: mol_type = other RNA
catcatctcatccagacatc

SEQ ID NO: 766 - RNA, 20 nt, synthetic construct
  source 1..20: mol_type = other RNA
tcatcatctcatccagacat

SEQ ID NO: 767 - RNA, 20 nt, synthetic construct
  source 1..20: mol_type = other RNA
ggatgagatgatgaaaatag

SEQ ID NO: 768 - RNA, 20 nt, synthetic construct
  source 1..20: mol_type = other RNA
gatgagatgatgaaaatagt

SEQ ID NO: 769 - RNA, 20 nt, synthetic construct
  source 1..20: mol_type = other RNA
gagatgatgaaaatagtggg

SEQ ID NO: 770 - RNA, 20 nt, synthetic construct
  source 1..20: mol_type = other RNA
agatgatgaaaatagtggga

SEQ ID NO: 771 - RNA, 20 nt, synthetic construct
  source 1..20: mol_type = other RNA
taggttttaatgttactttc

SEQ ID NO: 772 - RNA, 20 nt, synthetic construct
  source 1..20: mol_type = other RNA
attaaaacctattcttgatg

SEQ ID NO: 773 - RNA, 20 nt, synthetic construct
  source 1..20: mol_type = other RNA
ttctgtacctcatcaagaat

SEQ ID NO: 774 - RNA, 20 nt, synthetic construct
  source 1..20: mol_type = other RNA
atcgatttcacaggattttg

SEQ ID NO: 775 - RNA, 20 nt, synthetic construct
  source 1..20: mol_type = other RNA
tttaataggatcgatttcac

SEQ ID NO: 776 - RNA, 20 nt, synthetic construct
  source 1..20: mol_type = other RNA
cgatcctattaaattgaaag

SEQ ID NO: 777 - RNA, 20 nt, synthetic construct
  source 1..20: mol_type = other RNA
gatcctattaaattgaaaga

SEQ ID NO: 778 - RNA, 20 nt, synthetic construct
  source 1..20: mol_type = other RNA
tctccctctttcaatttaat

SEQ ID NO: 779 - RNA, 20 nt, synthetic construct
  source 1..20: mol_type = other RNA
agataatgtagaaaataata

SEQ ID NO: 780 - RNA, 20 nt, synthetic construct
  source 1..20: mol_type = other RNA
tttacctttttaaatcctgc

SEQ ID NO: 781 - RNA, 20 nt, synthetic construct
  source 1..20: mol_type = other RNA
ttctcctgcaggatttaaaa

SEQ ID NO: 782 - RNA, 20 nt, synthetic construct
  source 1..20: mol_type = other RNA
agtagcgcagattctcctgc

SEQ ID NO: 783 - RNA, 20 nt, synthetic construct
  source 1..20: mol_type = other RNA
agatatcacacattacagtg

SEQ ID NO: 784 - RNA, 20 nt, synthetic construct
  source 1..20: mol_type = other RNA
aagatatcacacattacagt

SEQ ID NO: 785 - RNA, 20 nt, synthetic construct
  source 1..20: mol_type = other RNA
aaagatatcacacattacag

SEQ ID NO: 786 - RNA, 20 nt, synthetic construct
  source 1..20: mol_type = other RNA
gtgatatcttttattctcta

SEQ ID NO: 787 - RNA, 20 nt, synthetic construct
  source 1..20: mol_type = other RNA
cttttattctctaaggcaga

SEQ ID NO: 788 - RNA, 20 nt, synthetic construct
  source 1..20: mol_type = other RNA
agtaaaacaaggcacttact

SEQ ID NO: 789 - RNA, 20 nt, synthetic construct
  source 1..20: mol_type = other RNA
ggtcatctgcaggaaaaaaa

SEQ ID NO: 790 - RNA, 20 nt, synthetic construct
  source 1..20: mol_type = other RNA
tgaacatgagggtcatctgc

SEQ ID NO: 791 - RNA, 20 nt, synthetic construct
  source 1..20: mol_type = other RNA
ctgcagaatactgaacatga

SEQ ID NO: 792 - RNA, 20 nt, synthetic construct
  source 1..20: mol_type = other RNA
actgcagaatactgaacatg

SEQ ID NO: 793 - RNA, 20 nt, synthetic construct
  source 1..20: mol_type = other RNA
aaaagtatgaggtgatacta

SEQ ID NO: 794 - RNA, 20 nt, synthetic construct
  source 1..20: mol_type = other RNA
ggtcgcaaatgaaaagtatg

SEQ ID NO: 795 - RNA, 20 nt, synthetic construct
  source 1..20: mol_type = other RNA
tgaacacttactggatgatg

SEQ ID NO: 796 - RNA, 20 nt, synthetic construct
  source 1..20: mol_type = other RNA
tcagaagaatgaacacttac

SEQ ID NO: 797 - RNA, 20 nt, synthetic construct
  source 1..20: mol_type = other RNA
gccagtgtccttttgttcac

SEQ ID NO: 798 - RNA, 20 nt, synthetic construct
  source 1..20: mol_type = other RNA
ccagtgtccttttgttcaca

SEQ ID NO: 799 - RNA, 20 nt, synthetic construct
  source 1..20: mol_type = other RNA
ccctgtgaacaaaaggacac

SEQ ID NO: 800 - RNA, 20 nt, synthetic construct
  source 1..20: mol_type = other RNA
tggacagccctgtgaacaaa

SEQ ID NO: 801 - RNA, 20 nt, synthetic construct
  source 1..20: mol_type = other RNA
tcacagggctgtccattctg

SEQ ID NO: 802 - RNA, 20 nt, synthetic construct
  source 1..20: mol_type = other RNA
ttagtaacaaagccacagaa

SEQ ID NO: 803 - RNA, 20 nt, synthetic construct
  source 1..20: mol_type = other RNA
taaagctgcacagaactctg

SEQ ID NO: 804 - RNA, 20 nt, synthetic construct
  source 1..20: mol_type = other RNA
actctgaggcagtgaaagcg

SEQ ID NO: 805 - RNA, 20 nt, synthetic construct
  source 1..20: mol_type = other RNA
aaagcgtggtagcaacattc

SEQ ID NO: 806 - RNA, 20 nt, synthetic construct
  source 1..20: mol_type = other RNA
agactcacaagttcagaagt

SEQ ID NO: 807 - RNA, 20 nt, synthetic construct
  source 1..20: mol_type = other RNA
tggtcttttttacattcttt

SEQ ID NO: 808 - RNA, 20 nt, synthetic construct
  source 1..20: mol_type = other RNA
ctcaaaaactatacaaactt

SEQ ID NO: 809 - RNA, 20 nt, synthetic construct
  source 1..20: mol_type = other RNA
tcaaaaactatacaaacttt

SEQ ID NO: 810 - RNA, 20 nt, synthetic construct
  source 1..20: mol_type = other RNA
ctatacaaactttgggaagc

SEQ ID NO: 811 - RNA, 20 nt, synthetic construct
  source 1..20: mol_type = other RNA
tatacaaactttgggaagct

SEQ ID NO: 812 - RNA, 20 nt, synthetic construct
  source 1..20: mol_type = other RNA
atacaaactttgggaagctg

SEQ ID NO: 813 - RNA, 20 nt, synthetic construct
  source 1..20: mol_type = other RNA
tacaaactttgggaagctgg

SEQ ID NO: 814 - RNA, 20 nt, synthetic construct
  source 1..20: mol_type = other RNA
ggggagtctgtccaaaagca

SEQ ID NO: 815 - RNA, 20 nt, synthetic construct
  source 1..20: mol_type = other RNA
gtaaggacttaccttgcttt

SEQ ID NO: 816 - RNA, 20 nt, synthetic construct
  source 1..20: mol_type = other RNA
actaagaaaaaacaaacaca

SEQ ID NO: 817 - RNA, 20 nt, synthetic construct
  source 1..20: mol_type = other RNA
gactaagaaaaaacaaacac

SEQ ID NO: 818 - RNA, 20 nt, synthetic construct
  source 1..20: mol_type = other RNA
ttcaaaatgtttcaagaaga

SEQ ID NO: 819 - RNA, 20 nt, synthetic construct
  source 1..20: mol_type = other RNA
atatattatagcagttaaaa

SEQ ID NO: 820 - RNA, 20 nt, synthetic construct
  source 1..20: mol_type = other RNA
tagcagttaaaaaggtatga

SEQ ID NO: 821 - RNA, 20 nt, synthetic construct
  source 1..20: mol_type = other RNA
aaggtatgatggttttattc

SEQ ID NO: 822 - RNA, 20 nt, synthetic construct
  source 1..20: mol_type = other RNA
ccatttccccatttagttct

SEQ ID NO: 823 - RNA, 20 nt, synthetic construct
  source 1..20: mol_type = other RNA
caagaactaaatggggaaat

SEQ ID NO: 824 - RNA, 20 nt, synthetic construct
  source 1..20: mol_type = other RNA
ccaagaactaaatggggaaa

SEQ ID NO: 825 - RNA, 20 nt, synthetic construct
  source 1..20: mol_type = other RNA
tttcatccaagaactaaatg

SEQ ID NO: 826 - RNA, 20 nt, synthetic construct
  source 1..20: mol_type = other RNA
atttcatccaagaactaaat

SEQ ID NO: 827 - RNA, 20 nt, synthetic construct
  source 1..20: mol_type = other RNA
aatttcatccaagaactaaa

SEQ ID NO: 828 - RNA, 20 nt, synthetic construct
  source 1..20: mol_type = other RNA
actgaaactaaagagtccag

SEQ ID NO: 829 - RNA, 20 nt, synthetic construct
  source 1..20: mol_type = other RNA
cacaggctcactcgtaccac

SEQ ID NO: 830 - RNA, 20 nt, synthetic construct
  source 1..20: mol_type = other RNA
gagcctgtgcacctgaaaga

SEQ ID NO: 831 - RNA, 20 nt, synthetic construct
  source 1..20: mol_type = other RNA
agcctgtgcacctgaaagaa

SEQ ID NO: 832 - RNA, 20 nt, synthetic construct
  source 1..20: mol_type = other RNA
tacccttctttcaggtgcac

SEQ ID NO: 833 - RNA, 20 nt, synthetic construct
  source 1..20: mol_type = other RNA
gattaaattacccttctttc

SEQ ID NO: 834 - RNA, 20 nt, synthetic construct
  source 1..20: mol_type = other RNA
gagatgtataaaagagctca

SEQ ID NO: 835 - RNA, 20 nt, synthetic construct
  source 1..20: mol_type = other RNA
aaagagctcaaggaagaact

SEQ ID NO: 836 - RNA, 20 nt, synthetic construct
  source 1..20: mol_type = other RNA
gctcaaggaagaactcggat

SEQ ID NO: 837 - RNA, 20 nt, synthetic construct
  source 1..20: mol_type = other RNA
aaaagaattttaagaaacga

SEQ ID NO: 838 - RNA, 20 nt, synthetic construct
  source 1..20: mol_type = other RNA
ctcacctaccacaaacagcc

SEQ ID NO: 839 - RNA, 20 nt, synthetic construct
  source 1..20: mol_type = other RNA
actacctggctgtttgtggt

SEQ ID NO: 840 - RNA, 20 nt, synthetic construct
  source 1..20: mol_type = other RNA
cacaactacctggctgtttg

SEQ ID NO: 841 - RNA, 20 nt, synthetic construct
  source 1..20: mol_type = other RNA
aaagcataaacacaactacc

SEQ ID NO: 842 - RNA, 20 nt, synthetic construct
  source 1..20: mol_type = other RNA
gttgtgtttatgctttattg

SEQ ID NO: 843 - RNA, 20 nt, synthetic construct
  source 1..20: mol_type = other RNA
ttgtgtttatgctttattgt

SEQ ID NO: 844 - RNA, 20 nt, synthetic construct
  source 1..20: mol_type = other RNA
tgtgtttatgctttattgtg

SEQ ID NO: 845 - RNA, 20 nt, synthetic construct
  source 1..20: mol_type = other RNA
gaactcttttttagaaggca

SEQ ID NO: 846 - RNA, 20 nt, synthetic construct
  source 1..20: mol_type = other RNA
tgaactcttttttagaaggc

SEQ ID NO: 847 - RNA, 20 nt, synthetic construct
  source 1..20: mol_type = other RNA
ttttactttttttattattt

SEQ ID NO: 848 - RNA, 20 nt, synthetic construct
  source 1..20: mol_type = other RNA
agtaaaaaacattcttgctg

SEQ ID NO: 849 - RNA, 20 nt, synthetic construct
  source 1..20: mol_type = other RNA
cagcaagaatgttttttact

SEQ ID NO: 850 - RNA, 20 nt, synthetic construct
  source 1..20: mol_type = other RNA
acagcaagaatgttttttac

SEQ ID NO: 851 - RNA, 20 nt, synthetic construct
  source 1..20: mol_type = other RNA
cattcttgctgtggaaaaac

SEQ ID NO: 852 - RNA, 20 nt, synthetic construct
  source 1..20: mol_type = other RNA
attacttggaacatcttcat

SEQ ID NO: 853 - RNA, 20 nt, synthetic construct
  source 1..20: mol_type = other RNA
gatgttccaagtaatacata

SEQ ID NO: 854 - RNA, 20 nt, synthetic construct
  source 1..20: mol_type = other RNA
gtttctccgtatgtattact

SEQ ID NO: 855 - RNA, 20 nt, synthetic construct
  source 1..20: mol_type = other RNA
ggagaaaccactctatgtcc

SEQ ID NO: 856 - RNA, 20 nt, synthetic construct
  source 1..20: mol_type = other RNA
ttatttgcctggacatagag

SEQ ID NO: 857 - RNA, 20 nt, synthetic construct
  source 1..20: mol_type = other RNA
cttctacacagttatttgcc

SEQ ID NO: 858 - RNA, 20 nt, synthetic construct
  source 1..20: mol_type = other RNA
actgtgtagaagctaatgaa

SEQ ID NO: 859 - RNA, 20 nt, synthetic construct
  source 1..20: mol_type = other RNA
aatggatagacgtactctgc

SEQ ID NO: 860 - RNA, 20 nt, synthetic construct
  source 1..20: mol_type = other RNA
atggatagacgtactctgca

SEQ ID NO: 861 - RNA, 20 nt, synthetic construct
  source 1..20: mol_type = other RNA
tgagccgatgcaatcaaaac

SEQ ID NO: 862 - RNA, 20 nt, synthetic construct
  source 1..20: mol_type = other RNA
tgagcctgttttgattgcat

SEQ ID NO: 863 - RNA, 20 nt, synthetic construct
  source 1..20: mol_type = other RNA
catccctctgtgtatctgaa

SEQ ID NO: 864 - RNA, 20 nt, synthetic construct
  source 1..20: mol_type = other RNA
ctgtgtatctgaacggaaat

SEQ ID NO: 865 - RNA, 20 nt, synthetic construct
  source 1..20: mol_type = other RNA
tttccgttcagatacacaga

SEQ ID NO: 866 - RNA, 20 nt, synthetic construct
  source 1..20: mol_type = other RNA
atttccgttcagatacacag

SEQ ID NO: 867 - RNA, 20 nt, synthetic construct
  source 1..20: mol_type = other RNA
cggaaattggctctgctgtc

SEQ ID NO: 868 - RNA, 20 nt, synthetic construct
  source 1..20: mol_type = other RNA
tggctctgctgtcaggagac

SEQ ID NO: 869 - RNA, 20 nt, synthetic construct
  source 1..20: mol_type = other RNA
gagactggtgaaaacactct

SEQ ID NO: 870 - RNA, 20 nt, synthetic construct
  source 1..20: mol_type = other RNA
aaagaaacttacgcagtaca

SEQ ID NO: 871 - RNA, 20 nt, synthetic construct
  source 1..20: mol_type = other RNA
tttttttatttttaccatag

SEQ ID NO: 872 - RNA, 20 nt, synthetic construct
  source 1..20: mol_type = other RNA
tgtctgcagggacacctcta

SEQ ID NO: 873 - RNA, 20 nt, synthetic construct
  source 1..20: mol_type = other RNA
tatctatttggatgtctgca

SEQ ID NO: 874 - RNA, 20 nt, synthetic construct
  source 1..20: mol_type = other RNA
atatctatttggatgtctgc

SEQ ID NO: 875 - RNA, 20 nt, synthetic construct
  source 1..20: mol_type = other RNA
tgtcttcatcaatatctatt

SEQ ID NO: 876 - RNA, 20 nt, synthetic construct
  source 1..20: mol_type = other RNA
aagtaaactgagggtaaaaa

SEQ ID NO: 877 - RNA, 20 nt, synthetic construct
  source 1..20: mol_type = other RNA
taagtaaactgagggtaaaa

SEQ ID NO: 878 - RNA, 20 nt, synthetic construct
  source 1..20: mol_type = other RNA
ctgcagcttaagtaaactga

SEQ ID NO: 879 - RNA, 20 nt, synthetic construct
  source 1..20: mol_type = other RNA
tctgcagcttaagtaaactg

SEQ ID NO: 880 - RNA, 20 nt, synthetic construct
  source 1..20: mol_type = other RNA
tttacttaagctgcagaaga

SEQ ID NO: 881 - RNA, 20 nt, synthetic construct
  source 1..20: mol_type = other RNA
cttaagctgcagaagatgga

SEQ ID NO: 882 - RNA, 20 nt, synthetic construct
  source 1..20: mol_type = other RNA
tattttcctgctctttgtag

SEQ ID NO: 883 - RNA, 20 nt, synthetic construct
  source 1..20: mol_type = other RNA
ctgctctttgtagaggcttg

SEQ ID NO: 884 - RNA, 20 nt, synthetic construct
  source 1..20: mol_type = other RNA
cacaagcctctacaaagagc

SEQ ID NO: 885 - RNA, 20 nt, synthetic construct
  source 1..20: mol_type = other RNA
ggaactattgcagtctatca

SEQ ID NO: 886 - RNA, 20 nt, synthetic construct
  source 1..20: mol_type = other RNA
taatcatcaggctctttctg

SEQ ID NO: 887 - RNA, 20 nt, synthetic construct
  source 1..20: mol_type = other RNA
acaaagttagaataatcatc

SEQ ID NO: 888 - RNA, 20 nt, synthetic construct
  source 1..20: mol_type = other RNA
ttattctaactttgtaatcg

SEQ ID NO: 889 - RNA, 20 nt, synthetic construct
  source 1..20: mol_type = other RNA
tatttgctgaattgtcttaa

SEQ ID NO: 890 - RNA, 20 nt, synthetic construct
  source 1..20: mol_type = other RNA
aaaaagcataattgagaagc

SEQ ID NO: 891 - RNA, 20 nt, synthetic construct
  source 1..20: mol_type = other RNA
atgaacctcatgaaaaatat

SEQ ID NO: 892 - RNA, 20 nt, synthetic construct
  source 1..20: mol_type = other RNA
ttcttcctatatttttcatg

SEQ ID NO: 893 - RNA, 20 nt, synthetic construct
  source 1..20: mol_type = other RNA
agatccagtagtgcaaaata

SEQ ID NO: 894 - RNA, 20 nt, synthetic construct
  source 1..20: mol_type = other RNA
gatccagtagtgcaaaatat

SEQ ID NO: 895 - RNA, 20 nt, synthetic construct
  source 1..20: mol_type = other RNA
gctcccatattttgcactac

SEQ ID NO: 896 - RNA, 20 nt, synthetic construct
  source 1..20: mol_type = other RNA
aatgactttttttcttctct

SEQ ID NO: 897 - RNA, 20 nt, synthetic construct
  source 1..20: mol_type = other RNA
atgactttttttcttctcta

SEQ ID NO: 898 - RNA, 20 nt, synthetic construct
  source 1..20: mol_type = other RNA
tctagggaaaatccaattgt

SEQ ID NO: 899 - RNA, 20 nt, synthetic construct
  source 1..20: mol_type = other RNA
ctagggaaaatccaattgtt

SEQ ID NO: 900 - RNA, 20 nt, synthetic construct
  source 1..20: mol_type = other RNA
taagatgctttcccaacaat

SEQ ID NO: 901 - RNA, 20 nt, synthetic construct
  source 1..20: mol_type = other RNA
catcttagagtttaacagat

SEQ ID NO: 902 - RNA, 20 nt, synthetic construct
  source 1..20: mol_type = other RNA
acagattggttcagaagaac

SEQ ID NO: 903 - RNA, 20 nt, synthetic construct
  source 1..20: mol_type = other RNA
ctggaaaatattatttttct

SEQ ID NO: 904 - RNA, 20 nt, synthetic construct
  source 1..20: mol_type = other RNA
ttcatcatgtattttgttca

SEQ ID NO: 905 - RNA, 20 nt, synthetic construct
  source 1..20: mol_type = other RNA
ggaggcagatgacattgaag

SEQ ID NO: 906 - RNA, 20 nt, synthetic construct
  source 1..20: mol_type = other RNA
aaatattaaatacaatgtgg

SEQ ID NO: 907 - RNA, 20 nt, synthetic construct
  source 1..20: mol_type = other RNA
attaaatattaaatacaatg

SEQ ID NO: 908 - RNA, 20 nt, synthetic construct
  source 1..20: mol_type = other RNA
aataattgaaattaattgtt

SEQ ID NO: 909 - RNA, 20 nt, synthetic construct
  source 1..20: mol_type = other RNA
ataattgaaattaattgttt

SEQ ID NO: 910 - RNA, 20 nt, synthetic construct
  source 1..20: mol_type = other RNA
aattaattgtttgggaatcc

SEQ ID NO: 911 - RNA, 20 nt, synthetic construct
  source 1..20: mol_type = other RNA
tctagtaatacatcaatacc

SEQ ID NO: 912 - RNA, 20 nt, synthetic construct
  source 1..20: mol_type = other RNA
acaggtatgaagggaatctt

SEQ ID NO: 913 - RNA, 20 nt, synthetic construct
  source 1..20: mol_type = other RNA
cacaggtatgaagggaatct

SEQ ID NO: 914 - RNA, 20 nt, synthetic construct
  source 1..20: mol_type = other RNA
tttggtcacacaggtatgaa

SEQ ID NO: 915 - RNA, 20 nt, synthetic construct
  source 1..20: mol_type = other RNA
atttggtcacacaggtatga

SEQ ID NO: 916 - RNA, 20 nt, synthetic construct
  source 1..20: mol_type = other RNA
aaacatggatttggtcacac

SEQ ID NO: 917 - RNA, 20 nt, synthetic construct
  source 1..20: mol_type = other RNA
aagttgcagaaacatggatt

SEQ ID NO: 918 - RNA, 20 nt, synthetic construct
  source 1..20: mol_type = other RNA
aaaaagaagttgcagaaaca

SEQ ID NO: 919 - RNA, 20 nt, synthetic construct
  source 1..20: mol_type = other RNA
ctagaaaagctttgtaacaa

SEQ ID NO: 920 - RNA, 20 nt, synthetic construct
  source 1..20: mol_type = other RNA
tagaaaagctttgtaacaaa

SEQ ID NO: 921 - RNA, 20 nt, synthetic construct
  source 1..20: mol_type = other RNA
ctttgttacaaagcttttct

SEQ ID NO: 922 - RNA, 20 nt, synthetic construct
  source 1..20: mol_type = other RNA
gagatggtttcttgctacgg

SEQ ID NO: 923 - RNA, 20 nt, synthetic construct
  source 1..20: mol_type = other RNA
gaagagatggtttcttgcta

SEQ ID NO: 924 - RNA, 20 nt, synthetic construct
  source 1..20: mol_type = other RNA
cagagtgttacaagaagaga

SEQ ID NO: 925 - RNA, 20 nt, synthetic construct
  source 1..20: mol_type = other RNA
tcttgtaacactctgttctg

SEQ ID NO: 926 - RNA, 20 nt, synthetic construct
  source 1..20: mol_type = other RNA
cagtatagagcaggcactga

SEQ ID NO: 927 - RNA, 20 nt, synthetic construct
  source 1..20: mol_type = other RNA
caatgttggcagtatagagc

SEQ ID NO: 928 - RNA, 20 nt, synthetic construct
  source 1..20: mol_type = other RNA
tttctagtaaaacacaatgt

SEQ ID NO: 929 - RNA, 20 nt, synthetic construct
  source 1..20: mol_type = other RNA
agctctgaactgtcatgaat

SEQ ID NO: 930 - RNA, 20 nt, synthetic construct
  source 1..20: mol_type = other RNA
ttttcttttttaaagtggga

SEQ ID NO: 931 - RNA, 20 nt, synthetic construct
  source 1..20: mol_type = other RNA
tttttcttttttaaagtggg

SEQ ID NO: 932 - RNA, 20 nt, synthetic construct
  source 1..20: mol_type = other RNA
ttttttttcttttttaaagt

SEQ ID NO: 933 - RNA, 20 nt, synthetic construct
  source 1..20: mol_type = other RNA
attttttttcttttttaaag

SEQ ID NO: 934 - RNA, 20 nt, synthetic construct
  source 1..20: mol_type = other RNA
aataagaagtgtttttcctt

SEQ ID NO: 935 - RNA, 20 nt, synthetic construct
  source 1..20: mol_type = other RNA
tttggtccatcagtcattac

SEQ ID NO: 936 - RNA, 20 nt, synthetic construct
  source 1..20: mol_type = other RNA
tgtaatgactgatggaccaa

SEQ ID NO: 937 - RNA, 20 nt, synthetic construct
  source 1..20: mol_type = other RNA
atggaacctgtaatgactga

SEQ ID NO: 938 - RNA, 20 nt, synthetic construct
  source 1..20: mol_type = other RNA
gtttctatcactgtcttgaa

SEQ ID NO: 939 - RNA, 20 nt, synthetic construct
  source 1..20: mol_type = other RNA
gccagagcatacttgaaagt

SEQ ID NO: 940 - RNA, 20 nt, synthetic construct
  source 1..20: mol_type = other RNA
accaactttcaagtatgctc

SEQ ID NO: 941 - RNA, 20 nt, synthetic construct
  source 1..20: mol_type = other RNA
tgtttacatctttaggcaaa

SEQ ID NO: 942 - RNA, 20 nt, synthetic construct
  source 1..20: mol_type = other RNA
tgagttttgtttacatcttt

SEQ ID NO: 943 - RNA, 20 nt, synthetic construct
  source 1..20: mol_type = other RNA
taaacaaaactcaagacaga

SEQ ID NO: 944 - RNA, 20 nt, synthetic construct
  source 1..20: mol_type = other RNA
aactcaagacagaaggaatc

SEQ ID NO: 945 - RNA, 20 nt, synthetic construct
  source 1..20: mol_type = other RNA
actcaagacagaaggaatca

SEQ ID NO: 946 - RNA, 20 nt, synthetic construct
  source 1..20: mol_type = other RNA
gtgtgcatcttgtttacatt

SEQ ID NO: 947 - RNA, 20 nt, synthetic construct
  source 1..20: mol_type = other RNA
tgtgcatcttgtttacattt

SEQ ID NO: 948 - RNA, 20 nt, synthetic construct
  source 1..20: mol_type = other RNA
tttacatttgggatcagtga

SEQ ID NO: 949 - RNA, 20 nt, synthetic construct
  source 1..20: mol_type = other RNA
aacaatgaaaacaatttcag

SEQ ID NO: 950 - RNA, 20 nt, synthetic construct
  source 1..20: mol_type = other RNA
ttttcattgttttaaatacc

SEQ ID NO: 951 - RNA, 20 nt, synthetic construct
  source 1..20: mol_type = other RNA
aaatcaagaaaatgagtacc

SEQ ID NO: 952 - RNA, 20 nt, synthetic construct
  source 1..20: mol_type = other RNA
aaagtttaacatgacttcta

SEQ ID NO: 953 - RNA, 20 nt, synthetic construct
  source 1..20: mol_type = other RNA
tcttcaaaaagaaagtaaac

SEQ ID NO: 954 - RNA, 20 nt, synthetic construct
  source 1..20: mol_type = other RNA
cttcaaaaagaaagtaaaca

SEQ ID NO: 955 - RNA, 20 nt, synthetic construct
  source 1..20: mol_type = other RNA
agaaagtaaacagggaatga

SEQ ID NO: 956 - RNA, 20 nt, synthetic construct
  source 1..20: mol_type = other RNA
aagtaaacagggaatgaagg

SEQ ID NO: 957 - RNA, 20 nt, synthetic construct
  source 1..20: mol_type = other RNA
taaacagggaatgaaggtgg

SEQ ID NO: 958 - RNA, 20 nt, synthetic construct
  source 1..20: mol_type = other RNA
aaacagggaatgaaggtggt

SEQ ID NO: 959 - RNA, 20 nt, synthetic construct
  source 1..20: mol_type = other RNA
cactatttcatgttgtaata

SEQ ID NO: 960 - RNA, 20 nt, synthetic construct
  source 1..20: mol_type = other RNA
actatttcatgttgtaataa

SEQ ID NO: 961 - RNA, 20 nt, synthetic construct
  source 1..20: mol_type = other RNA
ttattacaacatgaaatagt

SEQ ID NO: 962 - RNA, 20 nt, synthetic construct
  source 1..20: mol_type = other RNA
cttattacaacatgaaatag

SEQ ID NO: 963 - RNA, 20 nt, synthetic construct
  source 1..20: mol_type = other RNA
ttgtaataagggccaccata

SEQ ID NO: 964 - RNA, 20 nt, synthetic construct
  source 1..20: mol_type = other RNA
tgaggagggcatccttatgg

SEQ ID NO: 965 - RNA, 20 nt, synthetic construct
  source 1..20: mol_type = other RNA
ctatgaggagggcatcctta

SEQ ID NO: 966 - RNA, 20 nt, synthetic construct
  source 1..20: mol_type = other RNA
gatgccctcctcatagtgtt

SEQ ID NO: 967 - RNA, 20 nt, synthetic construct
  source 1..20: mol_type = other RNA
agaaccgaacactatgagga

SEQ ID NO: 968 - RNA, 20 nt, synthetic construct
  source 1..20: mol_type = other RNA
cagaaccgaacactatgagg

SEQ ID NO: 969 - RNA, 20 nt, synthetic construct
  source 1..20: mol_type = other RNA
gatcagaaccgaacactatg

SEQ ID NO: 970 - RNA, 20 nt, synthetic construct
  source 1..20: mol_type = other RNA
cttcctcgagaacagtcact

SEQ ID NO: 971 - RNA, 20 nt, synthetic construct
  source 1..20: mol_type = other RNA
gcgccaagtgactgttctcg

SEQ ID NO: 972 - RNA, 20 nt, synthetic construct
  source 1..20: mol_type = other RNA
cttggcgcactttaataatc

SEQ ID NO: 973 - RNA, 20 nt, synthetic construct
  source 1..20: mol_type = other RNA
atttgactttagatactcca

SEQ ID NO: 974 - RNA, 20 nt, synthetic construct
  source 1..20: mol_type = other RNA
ggagtatctaaagtcaaatc

SEQ ID NO: 975 - RNA, 20 nt, synthetic construct
  source 1..20: mol_type = other RNA
atcataaagactagatacca

SEQ ID NO: 976 - RNA, 20 nt, synthetic construct
  source 1..20: mol_type = other RNA
aatgaaatataaacattttc

SEQ ID NO: 977 - RNA, 20 nt, synthetic construct
  source 1..20: mol_type = other RNA
cttattgcctgctagccaaa

SEQ ID NO: 978 - RNA, 20 nt, synthetic construct
  source 1..20: mol_type = other RNA
catttggctagcaggcaata

SEQ ID NO: 979 - RNA, 20 nt, synthetic construct
  source 1..20: mol_type = other RNA
cctgctagccaaatggaatt

SEQ ID NO: 980 - RNA, 20 nt, synthetic construct
  source 1..20: mol_type = other RNA
ctgctagccaaatggaattt

SEQ ID NO: 981 - RNA, 20 nt, synthetic construct
  source 1..20: mol_type = other RNA
ccaaattccatttggctagc

SEQ ID NO: 982 - RNA, 20 nt, synthetic construct
  source 1..20: mol_type = other RNA
ttgcttgcccaaattccatt

SEQ ID NO: 983 - RNA, 20 nt, synthetic construct
  source 1..20: mol_type = other RNA
aggacaaaagtaaatttcta

SEQ ID NO: 984 - RNA, 20 nt, synthetic construct
  source 1..20: mol_type = other RNA
taggacaaaagtaaatttct

SEQ ID NO: 985 - RNA, 20 nt, synthetic construct
  source 1..20: mol_type = other RNA
tatttacagttagggttttt

SEQ ID NO: 986 - RNA, 20 nt, synthetic construct
  source 1..20: mol_type = other RNA
cgactgcttatttacagtta

SEQ ID NO: 987 - RNA, 20 nt, synthetic construct
  source 1..20: mol_type = other RNA
tcgactgcttatttacagtt

SEQ ID NO: 988 - RNA, 20 nt, synthetic construct
  source 1..20: mol_type = other RNA
aagttgccaccttgaagttg

SEQ ID NO: 989 - RNA, 20 nt, synthetic construct
  source 1..20: mol_type = other RNA
agttgccaccttgaagttga

SEQ ID NO: 990 - RNA, 20 nt, synthetic construct
  source 1..20: mol_type = other RNA
tgtatccctcaacttcaagg

SEQ ID NO: 991 - RNA, 20 nt, synthetic construct
  source 1..20: mol_type = other RNA
aagtgtatccctcaacttca

SEQ ID NO: 992 - RNA, 20 nt, synthetic construct
  source 1..20: mol_type = other RNA
ttcatcagtattaaaaacca

SEQ ID NO: 993 - RNA, 20 nt, synthetic construct
  source 1..20: mol_type = other RNA
aagacaaaataagagtacca

SEQ ID NO: 994 - RNA, 20 nt, synthetic construct
  source 1..20: mol_type = other RNA
ttcaaaacattttctaaatg

SEQ ID NO: 995 - RNA, 20 nt, synthetic construct
  source 1..20: mol_type = other RNA
aaatgtggtactttgaacct

SEQ ID NO: 996 - RNA, 20 nt, synthetic construct
  source 1..20: mol_type = other RNA
agaaacatgtaaatactcca

SEQ ID NO: 997 - RNA, 20 nt, synthetic construct
  source 1..20: mol_type = other RNA
tactttgccaattttgttat

SEQ ID NO: 998 - RNA, 20 nt, synthetic construct
  source 1..20: mol_type = other RNA
tttgccaattttgttattgg

SEQ ID NO: 999 - RNA, 20 nt, synthetic construct
  source 1..20: mol_type = other RNA
ttgccaattttgttattggt

SEQ ID NO: 1000 - RNA, 20 nt, synthetic construct
  source 1..20: mol_type = other RNA
ttacccaccaataacaaaat

SEQ ID NO: 1001 - RNA, 20 nt, synthetic construct
  source 1..20: mol_type = other RNA
ttttaaattatattgttatt

SEQ ID NO: 1002 - RNA, 20 nt, synthetic construct
  source 1..20: mol_type = other RNA
taattatttttaaagactac

SEQ ID NO: 1003 - RNA, 20 nt, synthetic construct
  source 1..20: mol_type = other RNA
tgctcagttatattctttta

SEQ ID NO: 1004 - RNA, 20 nt, synthetic construct
  source 1..20: mol_type = other RNA
ttatgtttaagtctgcatta

SEQ ID NO: 1005 - RNA, 20 nt, synthetic construct
  source 1..20: mol_type = other RNA
gtttaagtctgcattatggt

SEQ ID NO: 1006 - RNA, 20 nt, synthetic construct
  source 1..20: mol_type = other RNA
acttgtctttaaaatgagct

SEQ ID NO: 1007 - RNA, 20 nt, synthetic construct
  source 1..20: mol_type = other RNA
aacttgtctttaaaatgagc

SEQ ID NO: 1008 - RNA, 20 nt, synthetic construct
  source 1..20: mol_type = other RNA
tacaagcttataaaatttaa

SEQ ID NO: 1009 - RNA, 20 nt, synthetic construct
  source 1..20: mol_type = other RNA
gtataaatcagtgtagttta

SEQ ID NO: 1010 - RNA, 20 nt, synthetic construct
  source 1..20: mol_type = other RNA
agaataagaaatttattaaa

SEQ ID NO: 1011 - RNA, 20 nt, synthetic construct
  source 1..20: mol_type = other RNA
acatttcagacactcttaaa

SEQ ID NO: 1012 - RNA, 20 nt, synthetic construct
  source 1..20: mol_type = other RNA
aatgtttacatgttcttcgc

SEQ ID NO: 1013 - RNA, 20 nt, synthetic construct
  source 1..20: mol_type = other RNA
taccagtcattattctttag

SEQ ID NO: 1014 - RNA, 20 nt, synthetic construct
  source 1..20: mol_type = other RNA
agccactaaagaataatgac

SEQ ID NO: 1015 - RNA, 20 nt, synthetic construct
  source 1..20: mol_type = other RNA
gtcctctgctttttttttta

SEQ ID NO: 1016 - RNA, 20 nt, synthetic construct
  source 1..20: mol_type = other RNA
tgccttaaaaaaaaaagcag

SEQ ID NO: 1017 - RNA, 20 nt, synthetic construct
  source 1..20: mol_type = other RNA
aacaatcacaattggggatt

SEQ ID NO: 1018 - RNA, 20 nt, synthetic construct
  source 1..20: mol_type = other RNA
ctttaaaacaatcacaattg

SEQ ID NO: 1019 - RNA, 20 nt, synthetic construct
  source 1..20: mol_type = other RNA
tctttaaaacaatcacaatt

SEQ ID NO: 1020 - RNA, 20 nt, synthetic construct
  source 1..20: mol_type = other RNA
tgtgattgttttaaagatca

SEQ ID NO: 1021 - RNA, 20 nt, synthetic construct
  source 1..20: mol_type = other RNA
aaagatcatggtatgatcac

SEQ ID NO: 1022 - RNA, 20 nt, synthetic construct
  source 1..20: mol_type = other RNA
aagatcatggtatgatcaca

SEQ ID NO: 1023 - RNA, 20 nt, synthetic construct
  source 1..20: mol_type = other RNA
tggtatgatcacagggacca

SEQ ID NO: 1024 - RNA, 20 nt, synthetic construct
  source 1..20: mol_type = other RNA
gctgtgtgcatatataactc

SEQ ID NO: 1025 - RNA, 20 nt, synthetic construct
  source 1..20: mol_type = other RNA
tatataactctggatttgaa

SEQ ID NO: 1026 - RNA, 20 nt, synthetic construct
  source 1..20: mol_type = other RNA
ataactctggatttgaaagg

SEQ ID NO: 1027 - RNA, 20 nt, synthetic construct
  source 1..20: mol_type = other RNA
atgtgaagaaaagaactaga

SEQ ID NO: 1028 - RNA, 20 nt, synthetic construct
  source 1..20: mol_type = other RNA
ttttaaacagccagtttgac

SEQ ID NO: 1029 - RNA, 20 nt, synthetic construct
  source 1..20: mol_type = other RNA
ttgactggaattaaccaact

SEQ ID NO: 1030 - RNA, 20 nt, synthetic construct
  source 1..20: mol_type = other RNA
aacttggcacagcctaaaaa

SEQ ID NO: 1031 - RNA, 20 nt, synthetic construct
  source 1..20: mol_type = other RNA
ttttttaggctgtgccaagt

SEQ ID NO: 1032 - RNA, 20 nt, synthetic construct
  source 1..20: mol_type = other RNA
tttcacattactcctttttt

SEQ ID NO: 1033 - RNA, 20 nt, synthetic construct
  source 1..20: mol_type = other RNA
aaataagagaccatgtaagt

SEQ ID NO: 1034 - RNA, 20 nt, synthetic construct
  source 1..20: mol_type = other RNA
gtcttagggtcctacttaca

SEQ ID NO: 1035 - RNA, 20 nt, synthetic construct
  source 1..20: mol_type = other RNA
gtaggaccctaagacaacca

SEQ ID NO: 1036 - RNA, 20 nt, synthetic construct
  source 1..20: mol_type = other RNA
caaattccttggttgtctta

SEQ ID NO: 1037 - RNA, 20 nt, synthetic construct
  source 1..20: mol_type = other RNA
gcaaattccttggttgtctt

SEQ ID NO: 1038 - RNA, 20 nt, synthetic construct
  source 1..20: mol_type = other RNA
caaccaaggaatttgcttcc

SEQ ID NO: 1039 - RNA, 20 nt, synthetic construct
  source 1..20: mol_type = other RNA
aaccaaggaatttgcttcca

SEQ ID NO: 1040 - RNA, 20 nt, synthetic construct
  source 1..20: mol_type = other RNA
ggccctggaagcaaattcct

SEQ ID NO: 1041 - RNA, 20 nt, synthetic construct
  source 1..20: mol_type = other RNA
cagcagaggaatgagggccc

SEQ ID NO: 1042 - RNA, 20 nt, synthetic construct
  source 1..20: mol_type = other RNA
aagtaacagcagaggaatga

SEQ ID NO: 1043 - RNA, 20 nt, synthetic construct
  source 1..20: mol_type = other RNA
taagtaacagcagaggaatg

SEQ ID NO: 1044 - RNA, 20 nt, synthetic construct
  source 1..20: mol_type = other RNA
acatttgtaagtaacagcag

SEQ ID NO: 1045 - RNA, 20 nt, synthetic construct
  source 1..20: mol_type = other RNA
aaaggtagagaaagaatatc

SEQ ID NO: 1046 - RNA, 20 nt, synthetic construct
  source 1..20: mol_type = other RNA
tccacatttgaaaatataca

SEQ ID NO: 1047 - RNA, 20 nt, synthetic construct
  source 1..20: mol_type = other RNA
gccttgtatattttcaaatg

SEQ ID NO: 1048 - RNA, 20 nt, synthetic construct
  source 1..20: mol_type = other RNA
cctaaaaacctaaaaactcc

SEQ ID NO: 1049 - RNA, 20 nt, synthetic construct
  source 1..20: mol_type = other RNA
aaaacctaaaaactccagga

SEQ ID NO: 1050 - RNA, 20 nt, synthetic construct
  source 1..20: mol_type = other RNA
cctggagtttttaggttttt

SEQ ID NO: 1051 - RNA, 20 nt, synthetic construct
  source 1..20: mol_type = other RNA
ctttccttcctggagttttt

SEQ ID NO: 1052 - RNA, 20 nt, synthetic construct
  source 1..20: mol_type = other RNA
aactccaggaaggaaagaaa

SEQ ID NO: 1053 - RNA, 20 nt, synthetic construct
  source 1..20: mol_type = other RNA
aaggaaagaaaaggatgata

SEQ ID NO: 1054 - RNA, 20 nt, synthetic construct
  source 1..20: mol_type = other RNA
aggaaagaaaaggatgatat

SEQ ID NO: 1055 - RNA, 20 nt, synthetic construct
  source 1..20: mol_type = other RNA
ggaaagaaaaggatgatatg

SEQ ID NO: 1056 - RNA, 20 nt, synthetic construct
  source 1..20: mol_type = other RNA
gggaaatttgccataaatgc

SEQ ID NO: 1057 - RNA, 20 nt, synthetic construct
  source 1..20: mol_type = other RNA
tttgccataaatgccggttc

SEQ ID NO: 1058 - RNA, 20 nt, synthetic construct
  source 1..20: mol_type = other RNA
agaaccagaaccggcattta

SEQ ID NO: 1059 - RNA, 20 nt, synthetic construct
  source 1..20: mol_type = other RNA
gctaaactaagaaccagaac

SEQ ID NO: 1060 - RNA, 20 nt, synthetic construct
  source 1..20: mol_type = other RNA
atttccatcagttgaaattg

SEQ ID NO: 1061 - RNA, 20 nt, synthetic construct
  source 1..20: mol_type = other RNA
acaatttcaactgatggaaa

SEQ ID NO: 1062 - RNA, 20 nt, synthetic construct
  source 1..20: mol_type = other RNA
cacaccacaatttcaactga

SEQ ID NO: 1063 - RNA, 20 nt, synthetic construct
  source 1..20: mol_type = other RNA
atattcatttaataagatga

SEQ ID NO: 1064 - RNA, 20 nt, synthetic construct
  source 1..20: mol_type = other RNA
tattcatttaataagatgat

SEQ ID NO: 1065 - RNA, 20 nt, synthetic construct
  source 1..20: mol_type = other RNA
tagcaaacatttttactccc

SEQ ID NO: 1066 - RNA, 20 nt, synthetic construct
  source 1..20: mol_type = other RNA
atttgataaattatattcct

SEQ ID NO: 1067 - RNA, 20 nt, synthetic construct
  source 1..20: mol_type = other RNA
aatttgataaattatattcc

SEQ ID NO: 1068 - RNA, 20 nt, synthetic construct
  source 1..20: mol_type = other RNA
gaaacttgtttttaatatca

SEQ ID NO: 1069 - RNA, 20 nt, synthetic construct
  source 1..20: mol_type = other RNA
aaacttgtttttaatatcac

SEQ ID NO: 1070 - RNA, 20 nt, synthetic construct
  source 1..20: mol_type = other RNA
gtttttaatatcacgggtaa

SEQ ID NO: 1071 - RNA, 20 nt, synthetic construct
  source 1..20: mol_type = other RNA
tttttaatatcacgggtaat

SEQ ID NO: 1072 - RNA, 20 nt, synthetic construct
  source 1..20: mol_type = other RNA
aatgggtaagtgtgaaaact

SEQ ID NO: 1073 - RNA, 20 nt, synthetic construct
  source 1..20: mol_type = other RNA
tttttttatgaaacaaaaaa

SEQ ID NO: 1074 - RNA, 20 nt, synthetic construct
  source 1..20: mol_type = other RNA
aaaaaaggtgacgaataata

SEQ ID NO: 1075 - RNA, 20 nt, synthetic construct
  source 1..20: mol_type = other RNA
agcctgatttcatttatgcc

SEQ ID NO: 1076 - RNA, 20 nt, synthetic construct
  source 1..20: mol_type = other RNA
aacctggcataaatgaaatc

SEQ ID NO: 1077 - RNA, 20 nt, synthetic construct
  source 1..20: mol_type = other RNA
aagatctgtttttcaaaacc

SEQ ID NO: 1078 - RNA, 20 nt, synthetic construct
  source 1..20: mol_type = other RNA
gcacctttaatttgctctaa

SEQ ID NO: 1079 - RNA, 20 nt, synthetic construct
  source 1..20: mol_type = other RNA
gtaccgttagagcaaattaa

SEQ ID NO: 1080 - RNA, 20 nt, synthetic construct
  source 1..20: mol_type = other RNA
atgcagaattctgtctttac

SEQ ID NO: 1081 - RNA, 20 nt, synthetic construct
  source 1..20: mol_type = other RNA
agaattctgcatagcctttt

SEQ ID NO: 1082 - RNA, 20 nt, synthetic construct
  source 1..20: mol_type = other RNA
atactgtaaaaacacctaaa

SEQ ID NO: 1083 - RNA, 20 nt, synthetic construct
  source 1..20: mol_type = other RNA
tagagttaaattaccaatct

SEQ ID NO: 1084 - RNA, 20 nt, synthetic construct
  source 1..20: mol_type = other RNA
cagataatatcaaccaagat

SEQ ID NO: 1085 - RNA, 20 nt, synthetic construct
  source 1..20: mol_type = other RNA
tgcttccatttttattaatt

SEQ ID NO: 1086 - RNA, 20 nt, synthetic construct
  source 1..20: mol_type = other RNA
aatttccaaattaataaaaa

SEQ ID NO: 1087 - RNA, 20 nt, synthetic construct
  source 1..20: mol_type = other RNA
aatatgttgctagtaaatat

SEQ ID NO: 1088 - RNA, 20 nt, synthetic construct
  source 1..20: mol_type = other RNA
ataacttacattttcaaact

SEQ ID NO: 1089 - RNA, 20 nt, synthetic construct
  source 1..20: mol_type = other RNA
gataacttacattttcaaac

SEQ ID NO: 1090 - RNA, 20 nt, synthetic construct
  source 1..20: mol_type = other RNA
acattctcaacaatacaaca

SEQ ID NO: 1091 - RNA, 20 nt, synthetic construct
  source 1..20: mol_type = other RNA
taacttttgtaactgtcgct

SEQ ID NO: 1092 - RNA, 20 nt, synthetic construct
  source 1..20: mol_type = other RNA
cagtctcacaaagaacagac

SEQ ID NO: 1093 - DNA, 28 bp, synthetic construct
  source 1..28: mol_type = other DNA
tctttaaatgagaataattttaacaagg

SEQ ID NO: 1094 - DNA, 28 bp, synthetic construct
  source 1..28: mol_type = other DNA
ctttaaatgagaataattttaacaaggg

SEQ ID NO: 1095 - DNA, 28 bp, synthetic construct
  source 1..28: mol_type = other DNA
ttttaacaagggcaatgacagagaatgg

SEQ ID NO: 1096 - DNA, 28 bp, synthetic construct
  source 1..28: mol_type = other DNA
acaagggcaatgacagagaatggaaagg

SEQ ID NO: 1097 - DNA, 28 bp, synthetic construct
  source 1..28: mol_type = other DNA
gggcaatgacagagaatggaaaggaagg

SEQ ID NO: 1098 - DNA, 28 bp, synthetic construct
  source 1..28: mol_type = other DNA
aggaagagatttcagcagagtcagaagg

SEQ ID NO: 1099 - DNA, 28 bp, synthetic construct
  source 1..28: mol_type = other DNA
agatttcagcagagtcagaaggatgtgg

SEQ ID NO: 1100 - DNA, 28 bp, synthetic construct
  source 1..28: mol_type = other DNA
aggatgtggcaactgaaaacagcattgg

SEQ ID NO: 1101 - DNA, 28 bp, synthetic construct
  source 1..28: mol_type = other DNA
ggatgtggcaactgaaaacagcattggg

SEQ ID NO: 1102 - DNA, 28 bp, synthetic construct
  source 1..28: mol_type = other DNA
ggcaactgaaaacagcattgggacaagg

SEQ ID NO: 1103 - DNA, 28 bp, synthetic construct
  source 1..28: mol_type = other DNA
gcaactgaaaacagcattgggacaaggg

SEQ ID NO: 1104 - DNA, 28 bp, synthetic construct
  source 1..28: mol_type = other DNA
agggataagaaaaagtcaaagtttctgg

SEQ ID NO: 1105 - DNA, 28 bp, synthetic construct
  source 1..28: mol_type = other DNA
gagttcacatcttatactgttactcagg

SEQ ID NO: 1106 - DNA, 28 bp, synthetic construct
  source 1..28: mol_type = other DNA
acagtataagatgtgaactcagatttgg

SEQ ID NO: 1107 - DNA, 28 bp, synthetic construct
  source 1..28: mol_type = other DNA
ataagatgtgaactcagatttggaaagg

SEQ ID NO: 1108 - DNA, 28 bp, synthetic construct
  source 1..28: mol_type = other DNA
taagatgtgaactcagatttggaaaggg

SEQ ID NO: 1109 - DNA, 28 bp, synthetic construct
  source 1..28: mol_type = other DNA
tgaactcagatttggaaagggagacagg

SEQ ID NO: 1110 - DNA, 28 bp, synthetic construct
  source 1..28: mol_type = other DNA
gaaagggagacaggaaattaagttttgg

SEQ ID NO: 1111 - DNA, 28 bp, synthetic construct
  source 1..28: mol_type = other DNA
aatgacagcaaaacattcatataagagg

SEQ ID NO: 1112 - DNA, 28 bp, synthetic construct
  source 1..28: mol_type = other DNA
agcaaaacattcatataagaggaagtgg

SEQ ID NO: 1113 - DNA, 28 bp, synthetic construct
  source 1..28: mol_type = other DNA
ttatccaacaagtgtaaagatcacatgg

SEQ ID NO: 1114 - DNA, 28 bp, synthetic construct
  source 1..28: mol_type = other DNA
tatccaacaagtgtaaagatcacatggg

SEQ ID NO: 1115 - DNA, 28 bp, synthetic construct
  source 1..28: mol_type = other DNA
atccaacaagtgtaaagatcacatgggg

SEQ ID NO: 1116 - DNA, 28 bp, synthetic construct
  source 1..28: mol_type = other DNA
ttccccatgtgatctttacacttgttgg

SEQ ID NO: 1117 - DNA, 28 bp, synthetic construct
  source 1..28: mol_type = other DNA
gggaaatagaagtcacctgcaacacagg

SEQ ID NO: 1118 - DNA, 28 bp, synthetic construct
  source 1..28: mol_type = other DNA
aagtcacctgcaacacaggcagaactgg

SEQ ID NO: 1119 - DNA, 28 bp, synthetic construct
  source 1..28: mol_type = other DNA
aagcttccagttctgcctgtgttgcagg

SEQ ID NO: 1120 - DNA, 28 bp, synthetic construct
  source 1..28: mol_type = other DNA
acacaggcagaactggaagcttcgctgg

SEQ ID NO: 1121 - DNA, 28 bp, synthetic construct
  source 1..28: mol_type = other DNA
ggcagaactggaagcttcgctggccagg

SEQ ID NO: 1122 - DNA, 28 bp, synthetic construct
  source 1..28: mol_type = other DNA
gaatggtcagagtttaacatggacctgg

SEQ ID NO: 1123 - DNA, 28 bp, synthetic construct
  source 1..28: mol_type = other DNA
tccatgttaaactctgaccattctctgg

SEQ ID NO: 1124 - DNA, 28 bp, synthetic construct
  source 1..28: mol_type = other DNA
ccatgttaaactctgaccattctctggg

SEQ ID NO: 1125 - DNA, 28 bp, synthetic construct
  source 1..28: mol_type = other DNA
catgttaaactctgaccattctctgggg

SEQ ID NO: 1126 - DNA, 28 bp, synthetic construct
  source 1..28: mol_type = other DNA
gcaaaggctggacagccccagagaatgg

SEQ ID NO: 1127 - DNA, 28 bp, synthetic construct
  source 1..28: mol_type = other DNA
ctctggggctgtccagcctttgcacagg

SEQ ID NO: 1128 - DNA, 28 bp, synthetic construct
  source 1..28: mol_type = other DNA
tggggctgtccagcctttgcacaggcgg

SEQ ID NO: 1129 - DNA, 28 bp, synthetic construct
  source 1..28: mol_type = other DNA
acaaacgcgccgcctgtgcaaaggctgg

SEQ ID NO: 1130 - DNA, 28 bp, synthetic construct
  source 1..28: mol_type = other DNA
gaagacaaacgcgccgcctgtgcaaagg

SEQ ID NO: 1131 - DNA, 28 bp, synthetic construct
  source 1..28: mol_type = other DNA
ggcggcgcgtttgtcttcagttttcagg

SEQ ID NO: 1132 - DNA, 28 bp, synthetic construct
  source 1..28: mol_type = other DNA
gcactgggagataagaaataggacgggg

SEQ ID NO: 1133 - DNA, 28 bp, synthetic construct
  source 1..28: mol_type = other DNA
ggcactgggagataagaaataggacggg

SEQ ID NO: 1134 - DNA, 28 bp, synthetic construct
  source 1..28: mol_type = other DNA
aggcactgggagataagaaataggacgg

SEQ ID NO: 1135 - DNA, 28 bp, synthetic construct
  source 1..28: mol_type = other DNA
cctatttcttatctcccagtgcctctgg

SEQ ID NO: 1136 - DNA, 28 bp, synthetic construct
  source 1..28: mol_type = other DNA
agacacagaaaaggccagaggcactggg

SEQ ID NO: 1137 - DNA, 28 bp, synthetic construct
  source 1..28: mol_type = other DNA
gagacacagaaaaggccagaggcactgg

SEQ ID NO: 1138 - DNA, 28 bp, synthetic construct
  source 1..28: mol_type = other DNA
tggagggagacacagaaaaggccagagg

SEQ ID NO: 1139 - DNA, 28 bp, synthetic construct
  source 1..28: mol_type = other DNA
ctcattctggagggagacacagaaaagg

SEQ ID NO: 1140 - DNA, 28 bp, synthetic construct
  source 1..28: mol_type = other DNA
ttctgtgtctccctccagaatgagctgg

SEQ ID NO: 1141 - DNA, 28 bp, synthetic construct
  source 1..28: mol_type = other DNA
gaagagagctccagctcattctggaggg

SEQ ID NO: 1142 - DNA, 28 bp, synthetic construct
  source 1..28: mol_type = other DNA
tgaagagagctccagctcattctggagg

SEQ ID NO: 1143 - DNA, 28 bp, synthetic construct
  source 1..28: mol_type = other DNA
agatgaagagagctccagctcattctgg

SEQ ID NO: 1144 - DNA, 28 bp, synthetic construct
  source 1..28: mol_type = other DNA
catcttgacctttgtgtagtctctgagg

SEQ ID NO: 1145 - DNA, 28 bp, synthetic construct
  source 1..28: mol_type = other DNA
acctttgtgtagtctctgaggtctgagg

SEQ ID NO: 1146 - DNA, 28 bp, synthetic construct
  source 1..28: mol_type = other DNA
gcctcagacctcagagactacacaaagg

SEQ ID NO: 1147 - DNA, 28 bp, synthetic construct
  source 1..28: mol_type = other DNA
attttttgagggtcagacatagtgatgg

SEQ ID NO: 1148 - DNA, 28 bp, synthetic construct
  source 1..28: mol_type = other DNA
cagtcagtcaacaaatattttttgaggg

SEQ ID NO: 1149 - DNA, 28 bp, synthetic construct
  source 1..28: mol_type = other DNA
cctcaaaaaatatttgttgactgactgg

SEQ ID NO: 1150 - DNA, 28 bp, synthetic construct
  source 1..28: mol_type = other DNA
gactggcttattcctgttgttgccctgg

SEQ ID NO: 1151 - DNA, 28 bp, synthetic construct
  source 1..28: mol_type = other DNA
ggtaattcttttccagggcaacaacagg

SEQ ID NO: 1152 - DNA, 28 bp, synthetic construct
  source 1..28: mol_type = other DNA
aatcgggcagggtaattcttttccaggg

SEQ ID NO: 1153 - DNA, 28 bp, synthetic construct
  source 1..28: mol_type = other DNA
taatcgggcagggtaattcttttccagg

SEQ ID NO: 1154 - DNA, 28 bp, synthetic construct
  source 1..28: mol_type = other DNA
gaagaaactgtgacttaatcgggcaggg

SEQ ID NO: 1155 - DNA, 28 bp, synthetic construct
  source 1..28: mol_type = other DNA
ggaagaaactgtgacttaatcgggcagg

SEQ ID NO: 1156 - DNA, 28 bp, synthetic construct
  source 1..28: mol_type = other DNA
agaaggaagaaactgtgacttaatcggg

SEQ ID NO: 1157 - DNA, 28 bp, synthetic construct
  source 1..28: mol_type = other DNA
aagaaggaagaaactgtgacttaatcgg

SEQ ID NO: 1158 - DNA, 28 bp, synthetic construct
  source 1..28: mol_type = other DNA
attaagtcacagtttcttccttcttagg

SEQ ID NO: 1159 - DNA, 28 bp, synthetic construct
  source 1..28: mol_type = other DNA
ttaagtcacagtttcttccttcttaggg

SEQ ID NO: 1160 - DNA, 28 bp, synthetic construct
  source 1..28: mol_type = other DNA
ggttgttaactacgctgccctaagaagg

SEQ ID NO: 1161 - DNA, 28 bp, synthetic construct
  source 1..28: mol_type = other DNA
cagcgtagttaacaacctcaacaccagg

SEQ ID NO: 1162 - DNA, 28 bp, synthetic construct
  source 1..28: mol_type = other DNA
tgaggaagacaatttcctggtgttgagg

SEQ ID NO: 1163 - DNA, 28 bp, synthetic construct
  source 1..28: mol_type = other DNA
gtatgtgatgaggaagacaatttcctgg

SEQ ID NO: 1164 - DNA, 28 bp, synthetic construct
  source 1..28: mol_type = other DNA
gaaattgtcttcctcatcacataccagg

SEQ ID NO: 1165 - DNA, 28 bp, synthetic construct
  source 1..28: mol_type = other DNA
aaattgtcttcctcatcacataccaggg

SEQ ID NO: 1166 - DNA, 28 bp, synthetic construct
  source 1..28: mol_type = other DNA
atgaataataccctggtatgtgatgagg

SEQ ID NO: 1167 - DNA, 28 bp, synthetic construct
  source 1..28: mol_type = other DNA
tgagtaaactgcatgaataataccctgg

SEQ ID NO: 1168 - DNA, 28 bp, synthetic construct
  source 1..28: mol_type = other DNA
tgactaattgttagctttatttcaaggg

SEQ ID NO: 1169 - DNA, 28 bp, synthetic construct
  source 1..28: mol_type = other DNA
ttgactaattgttagctttatttcaagg

SEQ ID NO: 1170 - DNA, 28 bp, synthetic construct
  source 1..28: mol_type = other DNA
ttagtcaaagatttacacatttcctagg

SEQ ID NO: 1171 - DNA, 28 bp, synthetic construct
  source 1..28: mol_type = other DNA
tagtcaaagatttacacatttcctaggg

SEQ ID NO: 1172 - DNA, 28 bp, synthetic construct
  source 1..28: mol_type = other DNA
ctttgttaaaaagttgactgaccctagg

SEQ ID NO: 1173 - DNA, 28 bp, synthetic construct
  source 1..28: mol_type = other DNA
ttttaacaaagccaacttttagtagtgg

SEQ ID NO: 1174 - DNA, 28 bp, synthetic construct
  source 1..28: mol_type = other DNA
taacaaagccaacttttagtagtggtgg

SEQ ID NO: 1175 - DNA, 28 bp, synthetic construct
  source 1..28: mol_type = other DNA
caaagccaacttttagtagtggtggcgg

SEQ ID NO: 1176 - DNA, 28 bp, synthetic construct
  source 1..28: mol_type = other DNA
agccaacttttagtagtggtggcggtgg

SEQ ID NO: 1177 - DNA, 28 bp, synthetic construct
  source 1..28: mol_type = other DNA
cgccaccgccaccactactaaaagttgg

SEQ ID NO: 1178 - DNA, 28 bp, synthetic construct
  source 1..28: mol_type = other DNA
caacttttagtagtggtggcggtggcgg

SEQ ID NO: 1179 - DNA, 28 bp, synthetic construct
  source 1..28: mol_type = other DNA
aacttttagtagtggtggcggtggcggg

SEQ ID NO: 1180 - DNA, 28 bp, synthetic construct
  source 1..28: mol_type = other DNA
acttttagtagtggtggcggtggcgggg

SEQ ID NO: 1181 - DNA, 28 bp, synthetic construct
  source 1..28: mol_type = other DNA
cttttagtagtggtggcggtggcggggg

SEQ ID NO: 1182 - DNA, 28 bp, synthetic construct
  source 1..28: mol_type = other DNA
ttttagtagtggtggcggtggcgggggg

SEQ ID NO: 1183 - DNA, 28 bp, synthetic construct
  source 1..28: mol_type = other DNA
tttagtagtggtggcggtggcggggggg

SEQ ID NO: 1184 - DNA, 28 bp, synthetic construct
  source 1..28: mol_type = other DNA
tttcaggaacagaaaaagcaaagaaggg

SEQ ID NO: 1185 - DNA, 28 bp, synthetic construct
  source 1..28: mol_type = other DNA
atttcaggaacagaaaaagcaaagaagg

SEQ ID NO: 1186 - DNA, 28 bp, synthetic construct
  source 1..28: mol_type = other DNA
ttctgttcctgaaatacaaaagtgatgg

SEQ ID NO: 1187 - DNA, 28 bp, synthetic construct
  source 1..28: mol_type = other DNA
gcatttaccatcacttttgtatttcagg

SEQ ID NO: 1188 - DNA, 28 bp, synthetic construct
  source 1..28: mol_type = other DNA
aaatgcttcagaatttctctatgagagg

SEQ ID NO: 1189 - DNA, 28 bp, synthetic construct
  source 1..28: mol_type = other DNA
aatgcttcagaatttctctatgagaggg

SEQ ID NO: 1190 - DNA, 28 bp, synthetic construct
  source 1..28: mol_type = other DNA
cagaatttctctatgagagggtctcagg

SEQ ID NO: 1191 - DNA, 28 bp, synthetic construct
  source 1..28: mol_type = other DNA
agggtctcaggcactgcactcacgctgg

SEQ ID NO: 1192 - DNA, 28 bp, synthetic construct
  source 1..28: mol_type = other DNA
tcaggcactgcactcacgctggagttgg

SEQ ID NO: 1193 - DNA, 28 bp, synthetic construct
  source 1..28: mol_type = other DNA
caggcactgcactcacgctggagttggg

SEQ ID NO: 1194 - DNA, 28 bp, synthetic construct
  source 1..28: mol_type = other DNA
aggcactgcactcacgctggagttgggg

SEQ ID NO: 1195 - DNA, 28 bp, synthetic construct
  source 1..28: mol_type = other DNA
ggcactgcactcacgctggagttggggg

SEQ ID NO: 1196 - DNA, 28 bp, synthetic construct
  source 1..28: mol_type = other DNA
actgcactcacgctggagttgggggtgg

SEQ ID NO: 1197 - DNA, 28 bp, synthetic construct
  source 1..28: mol_type = other DNA
cactcacgctggagttgggggtggctgg

SEQ ID NO: 1198 - DNA, 28 bp, synthetic construct
  source 1..28: mol_type = other DNA
gggtggctggtccttttcttgaaccagg

SEQ ID NO: 1199 - DNA, 28 bp, synthetic construct
  source 1..28: mol_type = other DNA
tctctgcaaaacctggttcaagaaaagg

SEQ ID NO: 1200 - DNA, 28 bp, synthetic construct
  source 1..28: mol_type = other DNA
tcttgaaccaggttttgcagagaattgg

SEQ ID NO: 1201 - DNA, 28 bp, synthetic construct
  source 1..28: mol_type = other DNA
actaggaccaattctctgcaaaacctgg

SEQ ID NO: 1202 - DNA, 28 bp, synthetic construct
  source 1..28: mol_type = other DNA
ttggtcctagtaaagagtatttgtgtgg

SEQ ID NO: 1203 - DNA, 28 bp, synthetic construct
  source 1..28: mol_type = other DNA
tggtcctagtaaagagtatttgtgtggg

SEQ ID NO: 1204 - DNA, 28 bp, synthetic construct
  source 1..28: mol_type = other DNA
tcctagtaaagagtatttgtgtgggagg

SEQ ID NO: 1205 - DNA, 28 bp, synthetic construct
  source 1..28: mol_type = other DNA
tcctcccacacaaatactctttactagg

SEQ ID NO: 1206 - DNA, 28 bp, synthetic construct
  source 1..28: mol_type = other DNA
aaagagtatttgtgtgggaggagtttgg

SEQ ID NO: 1207 - DNA, 28 bp, synthetic construct
  source 1..28: mol_type = other DNA
tttgtgtgggaggagtttggcttgctgg

SEQ ID NO: 1208 - DNA, 28 bp, synthetic construct
  source 1..28: mol_type = other DNA
gtgtgggaggagtttggcttgctggcgg

SEQ ID NO: 1209 - DNA, 28 bp, synthetic construct
  source 1..28: mol_type = other DNA
tgtgggaggagtttggcttgctggcggg

SEQ ID NO: 1210 - DNA, 28 bp, synthetic construct
  source 1..28: mol_type = other DNA
gtgggaggagtttggcttgctggcgggg

SEQ ID NO: 1211 - DNA, 28 bp, synthetic construct
  source 1..28: mol_type = other DNA
gtttggcttgctggcggggagtatttgg

SEQ ID NO: 1212 - DNA, 28 bp, synthetic construct
  source 1..28: mol_type = other DNA
ctggcggggagtatttggataatactgg

SEQ ID NO: 1213 - DNA, 28 bp, synthetic construct
  source 1..28: mol_type = other DNA
caaaaggaggcaagagatgcatttgagg

SEQ ID NO: 1214 - DNA, 28 bp, synthetic construct
  source 1..28: mol_type = other DNA
cctccttttgaataagatacttttgagg

SEQ ID NO: 1215 - DNA, 28 bp, synthetic construct
  source 1..28: mol_type = other DNA
ggacctcaaaagtatcttattcaaaagg

SEQ ID NO: 1216 - DNA, 28 bp, synthetic construct
  source 1..28: mol_type = other DNA
aatagaatggaatttggcaggtgggtgg

SEQ ID NO: 1217 - DNA, 28 bp, synthetic construct
  source 1..28: mol_type = other DNA
gaaaatagaatggaatttggcaggtggg

SEQ ID NO: 1218 - DNA, 28 bp, synthetic construct
  source 1..28: mol_type = other DNA
agaaaatagaatggaatttggcaggtgg

SEQ ID NO: 1219 - DNA, 28 bp, synthetic construct
  source 1..28: mol_type = other DNA
ggaagaaaatagaatggaatttggcagg

SEQ ID NO: 1220 - DNA, 28 bp, synthetic construct
  source 1..28: mol_type = other DNA
tgtgggaagaaaatagaatggaatttgg

SEQ ID NO: 1221 - DNA, 28 bp, synthetic construct
  source 1..28: mol_type = other DNA
aaattccattctattttcttcccacagg

SEQ ID NO: 1222 - DNA, 28 bp, synthetic construct
  source 1..28: mol_type = other DNA
aattccattctattttcttcccacaggg

SEQ ID NO: 1223 - DNA, 28 bp, synthetic construct
  source 1..28: mol_type = other DNA
aactccctgtgggaagaaaatagaatgg

SEQ ID NO: 1224 - DNA, 28 bp, synthetic construct
  source 1..28: mol_type = other DNA
tcttcccacagggagtttccctgattgg

SEQ ID NO: 1225 - DNA, 28 bp, synthetic construct
  source 1..28: mol_type = other DNA
cttcccacagggagtttccctgattggg

SEQ ID NO: 1226 - DNA, 28 bp, synthetic construct
  source 1..28: mol_type = other DNA
cttcccaatcagggaaactccctgtggg

SEQ ID NO: 1227 - DNA, 28 bp, synthetic construct
  source 1..28: mol_type = other DNA
ccacagggagtttccctgattgggaagg

SEQ ID NO: 1228 - DNA, 28 bp, synthetic construct
  source 1..28: mol_type = other DNA
cacagggagtttccctgattgggaaggg

SEQ ID NO: 1229 - DNA, 28 bp, synthetic construct
  source 1..28: mol_type = other DNA
gggaaatacaggcccttcccaatcaggg

SEQ ID NO: 1230 - DNA, 28 bp, synthetic construct
  source 1..28: mol_type = other DNA
cgggaaatacaggcccttcccaatcagg

SEQ ID NO: 1231 - DNA, 28 bp, synthetic construct
  source 1..28: mol_type = other DNA
agggcctgtatttcccgcgagcgttagg

SEQ ID NO: 1232 - DNA, 28 bp, synthetic construct
  source 1..28: mol_type = other DNA
atctcctaacgctcgcgggaaatacagg

SEQ ID NO: 1233 - DNA, 28 bp, synthetic construct
  source 1..28: mol_type = other DNA
ttcccgcgagcgttaggagatgtgcagg

SEQ ID NO: 1234 - DNA, 28 bp, synthetic construct
  source 1..28: mol_type = other DNA
gacctgcacatctcctaacgctcgcggg

SEQ ID NO: 1235 - DNA, 28 bp, synthetic construct
  source 1..28: mol_type = other DNA
agacctgcacatctcctaacgctcgcgg

SEQ ID NO: 1236 - DNA, 28 bp, synthetic construct
  source 1..28: mol_type = other DNA
ttaggagatgtgcaggtctattcattgg

SEQ ID NO: 1237 - DNA, 28 bp, synthetic construct
  source 1..28: mol_type = other DNA
taggagatgtgcaggtctattcattggg

SEQ ID NO: 1238 - DNA, 28 bp, synthetic construct
  source 1..28: mol_type = other DNA
aggagatgtgcaggtctattcattgggg

SEQ ID NO: 1239 - DNA, 28 bp, synthetic construct
  source 1..28: mol_type = other DNA
ggagatgtgcaggtctattcattggggg

SEQ ID NO: 1240 - DNA, 28 bp, synthetic construct
  source 1..28: mol_type = other DNA
ctattcattgggggagcccaattcccgg

SEQ ID NO: 1241 - DNA, 28 bp, synthetic construct
  source 1..28: mol_type = other DNA
tattcattgggggagcccaattcccggg

SEQ ID NO: 1242 - DNA, 28 bp, synthetic construct
  source 1..28: mol_type = other DNA
tcattgggggagcccaattcccgggagg

SEQ ID NO: 1243 - DNA, 28 bp, synthetic construct
  source 1..28: mol_type = other DNA
gggagcccaattcccgggaggatttagg

SEQ ID NO: 1244 - DNA, 28 bp, synthetic construct
  source 1..28: mol_type = other DNA
ggagcccaattcccgggaggatttaggg

SEQ ID NO: 1245 - DNA, 28 bp, synthetic construct
  source 1..28: mol_type = other DNA
tgatccctaaatcctcccgggaattggg

SEQ ID NO: 1246 - DNA, 28 bp, synthetic construct
  source 1..28: mol_type = other DNA
gtgatccctaaatcctcccgggaattgg

SEQ ID NO: 1247 - DNA, 28 bp, synthetic construct
  source 1..28: mol_type = other DNA
aattcccgggaggatttagggatcacgg

SEQ ID NO: 1248 - DNA, 28 bp, synthetic construct
  source 1..28: mol_type = other DNA
attcccgggaggatttagggatcacggg

SEQ ID NO: 1249 - DNA, 28 bp, synthetic construct
  source 1..28: mol_type = other DNA
cccgggaggatttagggatcacgggagg

SEQ ID NO: 1250 - DNA, 28 bp, synthetic construct
  source 1..28: mol_type = other DNA
ccgggaggatttagggatcacgggaggg

SEQ ID NO: 1251 - DNA, 28 bp, synthetic construct
  source 1..28: mol_type = other DNA
gaggatttagggatcacgggagggccgg

SEQ ID NO: 1252 - DNA, 28 bp, synthetic construct
  source 1..28: mol_type = other DNA
aggatttagggatcacgggagggccggg

SEQ ID NO: 1253 - DNA, 28 bp, synthetic construct
  source 1..28: mol_type = other DNA
ggatttagggatcacgggagggccgggg

SEQ ID NO: 1254 - DNA, 28 bp, synthetic construct
  source 1..28: mol_type = other DNA
tcacgggagggccggggcgttctcctgg

SEQ ID NO: 1255 - DNA, 28 bp, synthetic construct
  source 1..28: mol_type = other DNA
cgggagggccggggcgttctcctggtgg

SEQ ID NO: 1256 - DNA, 28 bp, synthetic construct
  source 1..28: mol_type = other DNA
gggagggccggggcgttctcctggtggg

SEQ ID NO: 1257 - DNA, 28 bp, synthetic construct
  source 1..28: mol_type = other DNA
ggagggccggggcgttctcctggtgggg

SEQ ID NO: 1258 - DNA, 28 bp, synthetic construct
  source 1..28: mol_type = other DNA
taaaatccccaccaggagaacgccccgg

SEQ ID NO: 1259 - DNA, 28 bp, synthetic construct
  source 1..28: mol_type = other DNA
gggcgttctcctggtggggattttaagg

SEQ ID NO: 1260 - DNA, 28 bp, synthetic construct
  source 1..28: mol_type = other DNA
tctgagcggccttaaaatccccaccagg

SEQ ID NO: 1261 - DNA, 28 bp, synthetic construct
  source 1..28: mol_type = other DNA
ttttaaggccgctcagagccacgactgg

SEQ ID NO: 1262 - DNA, 28 bp, synthetic construct
  source 1..28: mol_type = other DNA
tttaaggccgctcagagccacgactggg

SEQ ID NO: 1263 - DNA, 28 bp, synthetic construct
  source 1..28: mol_type = other DNA
ggtagctcccagtcgtggctctgagcgg

SEQ ID NO: 1264 - DNA, 28 bp, synthetic construct
  source 1..28: mol_type = other DNA
gctggctaagggtagctcccagtcgtgg

SEQ ID NO: 1265 - DNA, 28 bp, synthetic construct
  source 1..28: mol_type = other DNA
gctacccttagccagcgccccaagccgg

SEQ ID NO: 1266 - DNA, 28 bp, synthetic construct
  source 1..28: mol_type = other DNA
ctacccttagccagcgccccaagccggg

SEQ ID NO: 1267 - DNA, 28 bp, synthetic construct
  source 1..28: mol_type = other DNA
actcccggcttggggcgctggctaaggg

SEQ ID NO: 1268 - DNA, 28 bp, synthetic construct
  source 1..28: mol_type = other DNA
tactcccggcttggggcgctggctaagg

SEQ ID NO: 1269 - DNA, 28 bp, synthetic construct
  source 1..28: mol_type = other DNA
tagccagcgccccaagccgggagtacgg

SEQ ID NO: 1270 - DNA, 28 bp, synthetic construct
  source 1..28: mol_type = other DNA
gaaccgtactcccggcttggggcgctgg

SEQ ID NO: 1271 - DNA, 28 bp, synthetic construct
  source 1..28: mol_type = other DNA
tgcagagaaccgtactcccggcttgggg

SEQ ID NO: 1272 - DNA, 28 bp, synthetic construct
  source 1..28: mol_type = other DNA
ctgcagagaaccgtactcccggcttggg

SEQ ID NO: 1273 - DNA, 28 bp, synthetic construct
  source 1..28: mol_type = other DNA
ccaagccgggagtacggttctctgcagg

SEQ ID NO: 1274 - DNA, 28 bp, synthetic construct
  source 1..28: mol_type = other DNA
caagccgggagtacggttctctgcaggg

SEQ ID NO: 1275 - DNA, 28 bp, synthetic construct
  source 1..28: mol_type = other DNA
gctaccctgcagagaaccgtactcccgg

SEQ ID NO: 1276 - DNA, 28 bp, synthetic construct
  source 1..28: mol_type = other DNA
gagtacggttctctgcagggtagcccgg

SEQ ID NO: 1277 - DNA, 28 bp, synthetic construct
  source 1..28: mol_type = other DNA
cggttctctgcagggtagcccggctcgg

SEQ ID NO: 1278 - DNA, 28 bp, synthetic construct
  source 1..28: mol_type = other DNA
ggttctctgcagggtagcccggctcggg

SEQ ID NO: 1279 - DNA, 28 bp, synthetic construct
  source 1..28: mol_type = other DNA
gttctctgcagggtagcccggctcgggg

SEQ ID NO: 1280 - DNA, 28 bp, synthetic construct
  source 1..28: mol_type = other DNA
ttctctgcagggtagcccggctcggggg

SEQ ID NO: 1281 - DNA, 28 bp, synthetic construct
  source 1..28: mol_type = other DNA
tctgcagggtagcccggctcgggggtgg

SEQ ID NO: 1282 - DNA, 28 bp, synthetic construct
  source 1..28: mol_type = other DNA
gggtagcccggctcgggggtggcgaagg

SEQ ID NO: 1283 - DNA, 28 bp, synthetic construct
  source 1..28: mol_type = other DNA
tagcccggctcgggggtggcgaaggcgg

SEQ ID NO: 1284 - DNA, 28 bp, synthetic construct
  source 1..28: mol_type = other DNA
tcaccgccttcgccacccccgagccggg

SEQ ID NO: 1285 - DNA, 28 bp, synthetic construct
  source 1..28: mol_type = other DNA
ttcaccgccttcgccacccccgagccgg

SEQ ID NO: 1286 - DNA, 28 bp, synthetic construct
  source 1..28: mol_type = other DNA
gctcgggggtggcgaaggcggtgaatgg

SEQ ID NO: 1287 - DNA, 28 bp, synthetic construct
  source 1..28: mol_type = other DNA
gtggcgaaggcggtgaatggagacccgg

SEQ ID NO: 1288 - DNA, 28 bp, synthetic construct
  source 1..28: mol_type = other DNA
tggcgaaggcggtgaatggagacccggg

SEQ ID NO: 1289 - DNA, 28 bp, synthetic construct
  source 1..28: mol_type = other DNA
ggcgaaggcggtgaatggagacccgggg

SEQ ID NO: 1290 - DNA, 28 bp, synthetic construct
  source 1..28: mol_type = other DNA
gcgaaggcggtgaatggagacccggggg

SEQ ID NO: 1291 - DNA, 28 bp, synthetic construct
  source 1..28: mol_type = other DNA
cgaaggcggtgaatggagacccgggggg

SEQ ID NO: 1292 - DNA, 28 bp, synthetic construct
  source 1..28: mol_type = other DNA
gaaggcggtgaatggagacccggggggg

SEQ ID NO: 1293 - DNA, 28 bp, synthetic construct
  source 1..28: mol_type = other DNA
aaggcggtgaatggagacccgggggggg

SEQ ID NO: 1294 - DNA, 28 bp, synthetic construct
  source 1..28: mol_type = other DNA
gcggtgaatggagacccggggggggcgg

SEQ ID NO: 1295 - DNA, 28 bp, synthetic construct
  source 1..28: mol_type = other DNA
cggtgaatggagacccggggggggcggg

SEQ ID NO: 1296 - DNA, 28 bp, synthetic construct
  source 1..28: mol_type = other DNA
ggtgaatggagacccggggggggcgggg

SEQ ID NO: 1297 - DNA, 28 bp, synthetic construct
  source 1..28: mol_type = other DNA
gtgaatggagacccggggggggcggggg

SEQ ID NO: 1298 - DNA, 28 bp, synthetic construct
  source 1..28: mol_type = other DNA
aatggagacccggggggggcgggggcgg

SEQ ID NO: 1299 - DNA, 28 bp, synthetic construct
  source 1..28: mol_type = other DNA
atggagacccggggggggcgggggcggg

SEQ ID NO: 1300 - DNA, 28 bp, synthetic construct
  source 1..28: mol_type = other DNA
tggagacccggggggggcgggggcgggg

SEQ ID NO: 1301 - DNA, 28 bp, synthetic construct
  source 1..28: mol_type = other DNA
cccggggggggcgggggcggggccgcgg

SEQ ID NO: 1302 - DNA, 28 bp, synthetic construct
  source 1..28: mol_type = other DNA
gccgcggccccgcccccgccccccccgg

SEQ ID NO: 1303 - DNA, 28 bp, synthetic construct
  source 1..28: mol_type = other DNA
ggggggggcgggggcggggccgcggcgg

SEQ ID NO: 1304 - DNA, 28 bp, synthetic construct
  source 1..28: mol_type = other DNA
gggggggcgggggcggggccgcggcggg

SEQ ID NO: 1305 - DNA, 28 bp, synthetic construct
  source 1..28: mol_type = other DNA
ggggcgggggcggggccgcggcgggcgg

SEQ ID NO: 1306 - DNA, 28 bp, synthetic construct
  source 1..28: mol_type = other DNA
gggcgggggcggggccgcggcgggcggg

SEQ ID NO: 1307 - DNA, 28 bp, synthetic construct
  source 1..28: mol_type = other DNA
ggcgggggcggggccgcggcgggcgggg

SEQ ID NO: 1308 - DNA, 28 bp, synthetic construct
  source 1..28: mol_type = other DNA
gggggcggggccgcggcgggcggggcgg

SEQ ID NO: 1309 - DNA, 28 bp, synthetic construct
  source 1..28: mol_type = other DNA
ggggcggggccgcggcgggcggggcggg

SEQ ID NO: 1310 - DNA, 28 bp, synthetic construct
  source 1..28: mol_type = other DNA
gggcggggccgcggcgggcggggcgggg

SEQ ID NO: 1311 - DNA, 28 bp, synthetic construct
  source 1..28: mol_type = other DNA
cggggccgcggcgggcggggcggggcgg

SEQ ID NO: 1312 - DNA, 28 bp, synthetic construct
  source 1..28: mol_type = other DNA
ggggccgcggcgggcggggcggggcggg

SEQ ID NO: 1313 - DNA, 28 bp, synthetic construct
  source 1..28: mol_type = other DNA
gggccgcggcgggcggggcggggcgggg

SEQ ID NO: 1314 - DNA, 28 bp, synthetic construct
  source 1..28: mol_type = other DNA
tcgccccgccccgccccgcccgccgcgg

SEQ ID NO: 1315 - DNA, 28 bp, synthetic construct
  source 1..28: mol_type = other DNA
gcgggcggggcggggcggggcgagtcgg

SEQ ID NO: 1316 - DNA, 28 bp, synthetic construct
  source 1..28: mol_type = other DNA
cgggcggggcggggcggggcgagtcggg

SEQ ID NO: 1317 - DNA, 28 bp, synthetic construct
  source 1..28: mol_type = other DNA
gggcggggcggggcgagtcgggccgagg

SEQ ID NO: 1318 - DNA, 28 bp, synthetic construct
  source 1..28: mol_type = other DNA
gggcggggcgagtcgggccgaggcccgg

SEQ ID NO: 1319 - DNA, 28 bp, synthetic construct
  source 1..28: mol_type = other DNA
ggcggggcgagtcgggccgaggcccggg

SEQ ID NO: 1320 - DNA, 28 bp, synthetic construct
  source 1..28: mol_type = other DNA
gcggggcgagtcgggccgaggcccgggg

SEQ ID NO: 1321 - DNA, 28 bp, synthetic construct
  source 1..28: mol_type = other DNA
cggggcgagtcgggccgaggcccggggg

SEQ ID NO: 1322 - DNA, 28 bp, synthetic construct
  source 1..28: mol_type = other DNA
ggcgagtcgggccgaggcccgggggcgg

SEQ ID NO: 1323 - DNA, 28 bp, synthetic construct
  source 1..28: mol_type = other DNA
gcgagtcgggccgaggcccgggggcggg

SEQ ID NO: 1324 - DNA, 28 bp, synthetic construct
  source 1..28: mol_type = other DNA
cgagtcgggccgaggcccgggggcgggg

SEQ ID NO: 1325 - DNA, 28 bp, synthetic construct
  source 1..28: mol_type = other DNA
cgggccgaggcccgggggcggggccagg

SEQ ID NO: 1326 - DNA, 28 bp, synthetic construct
  source 1..28: mol_type = other DNA
cgcgcctggccccgcccccgggcctcgg

SEQ ID NO: 1327 - DNA, 28 bp, synthetic construct
  source 1..28: mol_type = other DNA
aggcccgggggcggggccaggcgcgcgg

SEQ ID NO: 1328 - DNA, 28 bp, synthetic construct
  source 1..28: mol_type = other DNA
cagccgcgcgcctggccccgcccccggg

SEQ ID NO: 1329 - DNA, 28 bp, synthetic construct
  source 1..28: mol_type = other DNA
ccgggggcggggccaggcgcgcggctgg

SEQ ID NO: 1330 - DNA, 28 bp, synthetic construct
  source 1..28: mol_type = other DNA
ggcggggccaggcgcgcggctggcctgg

SEQ ID NO: 1331 - DNA, 28 bp, synthetic construct
  source 1..28: mol_type = other DNA
gcggggccaggcgcgcggctggcctggg

SEQ ID NO: 1332 - DNA, 28 bp, synthetic construct
  source 1..28: mol_type = other DNA
ccaggcgcgcggctggcctgggcctagg

SEQ ID NO: 1333 - DNA, 28 bp, synthetic construct
  source 1..28: mol_type = other DNA
ggctggcctgggcctaggccgctgctgg

SEQ ID NO: 1334 - DNA, 28 bp, synthetic construct
  source 1..28: mol_type = other DNA
gctggcctgggcctaggccgctgctggg

SEQ ID NO: 1335 - DNA, 28 bp, synthetic construct
  source 1..28: mol_type = other DNA
cggagcccagcagcggcctaggcccagg

SEQ ID NO: 1336 - DNA, 28 bp, synthetic construct
  source 1..28: mol_type = other DNA
gcgaggcggagcccagcagcggcctagg

SEQ ID NO: 1337 - DNA, 28 bp, synthetic construct
  source 1..28: mol_type = other DNA
ggccgctgctgggctccgcctcgcccgg

SEQ ID NO: 1338 - DNA, 28 bp, synthetic construct
  source 1..28: mol_type = other DNA
agccgggcgaggcggagcccagcagcgg

SEQ ID NO: 1339 - DNA, 28 bp, synthetic construct
  source 1..28: mol_type = other DNA
tgggctccgcctcgcccggctacgcagg

SEQ ID NO: 1340 - DNA, 28 bp, synthetic construct
  source 1..28: mol_type = other DNA
gctccgcctcgcccggctacgcaggcgg

SEQ ID NO: 1341 - DNA, 28 bp, synthetic construct
  source 1..28: mol_type = other DNA
ctgccgcctgcgtagccgggcgaggcgg

SEQ ID NO: 1342 - DNA, 28 bp, synthetic construct
  source 1..28: mol_type = other DNA
cgcctcgcccggctacgcaggcggcagg

SEQ ID NO: 1343 - DNA, 28 bp, synthetic construct
  source 1..28: mol_type = other DNA
gcctcgcccggctacgcaggcggcaggg

SEQ ID NO: 1344 - DNA, 28 bp, synthetic construct
  source 1..28: mol_type = other DNA
gccctgccgcctgcgtagccgggcgagg

SEQ ID NO: 1345 - DNA, 28 bp, synthetic construct
  source 1..28: mol_type = other DNA
cccggctacgcaggcggcagggctgcgg

SEQ ID NO: 1346 - DNA, 28 bp, synthetic construct
  source 1..28: mol_type = other DNA
gccgcagccctgccgcctgcgtagccgg

SEQ ID NO: 1347 - DNA, 28 bp, synthetic construct
  source 1..28: mol_type = other DNA
ctacgcaggcggcagggctgcggcacgg

SEQ ID NO: 1348 - DNA, 28 bp, synthetic construct
  source 1..28: mol_type = other DNA
tacgcaggcggcagggctgcggcacggg

SEQ ID NO: 1349 - DNA, 28 bp, synthetic construct
  source 1..28: mol_type = other DNA
caggcggcagggctgcggcacgggccgg

SEQ ID NO: 1350 - DNA, 28 bp, synthetic construct
  source 1..28: mol_type = other DNA
aggcggcagggctgcggcacgggccggg

SEQ ID NO: 1351 - DNA, 28 bp, synthetic construct
  source 1..28: mol_type = other DNA
cggcagggctgcggcacgggccgggcgg

SEQ ID NO: 1352 - DNA, 28 bp, synthetic construct
  source 1..28: mol_type = other DNA
ctgcggcacgggccgggcggcaccatgg

SEQ ID NO: 1353 - DNA, 28 bp, synthetic construct
  source 1..28: mol_type = other DNA
cggcacgggccgggcggcaccatggcgg

SEQ ID NO: 1354 - DNA, 28 bp, synthetic construct
  source 1..28: mol_type = other DNA
cacgggccgggcggcaccatggcggcgg

SEQ ID NO: 1355 - DNA, 28 bp, synthetic construct
  source 1..28: mol_type = other DNA
gggccgggcggcaccatggcggcggcgg

SEQ ID NO: 1356 - DNA, 28 bp, synthetic construct
  source 1..28: mol_type = other DNA
gcgccgccgccgccatggtgccgcccgg

SEQ ID NO: 1357 - DNA, 28 bp, synthetic construct
  source 1..28: mol_type = other DNA
gcagcagcaggcgccgccgccgccatgg

SEQ ID NO: 1358 - DNA, 28 bp, synthetic construct
  source 1..28: mol_type = other DNA
atggcggcggcggcgcctgctgctgcgg

SEQ ID NO: 1359 - DNA, 28 bp, synthetic construct
  source 1..28: mol_type = other DNA
gcggcggcggcgcctgctgctgcggcgg

SEQ ID NO: 1360 - DNA, 28 bp, synthetic construct
  source 1..28: mol_type = other DNA
cctgctgctgcggcggcttcttccgagg

SEQ ID NO: 1361 - DNA, 28 bp, synthetic construct
  source 1..28: mol_type = other DNA
gcggcggcttcttccgaggcgccagcgg

SEQ ID NO: 1362 - DNA, 28 bp, synthetic construct
  source 1..28: mol_type = other DNA
gcagtcgcactcgccgctggcgcctcgg

SEQ ID NO: 1363 - DNA, 28 bp, synthetic construct
  source 1..28: mol_type = other DNA
cgggctctgcagtcgcactcgccgctgg

SEQ ID NO: 1364 - DNA, 28 bp, synthetic construct
  source 1..28: mol_type = other DNA
gcggcgagtgcgactgcagagcccgagg

SEQ ID NO: 1365 - DNA, 28 bp, synthetic construct
  source 1..28: mol_type = other DNA
cgagtgcgactgcagagcccgaggccgg

SEQ ID NO: 1366 - DNA, 28 bp, synthetic construct
  source 1..28: mol_type = other DNA
gagtgcgactgcagagcccgaggccggg

SEQ ID NO: 1367 - DNA, 28 bp, synthetic construct
  source 1..28: mol_type = other DNA
agtgcgactgcagagcccgaggccgggg

SEQ ID NO: 1368 - DNA, 28 bp, synthetic construct
  source 1..28: mol_type = other DNA
actgcagagcccgaggccggggaccagg

SEQ ID NO: 1369 - DNA, 28 bp, synthetic construct
  source 1..28: mol_type = other DNA
cgcgactgtcctggtccccggcctcggg

SEQ ID NO: 1370 - DNA, 28 bp, synthetic construct
  source 1..28: mol_type = other DNA
tcgcgactgtcctggtccccggcctcgg

SEQ ID NO: 1371 - DNA, 28 bp, synthetic construct
  source 1..28: mol_type = other DNA
gaggccggggaccaggacagtcgcgagg

SEQ ID NO: 1372 - DNA, 28 bp, synthetic construct
  source 1..28: mol_type = other DNA
cgaacctcgcgactgtcctggtccccgg

SEQ ID NO: 1373 - DNA, 28 bp, synthetic construct
  source 1..28: mol_type = other DNA
caacactcgaacctcgcgactgtcctgg

SEQ ID NO: 1374 - DNA, 28 bp, synthetic construct
  source 1..28: mol_type = other DNA
cgaggttcgagtgttgcagagcctgcgg

SEQ ID NO: 1375 - DNA, 28 bp, synthetic construct
  source 1..28: mol_type = other DNA
gaggttcgagtgttgcagagcctgcggg

SEQ ID NO: 1376 - DNA, 28 bp, synthetic construct
  source 1..28: mol_type = other DNA
aggttcgagtgttgcagagcctgcgggg

SEQ ID NO: 1377 - DNA, 28 bp, synthetic construct
  source 1..28: mol_type = other DNA
gagcctgcggggcaagatctgtaagcgg

SEQ ID NO: 1378 - DNA, 28 bp, synthetic construct
  source 1..28: mol_type = other DNA
agcctgcggggcaagatctgtaagcggg

SEQ ID NO: 1379 - DNA, 28 bp, synthetic construct
  source 1..28: mol_type = other DNA
gcctgcggggcaagatctgtaagcgggg

SEQ ID NO: 1380 - DNA, 28 bp, synthetic construct
  source 1..28: mol_type = other DNA
cctgcggggcaagatctgtaagcggggg

SEQ ID NO: 1381 - DNA, 28 bp, synthetic construct
  source 1..28: mol_type = other DNA
cggggcaagatctgtaagcgggggctgg

SEQ ID NO: 1382 - DNA, 28 bp, synthetic construct
  source 1..28: mol_type = other DNA
ggggcaagatctgtaagcgggggctggg

SEQ ID NO: 1383 - DNA, 28 bp, synthetic construct
  source 1..28: mol_type = other DNA
agatctgtaagcgggggctgggctgagg

SEQ ID NO: 1384 - DNA, 28 bp, synthetic construct
  source 1..28: mol_type = other DNA
gatctgtaagcgggggctgggctgaggg

SEQ ID NO: 1385 - DNA, 28 bp, synthetic construct
  source 1..28: mol_type = other DNA
atctgtaagcgggggctgggctgagggg

SEQ ID NO: 1386 - DNA, 28 bp, synthetic construct
  source 1..28: mol_type = other DNA
aaacatttgaaatctgaaatacttctgg

SEQ ID NO: 1387 - DNA, 28 bp, synthetic construct
  source 1..28: mol_type = other DNA
cttctggtcctaagcatttcagataagg

SEQ ID NO: 1388 - DNA, 28 bp, synthetic construct
  source 1..28: mol_type = other DNA
ttctggtcctaagcatttcagataaggg

SEQ ID NO: 1389 - DNA, 28 bp, synthetic construct
  source 1..28: mol_type = other DNA
cgaatatcccttatctgaaatgcttagg

SEQ ID NO: 1390 - DNA, 28 bp, synthetic construct
  source 1..28: mol_type = other DNA
tggcattaactggcttgaatgactcagg

SEQ ID NO: 1391 - DNA, 28 bp, synthetic construct
  source 1..28: mol_type = other DNA
tcaagccagttaatgccaaattctgtgg

SEQ ID NO: 1392 - DNA, 28 bp, synthetic construct
  source 1..28: mol_type = other DNA
agaatccacagaatttggcattaactgg

SEQ ID NO: 1393 - DNA, 28 bp, synthetic construct
  source 1..28: mol_type = other DNA
ctatggagacagaatccacagaatttgg

SEQ ID NO: 1394 - DNA, 28 bp, synthetic construct
  source 1..28: mol_type = other DNA
gaaagaaaaaatagaagagctactatgg

SEQ ID NO: 1395 - DNA, 28 bp, synthetic construct
  source 1..28: mol_type = other DNA
cattaaggtaacaaagggagataggagg

SEQ ID NO: 1396 - DNA, 28 bp, synthetic construct
  source 1..28: mol_type = other DNA
ctacattaaggtaacaaagggagatagg

SEQ ID NO: 1397 - DNA, 28 bp, synthetic construct
  source 1..28: mol_type = other DNA
ctatctccctttgttaccttaatgtagg

SEQ ID NO: 1398 - DNA, 28 bp, synthetic construct
  source 1..28: mol_type = other DNA
gaagagcctacattaaggtaacaaaggg

SEQ ID NO: 1399 - DNA, 28 bp, synthetic construct
  source 1..28: mol_type = other DNA
tgaagagcctacattaaggtaacaaagg

SEQ ID NO: 1400 - DNA, 28 bp, synthetic construct
  source 1..28: mol_type = other DNA
ctgatagtctgaagagcctacattaagg

SEQ ID NO: 1401 - DNA, 28 bp, synthetic construct
  source 1..28: mol_type = other DNA
aaagtttctgtgtggttcatacttcagg

SEQ ID NO: 1402 - DNA, 28 bp, synthetic construct
  source 1..28: mol_type = other DNA
acaagggtcgctaaaagtttctgtgtgg

SEQ ID NO: 1403 - DNA, 28 bp, synthetic construct
  source 1..28: mol_type = other DNA
tttaactttattcagtaggcaacaaggg

SEQ ID NO: 1404 - DNA, 28 bp, synthetic construct
  source 1..28: mol_type = other DNA
gtttaactttattcagtaggcaacaagg

SEQ ID NO: 1405 - DNA, 28 bp, synthetic construct
  source 1..28: mol_type = other DNA
aagctaaggtttaactttattcagtagg

SEQ ID NO: 1406 - DNA, 28 bp, synthetic construct
  source 1..28: mol_type = other DNA
tactgaataaagttaaaccttagcttgg

SEQ ID NO: 1407 - DNA, 28 bp, synthetic construct
  source 1..28: mol_type = other DNA
aagttaaaccttagcttggcattttagg

SEQ ID NO: 1408 - DNA, 28 bp, synthetic construct
  source 1..28: mol_type = other DNA
acagagaacctaaaatgccaagctaagg

SEQ ID NO: 1409 - DNA, 28 bp, synthetic construct
  source 1..28: mol_type = other DNA
gggaatgagagggaaaagattataaagg

SEQ ID NO: 1410 - DNA, 28 bp, synthetic construct
  source 1..28: mol_type = other DNA
aaagagagatgaagggggaatgagaggg

SEQ ID NO: 1411 - DNA, 28 bp, synthetic construct
  source 1..28: mol_type = other DNA
taaagagagatgaagggggaatgagagg

SEQ ID NO: 1412 - DNA, 28 bp, synthetic construct
  source 1..28: mol_type = other DNA
actaaagcataaagagagatgaaggggg

SEQ ID NO: 1413 - DNA, 28 bp, synthetic construct
  source 1..28: mol_type = other DNA
gactaaagcataaagagagatgaagggg

SEQ ID NO: 1414 - DNA, 28 bp, synthetic construct
  source 1..28: mol_type = other DNA
tgactaaagcataaagagagatgaaggg

SEQ ID NO: 1415 - DNA, 28 bp, synthetic construct
  source 1..28: mol_type = other DNA
ctgactaaagcataaagagagatgaagg

SEQ ID NO: 1416 - DNA, 28 bp, synthetic construct
  source 1..28: mol_type = other DNA
tttatactattcactgcctcctcgatgg

SEQ ID NO: 1417 - DNA, 28 bp, synthetic construct
  source 1..28: mol_type = other DNA
ggcaacaagaagagcaccatcgaggagg

SEQ ID NO: 1418 - DNA, 28 bp, synthetic construct
  source 1..28: mol_type = other DNA
ggtggcaacaagaagagcaccatcgagg

SEQ ID NO: 1419 - DNA, 28 bp, synthetic construct
  source 1..28: mol_type = other DNA
cataacatgaacaagttctggagggtgg

SEQ ID NO: 1420 - DNA, 28 bp, synthetic construct
  source 1..28: mol_type = other DNA
aggcataacatgaacaagttctggaggg

SEQ ID NO: 1421 - DNA, 28 bp, synthetic construct
  source 1..28: mol_type = other DNA
aaggcataacatgaacaagttctggagg

SEQ ID NO: 1422 - DNA, 28 bp, synthetic construct
  source 1..28: mol_type = other DNA
aggaaggcataacatgaacaagttctgg

SEQ ID NO: 1423 - DNA, 28 bp, synthetic construct
  source 1..28: mol_type = other DNA
acttgttcatgttatgccttcctcctgg

SEQ ID NO: 1424 - DNA, 28 bp, synthetic construct
  source 1..28: mol_type = other DNA
atcggaggataacgttccaggaggaagg

SEQ ID NO: 1425 - DNA, 28 bp, synthetic construct
  source 1..28: mol_type = other DNA
ggggatcggaggataacgttccaggagg

SEQ ID NO: 1426 - DNA, 28 bp, synthetic construct
  source 1..28: mol_type = other DNA
attggggatcggaggataacgttccagg

SEQ ID NO: 1427 - DNA, 28 bp, synthetic construct
  source 1..28: mol_type = other DNA
tcaaaatacagaaattggggatcggagg

SEQ ID NO: 1428 - DNA, 28 bp, synthetic construct
  source 1..28: mol_type = other DNA
ttttcaaaatacagaaattggggatcgg

SEQ ID NO: 1429 - DNA, 28 bp, synthetic construct
  source 1..28: mol_type = other DNA
atatattttcaaaatacagaaattgggg

SEQ ID NO: 1430 - DNA, 28 bp, synthetic construct
  source 1..28: mol_type = other DNA
tatatattttcaaaatacagaaattggg

SEQ ID NO: 1431 - DNA, 28 bp, synthetic construct
  source 1..28: mol_type = other DNA
atatatattttcaaaatacagaaattgg

SEQ ID NO: 1432 - DNA, 28 bp, synthetic construct
  source 1..28: mol_type = other DNA
tacatgtattaatttattcagtaagtgg

SEQ ID NO: 1433 - DNA, 28 bp, synthetic construct
  source 1..28: mol_type = other DNA
gtaagtggtagctattattatgatttgg

SEQ ID NO: 1434 - DNA, 28 bp, synthetic construct
  source 1..28: mol_type = other DNA
tgtcaccccaaataatccttaactttgg

SEQ ID NO: 1435 - DNA, 28 bp, synthetic construct
  source 1..28: mol_type = other DNA
atgatccaaagttaaggattatttgggg

SEQ ID NO: 1436 - DNA, 28 bp, synthetic construct
  source 1..28: mol_type = other DNA
gatgatccaaagttaaggattatttggg

SEQ ID NO: 1437 - DNA, 28 bp, synthetic construct
  source 1..28: mol_type = other DNA
agatgatccaaagttaaggattatttgg

SEQ ID NO: 1438 - DNA, 28 bp, synthetic construct
  source 1..28: mol_type = other DNA
tccttaactttggatcatcttgtccagg

SEQ ID NO: 1439 - DNA, 28 bp, synthetic construct
  source 1..28: mol_type = other DNA
tcctggacaagatgatccaaagttaagg

SEQ ID NO: 1440 - DNA, 28 bp, synthetic construct
  source 1..28: mol_type = other DNA
ctttggatcatcttgtccaggaccctgg

SEQ ID NO: 1441 - DNA, 28 bp, synthetic construct
  source 1..28: mol_type = other DNA
gaaaaactgcaaagagccagggtcctgg

SEQ ID NO: 1442 - DNA, 28 bp, synthetic construct
  source 1..28: mol_type = other DNA
gaccctggctctttgcagtttttctagg

SEQ ID NO: 1443 - DNA, 28 bp, synthetic construct
  source 1..28: mol_type = other DNA
accctggctctttgcagtttttctaggg

SEQ ID NO: 1444 - DNA, 28 bp, synthetic construct
  source 1..28: mol_type = other DNA
ccctggctctttgcagtttttctagggg

SEQ ID NO: 1445 - DNA, 28 bp, synthetic construct
  source 1..28: mol_type = other DNA
tcccctagaaaaactgcaaagagccagg

SEQ ID NO: 1446 - DNA, 28 bp, synthetic construct
  source 1..28: mol_type = other DNA
agtttttctaggggattaatcccactgg

SEQ ID NO: 1447 - DNA, 28 bp, synthetic construct
  source 1..28: mol_type = other DNA
gtttttctaggggattaatcccactggg

SEQ ID NO: 1448 - DNA, 28 bp, synthetic construct
  source 1..28: mol_type = other DNA
ggattaatcccactgggacccatgttgg

SEQ ID NO: 1449 - DNA, 28 bp, synthetic construct
  source 1..28: mol_type = other DNA
ggtaggcgccaacatgggtcccagtggg

SEQ ID NO: 1450 - DNA, 28 bp, synthetic construct
  source 1..28: mol_type = other DNA
gggtaggcgccaacatgggtcccagtgg

SEQ ID NO: 1451 - DNA, 28 bp, synthetic construct
  source 1..28: mol_type = other DNA
gaagtacaagggtaggcgccaacatggg

SEQ ID NO: 1452 - DNA, 28 bp, synthetic construct
  source 1..28: mol_type = other DNA
tgaagtacaagggtaggcgccaacatgg

SEQ ID NO: 1453 - DNA, 28 bp, synthetic construct
  source 1..28: mol_type = other DNA
atgttggcgcctacccttgtacttcagg

SEQ ID NO: 1454 - DNA, 28 bp, synthetic construct
  source 1..28: mol_type = other DNA
caaaggttacctgaagtacaagggtagg

SEQ ID NO: 1455 - DNA, 28 bp, synthetic construct
  source 1..28: mol_type = other DNA
gcttcaaaggttacctgaagtacaaggg

SEQ ID NO: 1456 - DNA, 28 bp, synthetic construct
  source 1..28: mol_type = other DNA
tgcttcaaaggttacctgaagtacaagg

SEQ ID NO: 1457 - DNA, 28 bp, synthetic construct
  source 1..28: mol_type = other DNA
cttcaggtaacctttgaagcagacctgg

SEQ ID NO: 1458 - DNA, 28 bp, synthetic construct
  source 1..28: mol_type = other DNA
tgtagtaggtccaggtctgcttcaaagg

SEQ ID NO: 1459 - DNA, 28 bp, synthetic construct
  source 1..28: mol_type = other DNA
catctgaaagagatgtagtaggtccagg

SEQ ID NO: 1460 - DNA, 28 bp, synthetic construct
  source 1..28: mol_type = other DNA
ctggacctactacatctctttcagatgg

SEQ ID NO: 1461 - DNA, 28 bp, synthetic construct
  source 1..28: mol_type = other DNA
tggacctactacatctctttcagatggg

SEQ ID NO: 1462 - DNA, 28 bp, synthetic construct
  source 1..28: mol_type = other DNA
tattcccatctgaaagagatgtagtagg

SEQ ID NO: 1463 - DNA, 28 bp, synthetic construct
  source 1..28: mol_type = other DNA
ctagagtctttctattcaactcttaagg

SEQ ID NO: 1464 - DNA, 28 bp, synthetic construct
  source 1..28: mol_type = other DNA
cttaagagttgaatagaaagactctagg

SEQ ID NO: 1465 - DNA, 28 bp, synthetic construct
  source 1..28: mol_type = other DNA
agttgaatagaaagactctaggctttgg

SEQ ID NO: 1466 - DNA, 28 bp, synthetic construct
  source 1..28: mol_type = other DNA
cagttacatagctggtaaggttatctgg

SEQ ID NO: 1467 - DNA, 28 bp, synthetic construct
  source 1..28: mol_type = other DNA
aaaaaattcagttacatagctggtaagg

SEQ ID NO: 1468 - DNA, 28 bp, synthetic construct
  source 1..28: mol_type = other DNA
agaaaaaaaaattcagttacatagctgg

SEQ ID NO: 1469 - DNA, 28 bp, synthetic construct
  source 1..28: mol_type = other DNA
gaatttttttttcttaatttatgaaagg

SEQ ID NO: 1470 - DNA, 28 bp, synthetic construct
  source 1..28: mol_type = other DNA
aatttttttttcttaatttatgaaaggg

SEQ ID NO: 1471 - DNA, 28 bp, synthetic construct
  source 1..28: mol_type = other DNA
aagggaatagtaatgcttatctcacagg

SEQ ID NO: 1472 - DNA, 28 bp, synthetic construct
  source 1..28: mol_type = other DNA
agggaatagtaatgcttatctcacaggg

SEQ ID NO: 1473 - DNA, 28 bp, synthetic construct
  source 1..28: mol_type = other DNA
tattttctcaaatgtttcatttgatcgg

SEQ ID NO: 1474 - DNA, 28 bp, synthetic construct
  source 1..28: mol_type = other DNA
tttgagaaaatatttaacactgtcttgg

SEQ ID NO: 1475 - DNA, 28 bp, synthetic construct
  source 1..28: mol_type = other DNA
tcttatccctgtagtgtcctcccctagg

SEQ ID NO: 1476 - DNA, 28 bp, synthetic construct
  source 1..28: mol_type = other DNA
tcatgtcctaggggaggacactacaggg

SEQ ID NO: 1477 - DNA, 28 bp, synthetic construct
  source 1..28: mol_type = other DNA
ttcatgtcctaggggaggacactacagg

SEQ ID NO: 1478 - DNA, 28 bp, synthetic construct
  source 1..28: mol_type = other DNA
tgtatgtttcttcatgtcctaggggagg

SEQ ID NO: 1479 - DNA, 28 bp, synthetic construct
  source 1..28: mol_type = other DNA
gcatgtatgtttcttcatgtcctagggg

SEQ ID NO: 1480 - DNA, 28 bp, synthetic construct
  source 1..28: mol_type = other DNA
tgcatgtatgtttcttcatgtcctaggg

SEQ ID NO: 1481 - DNA, 28 bp, synthetic construct
  source 1..28: mol_type = other DNA
ttgcatgtatgtttcttcatgtcctagg

SEQ ID NO: 1482 - DNA, 28 bp, synthetic construct
  source 1..28: mol_type = other DNA
tgaagaaacatacatgcaaaccttcagg

SEQ ID NO: 1483 - DNA, 28 bp, synthetic construct
  source 1..28: mol_type = other DNA
attatgtgcatgcatttatacctgaagg

SEQ ID NO: 1484 - DNA, 28 bp, synthetic construct
  source 1..28: mol_type = other DNA
gcacataatcctcaaacatccacatagg

SEQ ID NO: 1485 - DNA, 28 bp, synthetic construct
  source 1..28: mol_type = other DNA
tcctcaaacatccacataggcacatagg

SEQ ID NO: 1486 - DNA, 28 bp, synthetic construct
  source 1..28: mol_type = other DNA
acctatgtgcctatgtggatgtttgagg

SEQ ID NO: 1487 - DNA, 28 bp, synthetic construct
  source 1..28: mol_type = other DNA
gtgagtatgtacctatgtgcctatgtgg

SEQ ID NO: 1488 - DNA, 28 bp, synthetic construct
  source 1..28: mol_type = other DNA
tctacctttgatagtagcctgatattgg

SEQ ID NO: 1489 - DNA, 28 bp, synthetic construct
  source 1..28: mol_type = other DNA
aattccaatatcaggctactatcaaagg

SEQ ID NO: 1490 - DNA, 28 bp, synthetic construct
  source 1..28: mol_type = other DNA
tatctaggacaaaaattccaatatcagg

SEQ ID NO: 1491 - DNA, 28 bp, synthetic construct
  source 1..28: mol_type = other DNA
atttttgtcctagataaaatttatatgg

SEQ ID NO: 1492 - DNA, 28 bp, synthetic construct
  source 1..28: mol_type = other DNA
ttgtcctagataaaatttatatggtagg

SEQ ID NO: 1493 - DNA, 28 bp, synthetic construct
  source 1..28: mol_type = other DNA
aaatcctaccatataaattttatctagg

SEQ ID NO: 1494 - DNA, 28 bp, synthetic construct
  source 1..28: mol_type = other DNA
aatttactgtctgatgactgttacatgg

SEQ ID NO: 1495 - DNA, 28 bp, synthetic construct
  source 1..28: mol_type = other DNA
atcattgatcttgtacatagagagttgg

SEQ ID NO: 1496 - DNA, 28 bp, synthetic construct
  source 1..28: mol_type = other DNA
tcaaaactgttaagattaacagaaatgg

SEQ ID NO: 1497 - DNA, 28 bp, synthetic construct
  source 1..28: mol_type = other DNA
gttaatcttaacagttttgatttgatgg

SEQ ID NO: 1498 - DNA, 28 bp, synthetic construct
  source 1..28: mol_type = other DNA
agttacatgtctctcctcttttttcagg

SEQ ID NO: 1499 - DNA, 28 bp, synthetic construct
  source 1..28: mol_type = other DNA
cttctgcataaatacctgaaaaaagagg

SEQ ID NO: 1500 - DNA, 28 bp, synthetic construct
  source 1..28: mol_type = other DNA
cacaagaaatgaggtagctcaaggaagg

SEQ ID NO: 1501 - DNA, 28 bp, synthetic construct
  source 1..28: mol_type = other DNA
cttccttgagctacctcatttcttgtgg

SEQ ID NO: 1502 - DNA, 28 bp, synthetic construct
  source 1..28: mol_type = other DNA
gcaccacaagaaatgaggtagctcaagg

SEQ ID NO: 1503 - DNA, 28 bp, synthetic construct
  source 1..28: mol_type = other DNA
ataagtatgggcaccacaagaaatgagg

SEQ ID NO: 1504 - DNA, 28 bp, synthetic construct
  source 1..28: mol_type = other DNA
tgtggtgcccatacttattagtattagg

SEQ ID NO: 1505 - DNA, 28 bp, synthetic construct
  source 1..28: mol_type = other DNA
tgtatggcctaatactaataagtatggg

SEQ ID NO: 1506 - DNA, 28 bp, synthetic construct
  source 1..28: mol_type = other DNA
atgtatggcctaatactaataagtatgg

SEQ ID NO: 1507 - DNA, 28 bp, synthetic construct
  source 1..28: mol_type = other DNA
aataagataaataagtaaaaatgtatgg

SEQ ID NO: 1508 - DNA, 28 bp, synthetic construct
  source 1..28: mol_type = other DNA
tctctccatgtgtgttagcctaataagg

SEQ ID NO: 1509 - DNA, 28 bp, synthetic construct
  source 1..28: mol_type = other DNA
tgtgtccttattaggctaacacacatgg

SEQ ID NO: 1510 - DNA, 28 bp, synthetic construct
  source 1..28: mol_type = other DNA
cagacaaaaagtctgtgtccttattagg

SEQ ID NO: 1511 - DNA, 28 bp, synthetic construct
  source 1..28: mol_type = other DNA
cactgtcatatcctagcagcttagtagg

SEQ ID NO: 1512 - DNA, 28 bp, synthetic construct
  source 1..28: mol_type = other DNA
tttactgagtacctactaagctgctagg

SEQ ID NO: 1513 - DNA, 28 bp, synthetic construct
  source 1..28: mol_type = other DNA
tatttgaatgtgtgaacttcagcactgg

SEQ ID NO: 1514 - DNA, 28 bp, synthetic construct
  source 1..28: mol_type = other DNA
acaataaagattctttaagtgcttttgg

SEQ ID NO: 1515 - DNA, 28 bp, synthetic construct
  source 1..28: mol_type = other DNA
ttaagtgcttttggtaactgtatacagg

SEQ ID NO: 1516 - DNA, 28 bp, synthetic construct
  source 1..28: mol_type = other DNA
tacaggagactttttaaaaaatctttgg

SEQ ID NO: 1517 - DNA, 28 bp, synthetic construct
  source 1..28: mol_type = other DNA
ttgacataaatcaacttaaatgaaatgg

SEQ ID NO: 1518 - DNA, 28 bp, synthetic construct
  source 1..28: mol_type = other DNA
aaaaagaagtttacatacaattttatgg

SEQ ID NO: 1519 - DNA, 28 bp, synthetic construct
  source 1..28: mol_type = other DNA
acatacaattttatggtttgtgatgtgg

SEQ ID NO: 1520 - DNA, 28 bp, synthetic construct
  source 1..28: mol_type = other DNA
aattttatggtttgtgatgtggtattgg

SEQ ID NO: 1521 - DNA, 28 bp, synthetic construct
  source 1..28: mol_type = other DNA
tataactttggcatgggcaaaaaagagg

SEQ ID NO: 1522 - DNA, 28 bp, synthetic construct
  source 1..28: mol_type = other DNA
atgcgtgtgtatataactttggcatggg

SEQ ID NO: 1523 - DNA, 28 bp, synthetic construct
  source 1..28: mol_type = other DNA
aatgcgtgtgtatataactttggcatgg

SEQ ID NO: 1524 - DNA, 28 bp, synthetic construct
  source 1..28: mol_type = other DNA
gtatcaatgcgtgtgtatataactttgg

SEQ ID NO: 1525 - DNA, 28 bp, synthetic construct
  source 1..28: mol_type = other DNA
ctgtttcattatatattttatgctaagg

SEQ ID NO: 1526 - DNA, 28 bp, synthetic construct
  source 1..28: mol_type = other DNA
ttcattatatattttatgctaaggatgg

SEQ ID NO: 1527 - DNA, 28 bp, synthetic construct
  source 1..28: mol_type = other DNA
ttatgctaaggatggtgctaagaattgg

SEQ ID NO: 1528 - DNA, 28 bp, synthetic construct
  source 1..28: mol_type = other DNA
ctgaactataaacttcttgaggaagggg

SEQ ID NO: 1529 - DNA, 28 bp, synthetic construct
  source 1..28: mol_type = other DNA
actgaactataaacttcttgaggaaggg

SEQ ID NO: 1530 - DNA, 28 bp, synthetic construct
  source 1..28: mol_type = other DNA
cactgaactataaacttcttgaggaagg

SEQ ID NO: 1531 - DNA, 28 bp, synthetic construct
  source 1..28: mol_type = other DNA
tcttcactgaactataaacttcttgagg

SEQ ID NO: 1532 - DNA, 28 bp, synthetic construct
  source 1..28: mol_type = other DNA
aagagacaaccaaactgcttttgcttgg

SEQ ID NO: 1533 - DNA, 28 bp, synthetic construct
  source 1..28: mol_type = other DNA
gagacacaaccaagcaaaagcagtttgg

SEQ ID NO: 1534 - DNA, 28 bp, synthetic construct
  source 1..28: mol_type = other DNA
ctcagggctctctaatgttttgaggtgg

SEQ ID NO: 1535 - DNA, 28 bp, synthetic construct
  source 1..28: mol_type = other DNA
cacctcaaaacattagagagccctgagg

SEQ ID NO: 1536 - DNA, 28 bp, synthetic construct
  source 1..28: mol_type = other DNA
agcctcagggctctctaatgttttgagg

SEQ ID NO: 1537 - DNA, 28 bp, synthetic construct
  source 1..28: mol_type = other DNA
aaagaaatttgaagactgagcctcaggg

SEQ ID NO: 1538 - DNA, 28 bp, synthetic construct
  source 1..28: mol_type = other DNA
aaaagaaatttgaagactgagcctcagg

SEQ ID NO: 1539 - DNA, 28 bp, synthetic construct
  source 1..28: mol_type = other DNA
cccattgtgattttgtattgtctcttgg

SEQ ID NO: 1540 - DNA, 28 bp, synthetic construct
  source 1..28: mol_type = other DNA
accaagagacaatacaaaatcacaatgg

SEQ ID NO: 1541 - DNA, 28 bp, synthetic construct
  source 1..28: mol_type = other DNA
tgattctcaaattttttctctatctagg

SEQ ID NO: 1542 - DNA, 28 bp, synthetic construct
  source 1..28: mol_type = other DNA
ttctctatctaggaccctttgtccttgg

SEQ ID NO: 1543 - DNA, 28 bp, synthetic construct
  source 1..28: mol_type = other DNA
tgcagacaatctgtccaaggacaaaggg

SEQ ID NO: 1544 - DNA, 28 bp, synthetic construct
  source 1..28: mol_type = other DNA
gtgcagacaatctgtccaaggacaaagg

SEQ ID NO: 1545 - DNA, 28 bp, synthetic construct
  source 1..28: mol_type = other DNA
tgtccttggacagattgtctgcacttgg

SEQ ID NO: 1546 - DNA, 28 bp, synthetic construct
  source 1..28: mol_type = other DNA
catccaagtgcagacaatctgtccaagg

SEQ ID NO: 1547 - DNA, 28 bp, synthetic construct
  source 1..28: mol_type = other DNA
cagattgtctgcacttggatgtataagg

SEQ ID NO: 1548 - DNA, 28 bp, synthetic construct
  source 1..28: mol_type = other DNA
aatattcaatacagtctcttgaatttgg

SEQ ID NO: 1549 - DNA, 28 bp, synthetic construct
  source 1..28: mol_type = other DNA
tctcttgaatttggtccccaacaagagg

SEQ ID NO: 1550 - DNA, 28 bp, synthetic construct
  source 1..28: mol_type = other DNA
tttctagagacacagcctcttgttgggg

SEQ ID NO: 1551 - DNA, 28 bp, synthetic construct
  source 1..28: mol_type = other DNA
atttctagagacacagcctcttgttggg

SEQ ID NO: 1552 - DNA, 28 bp, synthetic construct
  source 1..28: mol_type = other DNA
tatttctagagacacagcctcttgttgg

SEQ ID NO: 1553 - DNA, 28 bp, synthetic construct
  source 1..28: mol_type = other DNA
ttctaagagtcttagtctgagcagctgg

SEQ ID NO: 1554 - DNA, 28 bp, synthetic construct
  source 1..28: mol_type = other DNA
tctcacaccctgcagtaaatcctgttgg

SEQ ID NO: 1555 - DNA, 28 bp, synthetic construct
  source 1..28: mol_type = other DNA
gatggagccaacaggatttactgcaggg

SEQ ID NO: 1556 - DNA, 28 bp, synthetic construct
  source 1..28: mol_type = other DNA
agatggagccaacaggatttactgcagg

SEQ ID NO: 1557 - DNA, 28 bp, synthetic construct
  source 1..28: mol_type = other DNA
catgtattttgaagatggagccaacagg

SEQ ID NO: 1558 - DNA, 28 bp, synthetic construct
  source 1..28: mol_type = other DNA
gtcatttgggcatgtattttgaagatgg

SEQ ID NO: 1559 - DNA, 28 bp, synthetic construct
  source 1..28: mol_type = other DNA
cgggtctggagagaatgggtcatttggg

SEQ ID NO: 1560 - DNA, 28 bp, synthetic construct
  source 1..28: mol_type = other DNA
acgggtctggagagaatgggtcatttgg

SEQ ID NO: 1561 - DNA, 28 bp, synthetic construct
  source 1..28: mol_type = other DNA
gagcagacacgggtctggagagaatggg

SEQ ID NO: 1562 - DNA, 28 bp, synthetic construct
  source 1..28: mol_type = other DNA
agagcagacacgggtctggagagaatgg

SEQ ID NO: 1563 - DNA, 28 bp, synthetic construct
  source 1..28: mol_type = other DNA
gggaggggcagagcagacacgggtctgg

SEQ ID NO: 1564 - DNA, 28 bp, synthetic construct
  source 1..28: mol_type = other DNA
gtcaggggaggggcagagcagacacggg

SEQ ID NO: 1565 - DNA, 28 bp, synthetic construct
  source 1..28: mol_type = other DNA
ggtcaggggaggggcagagcagacacgg

SEQ ID NO: 1566 - DNA, 28 bp, synthetic construct
  source 1..28: mol_type = other DNA
agcgaaaacttgcaggtcaggggagggg

SEQ ID NO: 1567 - DNA, 28 bp, synthetic construct
  source 1..28: mol_type = other DNA
gagcgaaaacttgcaggtcaggggaggg

SEQ ID NO: 1568 - DNA, 28 bp, synthetic construct
  source 1..28: mol_type = other DNA
tgagcgaaaacttgcaggtcaggggagg

SEQ ID NO: 1569 - DNA, 28 bp, synthetic construct
  source 1..28: mol_type = other DNA
caatgagcgaaaacttgcaggtcagggg

SEQ ID NO: 1570 - DNA, 28 bp, synthetic construct
  source 1..28: mol_type = other DNA
tcaatgagcgaaaacttgcaggtcaggg

SEQ ID NO: 1571 - DNA, 28 bp, synthetic construct
  source 1..28: mol_type = other DNA
ctcaatgagcgaaaacttgcaggtcagg

SEQ ID NO: 1572 - DNA, 28 bp, synthetic construct
  source 1..28: mol_type = other DNA
gtaatctcaatgagcgaaaacttgcagg

SEQ ID NO: 1573 - DNA, 28 bp, synthetic construct
  source 1..28: mol_type = other DNA
aggtagaagcaggtgactagataggagg

SEQ ID NO: 1574 - DNA, 28 bp, synthetic construct
  source 1..28: mol_type = other DNA
gaaaggtagaagcaggtgactagatagg

SEQ ID NO: 1575 - DNA, 28 bp, synthetic construct
  source 1..28: mol_type = other DNA
cagtgcagaggggaaaggtagaagcagg

SEQ ID NO: 1576 - DNA, 28 bp, synthetic construct
  source 1..28: mol_type = other DNA
gttttaaaatcagtgcagaggggaaagg

SEQ ID NO: 1577 - DNA, 28 bp, synthetic construct
  source 1..28: mol_type = other DNA
tttttgttttaaaatcagtgcagagggg

SEQ ID NO: 1578 - DNA, 28 bp, synthetic construct
  source 1..28: mol_type = other DNA
ttttttgttttaaaatcagtgcagaggg

SEQ ID NO: 1579 - DNA, 28 bp, synthetic construct
  source 1..28: mol_type = other DNA
attttttgttttaaaatcagtgcagagg

SEQ ID NO: 1580 - DNA, 28 bp, synthetic construct
  source 1..28: mol_type = other DNA
ttttgaaggattttcagcataaaaatgg

SEQ ID NO: 1581 - DNA, 28 bp, synthetic construct
  source 1..28: mol_type = other DNA
tgtgtgtcagatggtaaggttttgaagg

SEQ ID NO: 1582 - DNA, 28 bp, synthetic construct
  source 1..28: mol_type = other DNA
ggctttttttgtgtgtcagatggtaagg

SEQ ID NO: 1583 - DNA, 28 bp, synthetic construct
  source 1..28: mol_type = other DNA
tcttaggctttttttgtgtgtcagatgg

SEQ ID NO: 1584 - DNA, 28 bp, synthetic construct
  source 1..28: mol_type = other DNA
ggtcttacaggcacgggaaagtcttagg

SEQ ID NO: 1585 - DNA, 28 bp, synthetic construct
  source 1..28: mol_type = other DNA
aggttaaataaggtcttacaggcacggg

SEQ ID NO: 1586 - DNA, 28 bp, synthetic construct
  source 1..28: mol_type = other DNA
caggttaaataaggtcttacaggcacgg

SEQ ID NO: 1587 - DNA, 28 bp, synthetic construct
  source 1..28: mol_type = other DNA
ggagacaggttaaataaggtcttacagg

SEQ ID NO: 1588 - DNA, 28 bp, synthetic construct
  source 1..28: mol_type = other DNA
ggtatgggaggagacaggttaaataagg

SEQ ID NO: 1589 - DNA, 28 bp, synthetic construct
  source 1..28: mol_type = other DNA
atggagtaagggtatgggaggagacagg

SEQ ID NO: 1590 - DNA, 28 bp, synthetic construct
  source 1..28: mol_type = other DNA
gtaagagatggagtaagggtatgggagg

SEQ ID NO: 1591 - DNA, 28 bp, synthetic construct
  source 1..28: mol_type = other DNA
atagtaagagatggagtaagggtatggg

SEQ ID NO: 1592 - DNA, 28 bp, synthetic construct
  source 1..28: mol_type = other DNA
gatagtaagagatggagtaagggtatgg

SEQ ID NO: 1593 - DNA, 28 bp, synthetic construct
  source 1..28: mol_type = other DNA
gaggagatagtaagagatggagtaaggg

SEQ ID NO: 1594 - DNA, 28 bp, synthetic construct
  source 1..28: mol_type = other DNA
ggaggagatagtaagagatggagtaagg

SEQ ID NO: 1595 - DNA, 28 bp, synthetic construct
  source 1..28: mol_type = other DNA
gggagagggaggagatagtaagagatgg

SEQ ID NO: 1596 - DNA, 28 bp, synthetic construct
  source 1..28: mol_type = other DNA
agcaataagcaaagtggggagagggagg

SEQ ID NO: 1597 - DNA, 28 bp, synthetic construct
  source 1..28: mol_type = other DNA
caaagcaataagcaaagtggggagaggg

SEQ ID NO: 1598 - DNA, 28 bp, synthetic construct
  source 1..28: mol_type = other DNA
acaaagcaataagcaaagtggggagagg

SEQ ID NO: 1599 - DNA, 28 bp, synthetic construct
  source 1..28: mol_type = other DNA
tggctacaaagcaataagcaaagtgggg

SEQ ID NO: 1600 - DNA, 28 bp, synthetic construct
  source 1..28: mol_type = other DNA
atggctacaaagcaataagcaaagtggg

SEQ ID NO: 1601 - DNA, 28 bp, synthetic construct
  source 1..28: mol_type = other DNA
tatggctacaaagcaataagcaaagtgg

SEQ ID NO: 1602 - DNA, 28 bp, synthetic construct
  source 1..28: mol_type = other DNA
tggaggagtggcaaggagggcagtatgg

SEQ ID NO: 1603 - DNA, 28 bp, synthetic construct
  source 1..28: mol_type = other DNA
tggcacactggaggagtggcaaggaggg

SEQ ID NO: 1604 - DNA, 28 bp, synthetic construct
  source 1..28: mol_type = other DNA
ttggcacactggaggagtggcaaggagg

SEQ ID NO: 1605 - DNA, 28 bp, synthetic construct
  source 1..28: mol_type = other DNA
agtttggcacactggaggagtggcaagg

SEQ ID NO: 1606 - DNA, 28 bp, synthetic construct
  source 1..28: mol_type = other DNA
aggatagtttggcacactggaggagtgg

SEQ ID NO: 1607 - DNA, 28 bp, synthetic construct
  source 1..28: mol_type = other DNA
gagacaggatagtttggcacactggagg

SEQ ID NO: 1608 - DNA, 28 bp, synthetic construct
  source 1..28: mol_type = other DNA
ccagtgtgccaaactatcctgtctcagg

SEQ ID NO: 1609 - DNA, 28 bp, synthetic construct
  source 1..28: mol_type = other DNA
cagtgtgccaaactatcctgtctcaggg

SEQ ID NO: 1610 - DNA, 28 bp, synthetic construct
  source 1..28: mol_type = other DNA
gcaaaggccctgagacaggatagtttgg

SEQ ID NO: 1611 - DNA, 28 bp, synthetic construct
  source 1..28: mol_type = other DNA
ataaaatgtgcaaaggccctgagacagg

SEQ ID NO: 1612 - DNA, 28 bp, synthetic construct
  source 1..28: mol_type = other DNA
caggcagaaagaataaaatgtgcaaagg

SEQ ID NO: 1613 - DNA, 28 bp, synthetic construct
  source 1..28: mol_type = other DNA
cagatatctggggaaggagacggacagg

SEQ ID NO: 1614 - DNA, 28 bp, synthetic construct
  source 1..28: mol_type = other DNA
ccgtctccttccccagatatctgtatgg

SEQ ID NO: 1615 - DNA, 28 bp, synthetic construct
  source 1..28: mol_type = other DNA
tataagccatacagatatctggggaagg

SEQ ID NO: 1616 - DNA, 28 bp, synthetic construct
  source 1..28: mol_type = other DNA
agggtataagccatacagatatctgggg

SEQ ID NO: 1617 - DNA, 28 bp, synthetic construct
  source 1..28: mol_type = other DNA
gagggtataagccatacagatatctggg

SEQ ID NO: 1618 - DNA, 28 bp, synthetic construct
  source 1..28: mol_type = other DNA
tgagggtataagccatacagatatctgg

SEQ ID NO: 1619 - DNA, 28 bp, synthetic construct
  source 1..28: mol_type = other DNA
gcttataccctcaatgacttccttcagg

SEQ ID NO: 1620 - DNA, 28 bp, synthetic construct
  source 1..28: mol_type = other DNA
gcagatacctgaaggaagtcattgaggg

SEQ ID NO: 1621 - DNA, 28 bp, synthetic construct
  source 1..28: mol_type = other DNA
agcagatacctgaaggaagtcattgagg

SEQ ID NO: 1622 - DNA, 28 bp, synthetic construct
  source 1..28: mol_type = other DNA
ttaaaatatttaagcagatacctgaagg

SEQ ID NO: 1623 - DNA, 28 bp, synthetic construct
  source 1..28: mol_type = other DNA
tatctgcttaaatattttaattgaaagg

SEQ ID NO: 1624 - DNA, 28 bp, synthetic construct
  source 1..28: mol_type = other DNA
gttattttatatagggaagcagggaagg

SEQ ID NO: 1625 - DNA, 28 bp, synthetic construct
  source 1..28: mol_type = other DNA
caatgttattttatatagggaagcaggg

SEQ ID NO: 1626 - DNA, 28 bp, synthetic construct
  source 1..28: mol_type = other DNA
tcaatgttattttatatagggaagcagg

SEQ ID NO: 1627 - DNA, 28 bp, synthetic construct
  source 1..28: mol_type = other DNA
gaggaggtcaatgttattttatataggg

SEQ ID NO: 1628 - DNA, 28 bp, synthetic construct
  source 1..28: mol_type = other DNA
ggaggaggtcaatgttattttatatagg

SEQ ID NO: 1629 - DNA, 28 bp, synthetic construct
  source 1..28: mol_type = other DNA
tgacctcctccctgtctctaccctctgg

SEQ ID NO: 1630 - DNA, 28 bp, synthetic construct
  source 1..28: mol_type = other DNA
gacctcctccctgtctctaccctctggg

SEQ ID NO: 1631 - DNA, 28 bp, synthetic construct
  source 1..28: mol_type = other DNA
ggcccagagggtagagacagggaggagg

SEQ ID NO: 1632 - DNA, 28 bp, synthetic construct
  source 1..28: mol_type = other DNA
gcaggcccagagggtagagacagggagg

SEQ ID NO: 1633 - DNA, 28 bp, synthetic construct
  source 1..28: mol_type = other DNA
atggcaggcccagagggtagagacaggg

SEQ ID NO: 1634 - DNA, 28 bp, synthetic construct
  source 1..28: mol_type = other DNA
aatggcaggcccagagggtagagacagg

SEQ ID NO: 1635 - DNA, 28 bp, synthetic construct
  source 1..28: mol_type = other DNA
agagttagggaatggcaggcccagaggg

SEQ ID NO: 1636 - DNA, 28 bp, synthetic construct
  source 1..28: mol_type = other DNA
gagagttagggaatggcaggcccagagg

SEQ ID NO: 1637 - DNA, 28 bp, synthetic construct
  source 1..28: mol_type = other DNA
caggttaagagagttagggaatggcagg

SEQ ID NO: 1638 - DNA, 28 bp, synthetic construct
  source 1..28: mol_type = other DNA
aaagcaggttaagagagttagggaatgg

SEQ ID NO: 1639 - DNA, 28 bp, synthetic construct
  source 1..28: mol_type = other DNA
aaaacaaagcaggttaagagagttaggg

SEQ ID NO: 1640 - DNA, 28 bp, synthetic construct
  source 1..28: mol_type = other DNA
gaaaacaaagcaggttaagagagttagg

SEQ ID NO: 1641 - DNA, 28 bp, synthetic construct
  source 1..28: mol_type = other DNA
ttattgctattcaagaaaacaaagcagg

SEQ ID NO: 1642 - DNA, 28 bp, synthetic construct
  source 1..28: mol_type = other DNA
aataagcatatagtatttattgtcatgg

SEQ ID NO: 1643 - DNA, 28 bp, synthetic construct
  source 1..28: mol_type = other DNA
tactatatgcttatttaagagtttgtgg

SEQ ID NO: 1644 - DNA, 28 bp, synthetic construct
  source 1..28: mol_type = other DNA
acgaaactgttgtacaatatatacaggg

SEQ ID NO: 1645 - DNA, 28 bp, synthetic construct
  source 1..28: mol_type = other DNA
tacgaaactgttgtacaatatatacagg

SEQ ID NO: 1646 - DNA, 28 bp, synthetic construct
  source 1..28: mol_type = other DNA
gtatatattgtacaacagtttcgtatgg

SEQ ID NO: 1647 - DNA, 28 bp, synthetic construct
  source 1..28: mol_type = other DNA
tatatattgtacaacagtttcgtatggg

SEQ ID NO: 1648 - DNA, 28 bp, synthetic construct
  source 1..28: mol_type = other DNA
tggggatataacagtgaataaaaacagg

SEQ ID NO: 1649 - DNA, 28 bp, synthetic construct
  source 1..28: mol_type = other DNA
acacgaggcactgttctaagtgctgggg

SEQ ID NO: 1650 - DNA, 28 bp, synthetic construct
  source 1..28: mol_type = other DNA
cacacgaggcactgttctaagtgctggg

SEQ ID NO: 1651 - DNA, 28 bp, synthetic construct
  source 1..28: mol_type = other DNA
acacacgaggcactgttctaagtgctgg

SEQ ID NO: 1652 - DNA, 28 bp, synthetic construct
  source 1..28: mol_type = other DNA
acttagaacagtgcctcgtgtgtttagg

SEQ ID NO: 1653 - DNA, 28 bp, synthetic construct
  source 1..28: mol_type = other DNA
tatttactaagtgcctaaacacacgagg

SEQ ID NO: 1654 - DNA, 28 bp, synthetic construct
  source 1..28: mol_type = other DNA
atatgatcactgtagtagagatgcaagg

SEQ ID NO: 1655 - DNA, 28 bp, synthetic construct
  source 1..28: mol_type = other DNA
agatgcaaggtacagtagaaacacatgg

SEQ ID NO: 1656 - DNA, 28 bp, synthetic construct
  source 1..28: mol_type = other DNA
gatgcaaggtacagtagaaacacatggg

SEQ ID NO: 1657 - DNA, 28 bp, synthetic construct
  source 1..28: mol_type = other DNA
atgggaaagagtgacatgactacatagg

SEQ ID NO: 1658 - DNA, 28 bp, synthetic construct
  source 1..28: mol_type = other DNA
gagtgacatgactacataggaattgagg

SEQ ID NO: 1659 - DNA, 28 bp, synthetic construct
  source 1..28: mol_type = other DNA
aaagatgcccttaagcagagctctttgg

SEQ ID NO: 1660 - DNA, 28 bp, synthetic construct
  source 1..28: mol_type = other DNA
tttctctccaaagagctctgcttaaggg

SEQ ID NO: 1661 - DNA, 28 bp, synthetic construct
  source 1..28: mol_type = other DNA
ttttctctccaaagagctctgcttaagg

SEQ ID NO: 1662 - DNA, 28 bp, synthetic construct
  source 1..28: mol_type = other DNA
agcagagctctttggagagaaaaacagg

SEQ ID NO: 1663 - DNA, 28 bp, synthetic construct
  source 1..28: mol_type = other DNA
gagctctttggagagaaaaacaggtagg

SEQ ID NO: 1664 - DNA, 28 bp, synthetic construct
  source 1..28: mol_type = other DNA
agctctttggagagaaaaacaggtaggg

SEQ ID NO: 1665 - DNA, 28 bp, synthetic construct
  source 1..28: mol_type = other DNA
agaaaatagcattgcagatacacagagg

SEQ ID NO: 1666 - DNA, 28 bp, synthetic construct
  source 1..28: mol_type = other DNA
gaggaatgagagaacagtgtgttcaagg

SEQ ID NO: 1667 - DNA, 28 bp, synthetic construct
  source 1..28: mol_type = other DNA
tatagtactgctacagcataatttgtgg

SEQ ID NO: 1668 - DNA, 28 bp, synthetic construct
  source 1..28: mol_type = other DNA
atagtactgctacagcataatttgtggg

SEQ ID NO: 1669 - DNA, 28 bp, synthetic construct
  source 1..28: mol_type = other DNA
tagtactgctacagcataatttgtgggg

SEQ ID NO: 1670 - DNA, 28 bp, synthetic construct
  source 1..28: mol_type = other DNA
agtactgctacagcataatttgtggggg

SEQ ID NO: 1671 - DNA, 28 bp, synthetic construct
  source 1..28: mol_type = other DNA
tgtgggggtaaagatgaactagatgagg

SEQ ID NO: 1672 - DNA, 28 bp, synthetic construct
  source 1..28: mol_type = other DNA
acatgtagtagatagcacctgatcatgg

SEQ ID NO: 1673 - DNA, 28 bp, synthetic construct
  source 1..28: mol_type = other DNA
tgtagtagatagcacctgatcatggagg

SEQ ID NO: 1674 - DNA, 28 bp, synthetic construct
  source 1..28: mol_type = other DNA
gtagtagatagcacctgatcatggaggg

SEQ ID NO: 1675 - DNA, 28 bp, synthetic construct
  source 1..28: mol_type = other DNA
tagatagcacctgatcatggagggatgg

SEQ ID NO: 1676 - DNA, 28 bp, synthetic construct
  source 1..28: mol_type = other DNA
atagcacctgatcatggagggatggagg

SEQ ID NO: 1677 - DNA, 28 bp, synthetic construct
  source 1..28: mol_type = other DNA
tagcacctgatcatggagggatggaggg

SEQ ID NO: 1678 - DNA, 28 bp, synthetic construct
  source 1..28: mol_type = other DNA
aaaaaccctccatccctccatgatcagg

SEQ ID NO: 1679 - DNA, 28 bp, synthetic construct
  source 1..28: mol_type = other DNA
gatggagggtttttgtgccagactaagg

SEQ ID NO: 1680 - DNA, 28 bp, synthetic construct
  source 1..28: mol_type = other DNA
ggacaaaatctaaaattccttagtctgg

SEQ ID NO: 1681 - DNA, 28 bp, synthetic construct
  source 1..28: mol_type = other DNA
gaattttagattttgtcctgtcaagtgg

SEQ ID NO: 1682 - DNA, 28 bp, synthetic construct
  source 1..28: mol_type = other DNA
aattttagattttgtcctgtcaagtggg

SEQ ID NO: 1683 - DNA, 28 bp, synthetic construct
  source 1..28: mol_type = other DNA
agattttgtcctgtcaagtgggcagtgg

SEQ ID NO: 1684 - DNA, 28 bp, synthetic construct
  source 1..28: mol_type = other DNA
cactatctaccactgcccacttgacagg

SEQ ID NO: 1685 - DNA, 28 bp, synthetic construct
  source 1..28: mol_type = other DNA
gtgagccattgaagacttctaagcaagg

SEQ ID NO: 1686 - DNA, 28 bp, synthetic construct
  source 1..28: mol_type = other DNA
tgagccattgaagacttctaagcaaggg

SEQ ID NO: 1687 - DNA, 28 bp, synthetic construct
  source 1..28: mol_type = other DNA
acatcccttgcttagaagtcttcaatgg

SEQ ID NO: 1688 - DNA, 28 bp, synthetic construct
  source 1..28: mol_type = other DNA
gtgtgtgtgtgtgtacgtattaaaaagg

SEQ ID NO: 1689 - DNA, 28 bp, synthetic construct
  source 1..28: mol_type = other DNA
aaaaaggtaactagcaacattgtgaagg

SEQ ID NO: 1690 - DNA, 28 bp, synthetic construct
  source 1..28: mol_type = other DNA
attttatttaagatatgtatgatttagg

SEQ ID NO: 1691 - DNA, 28 bp, synthetic construct
  source 1..28: mol_type = other DNA
gtagaaaaacaattactatcacatgtgg

SEQ ID NO: 1692 - DNA, 28 bp, synthetic construct
  source 1..28: mol_type = other DNA
tagaaaaacaattactatcacatgtggg

SEQ ID NO: 1693 - DNA, 28 bp, synthetic construct
  source 1..28: mol_type = other DNA
acaattactatcacatgtgggcgagagg

SEQ ID NO: 1694 - DNA, 28 bp, synthetic construct
  source 1..28: mol_type = other DNA
gcgagaggatatttcattttatatttgg

SEQ ID NO: 1695 - DNA, 28 bp, synthetic construct
  source 1..28: mol_type = other DNA
ttcattttatatttggacaaaatcatgg

SEQ ID NO: 1696 - DNA, 28 bp, synthetic construct
  source 1..28: mol_type = other DNA
tttggacaaaatcatggatgtatagtgg

SEQ ID NO: 1697 - DNA, 28 bp, synthetic construct
  source 1..28: mol_type = other DNA
ttggacaaaatcatggatgtatagtggg

SEQ ID NO: 1698 - DNA, 28 bp, synthetic construct
  source 1..28: mol_type = other DNA
tggatgtatagtgggaagatgttcttgg

SEQ ID NO: 1699 - DNA, 28 bp, synthetic construct
  source 1..28: mol_type = other DNA
tttgtgaaagagaagaaatgcacaatgg

SEQ ID NO: 1700 - DNA, 28 bp, synthetic construct
  source 1..28: mol_type = other DNA
gtgaaagagaagaaatgcacaatggagg

SEQ ID NO: 1701 - DNA, 28 bp, synthetic construct
  source 1..28: mol_type = other DNA
ttttaaagtcttctttcttaaagggtgg

SEQ ID NO: 1702 - DNA, 28 bp, synthetic construct
  source 1..28: mol_type = other DNA
attttttaaagtcttctttcttaaaggg

SEQ ID NO: 1703 - DNA, 28 bp, synthetic construct
  source 1..28: mol_type = other DNA
aattttttaaagtcttctttcttaaagg

SEQ ID NO: 1704 - DNA, 28 bp, synthetic construct
  source 1..28: mol_type = other DNA
gtaatgtacactagaaaagtgcttaagg

SEQ ID NO: 1705 - DNA, 28 bp, synthetic construct
  source 1..28: mol_type = other DNA
acatcttttcttgttgattcataactgg

SEQ ID NO: 1706 - DNA, 28 bp, synthetic construct
  source 1..28: mol_type = other DNA
gaatgtcaacctcctttcttcgtagagg

SEQ ID NO: 1707 - DNA, 28 bp, synthetic construct
  source 1..28: mol_type = other DNA
cctcctttcttcgtagaggaacagttgg

SEQ ID NO: 1708 - DNA, 28 bp, synthetic construct
  source 1..28: mol_type = other DNA
caaccaactgttcctctacgaagaaagg

SEQ ID NO: 1709 - DNA, 28 bp, synthetic construct
  source 1..28: mol_type = other DNA
cctcctgatcttgatttattgttgaagg

SEQ ID NO: 1710 - DNA, 28 bp, synthetic construct
  source 1..28: mol_type = other DNA
tttccttcaacaataaatcaagatcagg

SEQ ID NO: 1711 - DNA, 28 bp, synthetic construct
  source 1..28: mol_type = other DNA
acaatcaaatctatactgtttgctgtgg

SEQ ID NO: 1712 - DNA, 28 bp, synthetic construct
  source 1..28: mol_type = other DNA
caatcaaatctatactgtttgctgtggg

SEQ ID NO: 1713 - DNA, 28 bp, synthetic construct
  source 1..28: mol_type = other DNA
gtgggaacaatgtatctgcctttgtagg

SEQ ID NO: 1714 - DNA, 28 bp, synthetic construct
  source 1..28: mol_type = other DNA
gcaaaagcagacatttgtcctacaaagg

SEQ ID NO: 1715 - DNA, 28 bp, synthetic construct
  source 1..28: mol_type = other DNA
acaaatgtctgcttttgcatattgcagg

SEQ ID NO: 1716 - DNA, 28 bp, synthetic construct
  source 1..28: mol_type = other DNA
ccgcatgcacagaatttttgaaatgagg

SEQ ID NO: 1717 - DNA, 28 bp, synthetic construct
  source 1..28: mol_type = other DNA
cgcatgcacagaatttttgaaatgaggg

SEQ ID NO: 1718 - DNA, 28 bp, synthetic construct
  source 1..28: mol_type = other DNA
tggtttttacttgcatttgaatgaaagg

SEQ ID NO: 1719 - DNA, 28 bp, synthetic construct
  source 1..28: mol_type = other DNA
tctaattccaaattttttatattttagg

SEQ ID NO: 1720 - DNA, 28 bp, synthetic construct
  source 1..28: mol_type = other DNA
tataggacctaaaatataaaaaatttgg

SEQ ID NO: 1721 - DNA, 28 bp, synthetic construct
  source 1..28: mol_type = other DNA
tttaggtcctatattgcgacctagttgg

SEQ ID NO: 1722 - DNA, 28 bp, synthetic construct
  source 1..28: mol_type = other DNA
cgaaagtccaactaggtcgcaatatagg

SEQ ID NO: 1723 - DNA, 28 bp, synthetic construct
  source 1..28: mol_type = other DNA
cttttttttaaacgaaagtccaactagg

SEQ ID NO: 1724 - DNA, 28 bp, synthetic construct
  source 1..28: mol_type = other DNA
taaaaaaaagtctaaattatgcagaagg

SEQ ID NO: 1725 - DNA, 28 bp, synthetic construct
  source 1..28: mol_type = other DNA
aaaaaaaagtctaaattatgcagaaggg

SEQ ID NO: 1726 - DNA, 28 bp, synthetic construct
  source 1..28: mol_type = other DNA
tgcagaagggagacgtcaaagaaaaagg

SEQ ID NO: 1727 - DNA, 28 bp, synthetic construct
  source 1..28: mol_type = other DNA
aaaaaggagagactgaagaacaagaagg

SEQ ID NO: 1728 - DNA, 28 bp, synthetic construct
  source 1..28: mol_type = other DNA
aaaatagaattgctagacagtgtcctgg

SEQ ID NO: 1729 - DNA, 28 bp, synthetic construct
  source 1..28: mol_type = other DNA
atagaattgctagacagtgtcctggagg

SEQ ID NO: 1730 - DNA, 28 bp, synthetic construct
  source 1..28: mol_type = other DNA
tagaattgctagacagtgtcctggaggg

SEQ ID NO: 1731 - DNA, 28 bp, synthetic construct
  source 1..28: mol_type = other DNA
ctagacagtgtcctggagggacaagagg

SEQ ID NO: 1732 - DNA, 28 bp, synthetic construct
  source 1..28: mol_type = other DNA
tagacagtgtcctggagggacaagaggg

SEQ ID NO: 1733 - DNA, 28 bp, synthetic construct
  source 1..28: mol_type = other DNA
agtgtcctggagggacaagagggaatgg

SEQ ID NO: 1734 - DNA, 28 bp, synthetic construct
  source 1..28: mol_type = other DNA
gtgtcctggagggacaagagggaatggg

SEQ ID NO: 1735 - DNA, 28 bp, synthetic construct
  source 1..28: mol_type = other DNA
tgtcctggagggacaagagggaatgggg

SEQ ID NO: 1736 - DNA, 28 bp, synthetic construct
  source 1..28: mol_type = other DNA
ctaccccattccctcttgtccctccagg

SEQ ID NO: 1737 - DNA, 28 bp, synthetic construct
  source 1..28: mol_type = other DNA
agagggaatggggtagagagagcacagg

SEQ ID NO: 1738 - DNA, 28 bp, synthetic construct
  source 1..28: mol_type = other DNA
atggggtagagagagcacaggtaaatgg

SEQ ID NO: 1739 - DNA, 28 bp, synthetic construct
  source 1..28: mol_type = other DNA
agagcacaggtaaatggatgagctttgg

SEQ ID NO: 1740 - DNA, 28 bp, synthetic construct
  source 1..28: mol_type = other DNA
taacaattttaaattttatgccaacagg

SEQ ID NO: 1741 - DNA, 28 bp, synthetic construct
  source 1..28: mol_type = other DNA
gcaataaattttttgcttcacctgttgg

SEQ ID NO: 1742 - DNA, 28 bp, synthetic construct
  source 1..28: mol_type = other DNA
aagcaaaaaatttattgccatatcttgg

SEQ ID NO: 1743 - DNA, 28 bp, synthetic construct
  source 1..28: mol_type = other DNA
ctctcattttgtggggtccaagatatgg

SEQ ID NO: 1744 - DNA, 28 bp, synthetic construct
  source 1..28: mol_type = other DNA
tacagaaacaatctctcattttgtgggg

SEQ ID NO: 1745 - DNA, 28 bp, synthetic construct
  source 1..28: mol_type = other DNA
gtacagaaacaatctctcattttgtggg

SEQ ID NO: 1746 - DNA, 28 bp, synthetic construct
  source 1..28: mol_type = other DNA
ggtacagaaacaatctctcattttgtgg

SEQ ID NO: 1747 - DNA, 28 bp, synthetic construct
  source 1..28: mol_type = other DNA
agagattgtttctgtaccataaatttgg

SEQ ID NO: 1748 - DNA, 28 bp, synthetic construct
  source 1..28: mol_type = other DNA
tgtttctgtaccataaatttggaccagg

SEQ ID NO: 1749 - DNA, 28 bp, synthetic construct
  source 1..28: mol_type = other DNA
taaacttcttcctggtccaaatttatgg

SEQ ID NO: 1750 - DNA, 28 bp, synthetic construct
  source 1..28: mol_type = other DNA
aacttgggtacgataaacttcttcctgg

SEQ ID NO: 1751 - DNA, 28 bp, synthetic construct
  source 1..28: mol_type = other DNA
gaagaagtttatcgtacccaagttgtgg

SEQ ID NO: 1752 - DNA, 28 bp, synthetic construct
  source 1..28: mol_type = other DNA
tacccaagttgtggaaaaatctttaagg

SEQ ID NO: 1753 - DNA, 28 bp, synthetic construct
  source 1..28: mol_type = other DNA
aaccttaaagatttttccacaacttggg

SEQ ID NO: 1754 - DNA, 28 bp, synthetic construct
  source 1..28: mol_type = other DNA
caaccttaaagatttttccacaacttgg

SEQ ID NO: 1755 - DNA, 28 bp, synthetic construct
  source 1..28: mol_type = other DNA
caagttgtggaaaaatctttaaggttgg

SEQ ID NO: 1756 - DNA, 28 bp, synthetic construct
  source 1..28: mol_type = other DNA
aatctttaaggttggtagaaaaaattgg

SEQ ID NO: 1757 - DNA, 28 bp, synthetic construct
  source 1..28: mol_type = other DNA
cactgaaaaatgggctagaaagaaaagg

SEQ ID NO: 1758 - DNA, 28 bp, synthetic construct
  source 1..28: mol_type = other DNA
aaagtaaaattcttcactgaaaaatggg

SEQ ID NO: 1759 - DNA, 28 bp, synthetic construct
  source 1..28: mol_type = other DNA
caaagtaaaattcttcactgaaaaatgg

SEQ ID NO: 1760 - DNA, 28 bp, synthetic construct
  source 1..28: mol_type = other DNA
agaaagacaaatactggaaagttcttgg

SEQ ID NO: 1761 - DNA, 28 bp, synthetic construct
  source 1..28: mol_type = other DNA
atcataaacatagaaagacaaatactgg

SEQ ID NO: 1762 - DNA, 28 bp, synthetic construct
  source 1..28: mol_type = other DNA
atgttttacaaagagatctccgtatagg

SEQ ID NO: 1763 - DNA, 28 bp, synthetic construct
  source 1..28: mol_type = other DNA
taattatgaatagtacatacctatacgg

SEQ ID NO: 1764 - DNA, 28 bp, synthetic construct
  source 1..28: mol_type = other DNA
ttatattgttttacttattttctgtagg

SEQ ID NO: 1765 - DNA, 28 bp, synthetic construct
  source 1..28: mol_type = other DNA
tgattacacaagtcttcttttttgatgg

SEQ ID NO: 1766 - DNA, 28 bp, synthetic construct
  source 1..28: mol_type = other DNA
aaaaagaagacttgtgtaatcacagtgg

SEQ ID NO: 1767 - DNA, 28 bp, synthetic construct
  source 1..28: mol_type = other DNA
gtgtaatcacagtggcaaagaaacttgg

SEQ ID NO: 1768 - DNA, 28 bp, synthetic construct
  source 1..28: mol_type = other DNA
ttacagcctgttgactccaattcagagg

SEQ ID NO: 1769 - DNA, 28 bp, synthetic construct
  source 1..28: mol_type = other DNA
cctgttgactccaattcagaggttcagg

SEQ ID NO: 1770 - DNA, 28 bp, synthetic construct
  source 1..28: mol_type = other DNA
ttaatatttacctgaacctctgaattgg

SEQ ID NO: 1771 - DNA, 28 bp, synthetic construct
  source 1..28: mol_type = other DNA
aattcagaggttcaggtaaatattaagg

SEQ ID NO: 1772 - DNA, 28 bp, synthetic construct
  source 1..28: mol_type = other DNA
cagtttgtaatctttttgtcattatagg

SEQ ID NO: 1773 - DNA, 28 bp, synthetic construct
  source 1..28: mol_type = other DNA
agtttgtaatctttttgtcattataggg

SEQ ID NO: 1774 - DNA, 28 bp, synthetic construct
  source 1..28: mol_type = other DNA
tatcagttcattcagttttaattcaagg

SEQ ID NO: 1775 - DNA, 28 bp, synthetic construct
  source 1..28: mol_type = other DNA
gaattaaaactgaatgaactgataacgg

SEQ ID NO: 1776 - DNA, 28 bp, synthetic construct
  source 1..28: mol_type = other DNA
aactgaatgaactgataacggagaatgg

SEQ ID NO: 1777 - DNA, 28 bp, synthetic construct
  source 1..28: mol_type = other DNA
aaatgcttactgtacaacaagctgctgg

SEQ ID NO: 1778 - DNA, 28 bp, synthetic construct
  source 1..28: mol_type = other DNA
tctcttttattctaccttagcatcaagg

SEQ ID NO: 1779 - DNA, 28 bp, synthetic construct
  source 1..28: mol_type = other DNA
tctaccttagcatcaaggcatgccatgg

SEQ ID NO: 1780 - DNA, 28 bp, synthetic construct
  source 1..28: mol_type = other DNA
ctaccttagcatcaaggcatgccatggg

SEQ ID NO: 1781 - DNA, 28 bp, synthetic construct
  source 1..28: mol_type = other DNA
caacccatggcatgccttgatgctaagg

SEQ ID NO: 1782 - DNA, 28 bp, synthetic construct
  source 1..28: mol_type = other DNA
catgccatgggttgcctctcataaatgg

SEQ ID NO: 1783 - DNA, 28 bp, synthetic construct
  source 1..28: mol_type = other DNA
ttggccatttatgagaggcaacccatgg

SEQ ID NO: 1784 - DNA, 28 bp, synthetic construct
  source 1..28: mol_type = other DNA
ggtcacagctttggccatttatgagagg

SEQ ID NO: 1785 - DNA, 28 bp, synthetic construct
  source 1..28: mol_type = other DNA
aactgttgcataagggtcacagctttgg

SEQ ID NO: 1786 - DNA, 28 bp, synthetic construct
  source 1..28: mol_type = other DNA
gacccttatgcaacagtttctctagtgg

SEQ ID NO: 1787 - DNA, 28 bp, synthetic construct
  source 1..28: mol_type = other DNA
acccttatgcaacagtttctctagtggg

SEQ ID NO: 1788 - DNA, 28 bp, synthetic construct
  source 1..28: mol_type = other DNA
gcccactagagaaactgttgcataaggg

SEQ ID NO: 1789 - DNA, 28 bp, synthetic construct
  source 1..28: mol_type = other DNA
ggcccactagagaaactgttgcataagg

SEQ ID NO: 1790 - DNA, 28 bp, synthetic construct
  source 1..28: mol_type = other DNA
aacagtttctctagtgggcccttctagg

SEQ ID NO: 1791 - DNA, 28 bp, synthetic construct
  source 1..28: mol_type = other DNA
ataattcaataaatattacctagaaggg

SEQ ID NO: 1792 - DNA, 28 bp, synthetic construct
  source 1..28: mol_type = other DNA
aataattcaataaatattacctagaagg

SEQ ID NO: 1793 - DNA, 28 bp, synthetic construct
  source 1..28: mol_type = other DNA
aggtaatatttattgaattattattagg

SEQ ID NO: 1794 - DNA, 28 bp, synthetic construct
  source 1..28: mol_type = other DNA
aggtaaaactctaccacattggaacagg

SEQ ID NO: 1795 - DNA, 28 bp, synthetic construct
  source 1..28: mol_type = other DNA
tcttttggtcattcctgttccaatgtgg

SEQ ID NO: 1796 - DNA, 28 bp, synthetic construct
  source 1..28: mol_type = other DNA
tttcttctttacttttgtcttcttttgg

SEQ ID NO: 1797 - DNA, 28 bp, synthetic construct
  source 1..28: mol_type = other DNA
caaaataaaagatttcattaaactgcgg

SEQ ID NO: 1798 - DNA, 28 bp, synthetic construct
  source 1..28: mol_type = other DNA
cagtttaatgaaatcttttattttgagg

SEQ ID NO: 1799 - DNA, 28 bp, synthetic construct
  source 1..28: mol_type = other DNA
atttttactaaaatattttgtttacagg

SEQ ID NO: 1800 - DNA, 28 bp, synthetic construct
  source 1..28: mol_type = other DNA
gactttctggtgtaactactggatctgg

SEQ ID NO: 1801 - DNA, 28 bp, synthetic construct
  source 1..28: mol_type = other DNA
aactgggactttctggtgtaactactgg

SEQ ID NO: 1802 - DNA, 28 bp, synthetic construct
  source 1..28: mol_type = other DNA
agttacaccagaaagtcccagttccagg

SEQ ID NO: 1803 - DNA, 28 bp, synthetic construct
  source 1..28: mol_type = other DNA
tcttctacctggaactgggactttctgg

SEQ ID NO: 1804 - DNA, 28 bp, synthetic construct
  source 1..28: mol_type = other DNA
agaaagtcccagttccaggtagaagagg

SEQ ID NO: 1805 - DNA, 28 bp, synthetic construct
  source 1..28: mol_type = other DNA
aagtcccagttccaggtagaagaggagg

SEQ ID NO: 1806 - DNA, 28 bp, synthetic construct
  source 1..28: mol_type = other DNA
atgtcctcctcttctacctggaactggg

SEQ ID NO: 1807 - DNA, 28 bp, synthetic construct
  source 1..28: mol_type = other DNA
aatgtcctcctcttctacctggaactgg

SEQ ID NO: 1808 - DNA, 28 bp, synthetic construct
  source 1..28: mol_type = other DNA
cttttcaatgtcctcctcttctacctgg

SEQ ID NO: 1809 - DNA, 28 bp, synthetic construct
  source 1..28: mol_type = other DNA
ggaggacattgaaaagctagaaatcagg

SEQ ID NO: 1810 - DNA, 28 bp, synthetic construct
  source 1..28: mol_type = other DNA
aaagctagaaatcaggtatgtgccttgg

SEQ ID NO: 1811 - DNA, 28 bp, synthetic construct
  source 1..28: mol_type = other DNA
aagctagaaatcaggtatgtgccttggg

SEQ ID NO: 1812 - DNA, 28 bp, synthetic construct
  source 1..28: mol_type = other DNA
agctagaaatcaggtatgtgccttgggg

SEQ ID NO: 1813 - DNA, 28 bp, synthetic construct
  source 1..28: mol_type = other DNA
aacataaagccagttttcaattttcagg

SEQ ID NO: 1814 - DNA, 28 bp, synthetic construct
  source 1..28: mol_type = other DNA
caagtcgatcctgaaaattgaaaactgg

SEQ ID NO: 1815 - DNA, 28 bp, synthetic construct
  source 1..28: mol_type = other DNA
gttttcaattttcaggatcgacttgtgg

SEQ ID NO: 1816 - DNA, 28 bp, synthetic construct
  source 1..28: mol_type = other DNA
ttttcaggatcgacttgtggaacaatgg

SEQ ID NO: 1817 - DNA, 28 bp, synthetic construct
  source 1..28: mol_type = other DNA
gaaacctagtccaagatgttttcctagg

SEQ ID NO: 1818 - DNA, 28 bp, synthetic construct
  source 1..28: mol_type = other DNA
ctcacctaggaaaacatcttggactagg

SEQ ID NO: 1819 - DNA, 28 bp, synthetic construct
  source 1..28: mol_type = other DNA
cttaatctcacctaggaaaacatcttgg

SEQ ID NO: 1820 - DNA, 28 bp, synthetic construct
  source 1..28: mol_type = other DNA
caagatgttttcctaggtgagattaagg

SEQ ID NO: 1821 - DNA, 28 bp, synthetic construct
  source 1..28: mol_type = other DNA
gttcacaggaaccttaatctcacctagg

SEQ ID NO: 1822 - DNA, 28 bp, synthetic construct
  source 1..28: mol_type = other DNA
aggaatcagttcttaatacgttcacagg

SEQ ID NO: 1823 - DNA, 28 bp, synthetic construct
  source 1..28: mol_type = other DNA
aagaactgattcctctcatcaagcctgg

SEQ ID NO: 1824 - DNA, 28 bp, synthetic construct
  source 1..28: mol_type = other DNA
ctgattcctctcatcaagcctggtaagg

SEQ ID NO: 1825 - DNA, 28 bp, synthetic construct
  source 1..28: mol_type = other DNA
tgattcctctcatcaagcctggtaaggg

SEQ ID NO: 1826 - DNA, 28 bp, synthetic construct
  source 1..28: mol_type = other DNA
ctgggcccttaccaggcttgatgagagg

SEQ ID NO: 1827 - DNA, 28 bp, synthetic construct
  source 1..28: mol_type = other DNA
ttcactaaaatgctgggcccttaccagg

SEQ ID NO: 1828 - DNA, 28 bp, synthetic construct
  source 1..28: mol_type = other DNA
atggaatcacttatatttttactttagg

SEQ ID NO: 1829 - DNA, 28 bp, synthetic construct
  source 1..28: mol_type = other DNA
ggtacttgctacagccaagagacaatgg

SEQ ID NO: 1830 - DNA, 28 bp, synthetic construct
  source 1..28: mol_type = other DNA
tggatgacttgtttccattgtctcttgg

SEQ ID NO: 1831 - DNA, 28 bp, synthetic construct
  source 1..28: mol_type = other DNA
aacaagtcatccaaaactgatgacctgg

SEQ ID NO: 1832 - DNA, 28 bp, synthetic construct
  source 1..28: mol_type = other DNA
acaagtcatccaaaactgatgacctggg

SEQ ID NO: 1833 - DNA, 28 bp, synthetic construct
  source 1..28: mol_type = other DNA
caagtcatccaaaactgatgacctgggg

SEQ ID NO: 1834 - DNA, 28 bp, synthetic construct
  source 1..28: mol_type = other DNA
cgaagagaccccaggtcatcagttttgg

SEQ ID NO: 1835 - DNA, 28 bp, synthetic construct
  source 1..28: mol_type = other DNA
acatatatttaatcgaagagaccccagg

SEQ ID NO: 1836 - DNA, 28 bp, synthetic construct
  source 1..28: mol_type = other DNA
actacgtgcttccttcagagtactatgg

SEQ ID NO: 1837 - DNA, 28 bp, synthetic construct
  source 1..28: mol_type = other DNA
ttttcaaaggaccatagtactctgaagg

SEQ ID NO: 1838 - DNA, 28 bp, synthetic construct
  source 1..28: mol_type = other DNA
gtgattttagcagcaaagttttcaaagg

SEQ ID NO: 1839 - DNA, 28 bp, synthetic construct
  source 1..28: mol_type = other DNA
aagattcttaacatacttgaacatctgg

SEQ ID NO: 1840 - DNA, 28 bp, synthetic construct
  source 1..28: mol_type = other DNA
atgttcaagtatgttaagaatcttaagg

SEQ ID NO: 1841 - DNA, 28 bp, synthetic construct
  source 1..28: mol_type = other DNA
aggcagatattggctaaatacagaaagg

SEQ ID NO: 1842 - DNA, 28 bp, synthetic construct
  source 1..28: mol_type = other DNA
aaatgtaagcagctgaggcagatattgg

SEQ ID NO: 1843 - DNA, 28 bp, synthetic construct
  source 1..28: mol_type = other DNA
atttcactcaaaatgtaagcagctgagg

SEQ ID NO: 1844 - DNA, 28 bp, synthetic construct
  source 1..28: mol_type = other DNA
catggtgcagcagcagtcgtacaagggg

SEQ ID NO: 1845 - DNA, 28 bp, synthetic construct
  source 1..28: mol_type = other DNA
tcatggtgcagcagcagtcgtacaaggg

SEQ ID NO: 1846 - DNA, 28 bp, synthetic construct
  source 1..28: mol_type = other DNA
atcatggtgcagcagcagtcgtacaagg

SEQ ID NO: 1847 - DNA, 28 bp, synthetic construct
  source 1..28: mol_type = other DNA
agtggcaaaaggaacaagtttatcatgg

SEQ ID NO: 1848 - DNA, 28 bp, synthetic construct
  source 1..28: mol_type = other DNA
aaacttgttccttttgccactgctgtgg

SEQ ID NO: 1849 - DNA, 28 bp, synthetic construct
  source 1..28: mol_type = other DNA
ctaattcagccacagcagtggcaaaagg

SEQ ID NO: 1850 - DNA, 28 bp, synthetic construct
  source 1..28: mol_type = other DNA
ttcaagtctaattcagccacagcagtgg

SEQ ID NO: 1851 - DNA, 28 bp, synthetic construct
  source 1..28: mol_type = other DNA
actgctgtggctgaattagacttgaagg

SEQ ID NO: 1852 - DNA, 28 bp, synthetic construct
  source 1..28: mol_type = other DNA
tcagagatgcaaacacaatttttagagg

SEQ ID NO: 1853 - DNA, 28 bp, synthetic construct
  source 1..28: mol_type = other DNA
aacacaatttttagaggaaattccctgg

SEQ ID NO: 1854 - DNA, 28 bp, synthetic construct
  source 1..28: mol_type = other DNA
ggaaattccctggctacccgatgtctgg

SEQ ID NO: 1855 - DNA, 28 bp, synthetic construct
  source 1..28: mol_type = other DNA
atctcatccagacatcgggtagccaggg

SEQ ID NO: 1856 - DNA, 28 bp, synthetic construct
  source 1..28: mol_type = other DNA
catctcatccagacatcgggtagccagg

SEQ ID NO: 1857 - DNA, 28 bp, synthetic construct
  source 1..28: mol_type = other DNA
attttcatcatctcatccagacatcggg

SEQ ID NO: 1858 - DNA, 28 bp, synthetic construct
  source 1..28: mol_type = other DNA
tattttcatcatctcatccagacatcgg

SEQ ID NO: 1859 - DNA, 28 bp, synthetic construct
  source 1..28: mol_type = other DNA
tgtctggatgagatgatgaaaatagtgg

SEQ ID NO: 1860 - DNA, 28 bp, synthetic construct
  source 1..28: mol_type = other DNA
gtctggatgagatgatgaaaatagtggg

SEQ ID NO: 1861 - DNA, 28 bp, synthetic construct
  source 1..28: mol_type = other DNA
tggatgagatgatgaaaatagtgggagg

SEQ ID NO: 1862 - DNA, 28 bp, synthetic construct
  source 1..28: mol_type = other DNA
ggatgagatgatgaaaatagtgggaggg

SEQ ID NO: 1863 - DNA, 28 bp, synthetic construct
  source 1..28: mol_type = other DNA
aagaataggttttaatgttactttcagg

SEQ ID NO: 1864 - DNA, 28 bp, synthetic construct
  source 1..28: mol_type = other DNA
gtaacattaaaacctattcttgatgagg

SEQ ID NO: 1865 - DNA, 28 bp, synthetic construct
  source 1..28: mol_type = other DNA
atatattctgtacctcatcaagaatagg

SEQ ID NO: 1866 - DNA, 28 bp, synthetic construct
  source 1..28: mol_type = other DNA
ataggatcgatttcacaggattttgagg

SEQ ID NO: 1867 - DNA, 28 bp, synthetic construct
  source 1..28: mol_type = other DNA
ttcaatttaataggatcgatttcacagg

SEQ ID NO: 1868 - DNA, 28 bp, synthetic construct
  source 1..28: mol_type = other DNA
gaaatcgatcctattaaattgaaagagg

SEQ ID NO: 1869 - DNA, 28 bp, synthetic construct
  source 1..28: mol_type = other DNA
aaatcgatcctattaaattgaaagaggg

SEQ ID NO: 1870 - DNA, 28 bp, synthetic construct
  source 1..28: mol_type = other DNA
cattatctccctctttcaatttaatagg

SEQ ID NO: 1871 - DNA, 28 bp, synthetic construct
  source 1..28: mol_type = other DNA
gagggagataatgtagaaaataataagg

SEQ ID NO: 1872 - DNA, 28 bp, synthetic construct
  source 1..28: mol_type = other DNA
taatgtttacctttttaaatcctgcagg

SEQ ID NO: 1873 - DNA, 28 bp, synthetic construct
  source 1..28: mol_type = other DNA
gcagattctcctgcaggatttaaaaagg

SEQ ID NO: 1874 - DNA, 28 bp, synthetic construct
  source 1..28: mol_type = other DNA
tacatagtagcgcagattctcctgcagg

SEQ ID NO: 1875 - DNA, 28 bp, synthetic construct
  source 1..28: mol_type = other DNA
ataaaagatatcacacattacagtgggg

SEQ ID NO: 1876 - DNA, 28 bp, synthetic construct
  source 1..28: mol_type = other DNA
aataaaagatatcacacattacagtggg

SEQ ID NO: 1877 - DNA, 28 bp, synthetic construct
  source 1..28: mol_type = other DNA
gaataaaagatatcacacattacagtgg

SEQ ID NO: 1878 - DNA, 28 bp, synthetic construct
  source 1..28: mol_type = other DNA
aatgtgtgatatcttttattctctaagg

SEQ ID NO: 1879 - DNA, 28 bp, synthetic construct
  source 1..28: mol_type = other DNA
gatatcttttattctctaaggcagatgg

SEQ ID NO: 1880 - DNA, 28 bp, synthetic construct
  source 1..28: mol_type = other DNA
gttttagtaaaacaaggcacttactagg

SEQ ID NO: 1881 - DNA, 28 bp, synthetic construct
  source 1..28: mol_type = other DNA
atgagggtcatctgcaggaaaaaaatgg

SEQ ID NO: 1882 - DNA, 28 bp, synthetic construct
  source 1..28: mol_type = other DNA
aatactgaacatgagggtcatctgcagg

SEQ ID NO: 1883 - DNA, 28 bp, synthetic construct
  source 1..28: mol_type = other DNA
gctcactgcagaatactgaacatgaggg

SEQ ID NO: 1884 - DNA, 28 bp, synthetic construct
  source 1..28: mol_type = other DNA
tgctcactgcagaatactgaacatgagg

SEQ ID NO: 1885 - DNA, 28 bp, synthetic construct
  source 1..28: mol_type = other DNA
aaatgaaaagtatgaggtgatactacgg

SEQ ID NO: 1886 - DNA, 28 bp, synthetic construct
  source 1..28: mol_type = other DNA
gatgaggtcgcaaatgaaaagtatgagg

SEQ ID NO: 1887 - DNA, 28 bp, synthetic construct
  source 1..28: mol_type = other DNA
aagaatgaacacttactggatgatgagg

SEQ ID NO: 1888 - DNA, 28 bp, synthetic construct
  source 1..28: mol_type = other DNA
agctttcagaagaatgaacacttactgg

SEQ ID NO: 1889 - DNA, 28 bp, synthetic construct
  source 1..28: mol_type = other DNA
agtgggccagtgtccttttgttcacagg

SEQ ID NO: 1890 - DNA, 28 bp, synthetic construct
  source 1..28: mol_type = other DNA
gtgggccagtgtccttttgttcacaggg

SEQ ID NO: 1891 - DNA, 28 bp, synthetic construct
  source 1..28: mol_type = other DNA
gacagccctgtgaacaaaaggacactgg

SEQ ID NO: 1892 - DNA, 28 bp, synthetic construct
  source 1..28: mol_type = other DNA
cagaatggacagccctgtgaacaaaagg

SEQ ID NO: 1893 - DNA, 28 bp, synthetic construct
  source 1..28: mol_type = other DNA
tttgttcacagggctgtccattctgtgg

SEQ ID NO: 1894 - DNA, 28 bp, synthetic construct
  source 1..28: mol_type = other DNA
cagctttagtaacaaagccacagaatgg

SEQ ID NO: 1895 - DNA, 28 bp, synthetic construct
  source 1..28: mol_type = other DNA
gttactaaagctgcacagaactctgagg

SEQ ID NO: 1896 - DNA, 28 bp, synthetic construct
  source 1..28: mol_type = other DNA
acagaactctgaggcagtgaaagcgtgg

SEQ ID NO: 1897 - DNA, 28 bp, synthetic construct
  source 1..28: mol_type = other DNA
cagtgaaagcgtggtagcaacattctgg

SEQ ID NO: 1898 - DNA, 28 bp, synthetic construct
  source 1..28: mol_type = other DNA
aaggcagactcacaagttcagaagtagg

SEQ ID NO: 1899 - DNA, 28 bp, synthetic construct
  source 1..28: mol_type = other DNA
agttttggtcttttttacattctttagg

SEQ ID NO: 1900 - DNA, 28 bp, synthetic construct
  source 1..28: mol_type = other DNA
ctcatctcaaaaactatacaaactttgg

SEQ ID NO: 1901 - DNA, 28 bp, synthetic construct
  source 1..28: mol_type = other DNA
tcatctcaaaaactatacaaactttggg

SEQ ID NO: 1902 - DNA, 28 bp, synthetic construct
  source 1..28: mol_type = other DNA
aaaaactatacaaactttgggaagctgg

SEQ ID NO: 1903 - DNA, 28 bp, synthetic construct
  source 1..28: mol_type = other DNA
aaaactatacaaactttgggaagctggg

SEQ ID NO: 1904 - DNA, 28 bp, synthetic construct
  source 1..28: mol_type = other DNA
aaactatacaaactttgggaagctgggg

SEQ ID NO: 1905 - DNA, 28 bp, synthetic construct
  source 1..28: mol_type = other DNA
aactatacaaactttgggaagctggggg

SEQ ID NO: 1906 - DNA, 28 bp, synthetic construct
  source 1..28: mol_type = other DNA
agctgggggagtctgtccaaaagcaagg

SEQ ID NO: 1907 - DNA, 28 bp, synthetic construct
  source 1..28: mol_type = other DNA
aagatgtaaggacttaccttgcttttgg

SEQ ID NO: 1908 - DNA, 28 bp, synthetic construct
  source 1..28: mol_type = other DNA
acttgactaagaaaaaacaaacacaggg

SEQ ID NO: 1909 - DNA, 28 bp, synthetic construct
  source 1..28: mol_type = other DNA
aacttgactaagaaaaaacaaacacagg

SEQ ID NO: 1910 - DNA, 28 bp, synthetic construct
  source 1..28: mol_type = other DNA
aatttttcaaaatgtttcaagaagaagg

SEQ ID NO: 1911 - DNA, 28 bp, synthetic construct
  source 1..28: mol_type = other DNA
gaaggatatattatagcagttaaaaagg

SEQ ID NO: 1912 - DNA, 28 bp, synthetic construct
  source 1..28: mol_type = other DNA
tattatagcagttaaaaaggtatgatgg

SEQ ID NO: 1913 - DNA, 28 bp, synthetic construct
  source 1..28: mol_type = other DNA
ttaaaaaggtatgatggttttattctgg

SEQ ID NO: 1914 - DNA, 28 bp, synthetic construct
  source 1..28: mol_type = other DNA
tttgcccatttccccatttagttcttgg

SEQ ID NO: 1915 - DNA, 28 bp, synthetic construct
  source 1..28: mol_type = other DNA
tcatccaagaactaaatggggaaatggg

SEQ ID NO: 1916 - DNA, 28 bp, synthetic construct
  source 1..28: mol_type = other DNA
ttcatccaagaactaaatggggaaatgg

SEQ ID NO: 1917 - DNA, 28 bp, synthetic construct
  source 1..28: mol_type = other DNA
tgaaatttcatccaagaactaaatgggg

SEQ ID NO: 1918 - DNA, 28 bp, synthetic construct
  source 1..28: mol_type = other DNA
atgaaatttcatccaagaactaaatggg

SEQ ID NO: 1919 - DNA, 28 bp, synthetic construct
  source 1..28: mol_type = other DNA
gatgaaatttcatccaagaactaaatgg

SEQ ID NO: 1920 - DNA, 28 bp, synthetic construct
  source 1..28: mol_type = other DNA
catctactgaaactaaagagtccagtgg

SEQ ID NO: 1921 - DNA, 28 bp, synthetic construct
  source 1..28: mol_type = other DNA
aggtgcacaggctcactcgtaccactgg

SEQ ID NO: 1922 - DNA, 28 bp, synthetic construct
  source 1..28: mol_type = other DNA
cgagtgagcctgtgcacctgaaagaagg

SEQ ID NO: 1923 - DNA, 28 bp, synthetic construct
  source 1..28: mol_type = other DNA
gagtgagcctgtgcacctgaaagaaggg

SEQ ID NO: 1924 - DNA, 28 bp, synthetic construct
  source 1..28: mol_type = other DNA
taaattacccttctttcaggtgcacagg

SEQ ID NO: 1925 - DNA, 28 bp, synthetic construct
  source 1..28: mol_type = other DNA
aatttgattaaattacccttctttcagg

SEQ ID NO: 1926 - DNA, 28 bp, synthetic construct
  source 1..28: mol_type = other DNA
gcagtgagatgtataaaagagctcaagg

SEQ ID NO: 1927 - DNA, 28 bp, synthetic construct
  source 1..28: mol_type = other DNA
gtataaaagagctcaaggaagaactcgg

SEQ ID NO: 1928 - DNA, 28 bp, synthetic construct
  source 1..28: mol_type = other DNA
aaagagctcaaggaagaactcggattgg

SEQ ID NO: 1929 - DNA, 28 bp, synthetic construct
  source 1..28: mol_type = other DNA
tggaaaaaagaattttaagaaacgatgg

SEQ ID NO: 1930 - DNA, 28 bp, synthetic construct
  source 1..28: mol_type = other DNA
gagagctcacctaccacaaacagccagg

SEQ ID NO: 1931 - DNA, 28 bp, synthetic construct
  source 1..28: mol_type = other DNA
acacaactacctggctgtttgtggtagg

SEQ ID NO: 1932 - DNA, 28 bp, synthetic construct
  source 1..28: mol_type = other DNA
ataaacacaactacctggctgtttgtgg

SEQ ID NO: 1933 - DNA, 28 bp, synthetic construct
  source 1..28: mol_type = other DNA
acaataaagcataaacacaactacctgg

SEQ ID NO: 1934 - DNA, 28 bp, synthetic construct
  source 1..28: mol_type = other DNA
aggtagttgtgtttatgctttattgtgg

SEQ ID NO: 1935 - DNA, 28 bp, synthetic construct
  source 1..28: mol_type = other DNA
ggtagttgtgtttatgctttattgtggg

SEQ ID NO: 1936 - DNA, 28 bp, synthetic construct
  source 1..28: mol_type = other DNA
gtagttgtgtttatgctttattgtgggg

SEQ ID NO: 1937 - DNA, 28 bp, synthetic construct
  source 1..28: mol_type = other DNA
tcaatgaactcttttttagaaggcaggg

SEQ ID NO: 1938 - DNA, 28 bp, synthetic construct
  source 1..28: mol_type = other DNA
ttcaatgaactcttttttagaaggcagg

SEQ ID NO: 1939 - DNA, 28 bp, synthetic construct
  source 1..28: mol_type = other DNA
ttttgttttactttttttattatttagg

SEQ ID NO: 1940 - DNA, 28 bp, synthetic construct
  source 1..28: mol_type = other DNA
atcccagtaaaaaacattcttgctgtgg

SEQ ID NO: 1941 - DNA, 28 bp, synthetic construct
  source 1..28: mol_type = other DNA
ttccacagcaagaatgttttttactggg

SEQ ID NO: 1942 - DNA, 28 bp, synthetic construct
  source 1..28: mol_type = other DNA
tttccacagcaagaatgttttttactgg

SEQ ID NO: 1943 - DNA, 28 bp, synthetic construct
  source 1..28: mol_type = other DNA
aaaaacattcttgctgtggaaaaactgg

SEQ ID NO: 1944 - DNA, 28 bp, synthetic construct
  source 1..28: mol_type = other DNA
tatgtattacttggaacatcttcatagg

SEQ ID NO: 1945 - DNA, 28 bp, synthetic construct
  source 1..28: mol_type = other DNA
atgaagatgttccaagtaatacatacgg

SEQ ID NO: 1946 - DNA, 28 bp, synthetic construct
  source 1..28: mol_type = other DNA
gagtggtttctccgtatgtattacttgg

SEQ ID NO: 1947 - DNA, 28 bp, synthetic construct
  source 1..28: mol_type = other DNA
catacggagaaaccactctatgtccagg

SEQ ID NO: 1948 - DNA, 28 bp, synthetic construct
  source 1..28: mol_type = other DNA
cacagttatttgcctggacatagagtgg

SEQ ID NO: 1949 - DNA, 28 bp, synthetic construct
  source 1..28: mol_type = other DNA
attagcttctacacagttatttgcctgg

SEQ ID NO: 1950 - DNA, 28 bp, synthetic construct
  source 1..28: mol_type = other DNA
aaataactgtgtagaagctaatgaatgg

SEQ ID NO: 1951 - DNA, 28 bp, synthetic construct
  source 1..28: mol_type = other DNA
taatgaatggatagacgtactctgcagg

SEQ ID NO: 1952 - DNA, 28 bp, synthetic construct
  source 1..28: mol_type = other DNA
aatgaatggatagacgtactctgcaggg

SEQ ID NO: 1953 - DNA, 28 bp, synthetic construct
  source 1..28: mol_type = other DNA
cagggtgagccgatgcaatcaaaacagg

SEQ ID NO: 1954 - DNA, 28 bp, synthetic construct
  source 1..28: mol_type = other DNA
aaaactgagcctgttttgattgcatcgg

SEQ ID NO: 1955 - DNA, 28 bp, synthetic construct
  source 1..28: mol_type = other DNA
tttatcatccctctgtgtatctgaacgg

SEQ ID NO: 1956 - DNA, 28 bp, synthetic construct
  source 1..28: mol_type = other DNA
tccctctgtgtatctgaacggaaattgg

SEQ ID NO: 1957 - DNA, 28 bp, synthetic construct
  source 1..28: mol_type = other DNA
gccaatttccgttcagatacacagaggg

SEQ ID NO: 1958 - DNA, 28 bp, synthetic construct
  source 1..28: mol_type = other DNA
agccaatttccgttcagatacacagagg

SEQ ID NO: 1959 - DNA, 28 bp, synthetic construct
  source 1..28: mol_type = other DNA
ctgaacggaaattggctctgctgtcagg

SEQ ID NO: 1960 - DNA, 28 bp, synthetic construct
  source 1..28: mol_type = other DNA
gaaattggctctgctgtcaggagactgg

SEQ ID NO: 1961 - DNA, 28 bp, synthetic construct
  source 1..28: mol_type = other DNA
gtcaggagactggtgaaaacactctcgg

SEQ ID NO: 1962 - DNA, 28 bp, synthetic construct
  source 1..28: mol_type = other DNA
atcagaaagaaacttacgcagtacatgg

SEQ ID NO: 1963 - DNA, 28 bp, synthetic construct
  source 1..28: mol_type = other DNA
ctttatttttttatttttaccatagagg

SEQ ID NO: 1964 - DNA, 28 bp, synthetic construct
  source 1..28: mol_type = other DNA
ttggatgtctgcagggacacctctatgg

SEQ ID NO: 1965 - DNA, 28 bp, synthetic construct
  source 1..28: mol_type = other DNA
atcaatatctatttggatgtctgcaggg

SEQ ID NO: 1966 - DNA, 28 bp, synthetic construct
  source 1..28: mol_type = other DNA
catcaatatctatttggatgtctgcagg

SEQ ID NO: 1967 - DNA, 28 bp, synthetic construct
  source 1..28: mol_type = other DNA
ttctctgtcttcatcaatatctatttgg

SEQ ID NO: 1968 - DNA, 28 bp, synthetic construct
  source 1..28: mol_type = other DNA
agcttaagtaaactgagggtaaaaaggg

SEQ ID NO: 1969 - DNA, 28 bp, synthetic construct
  source 1..28: mol_type = other DNA
cagcttaagtaaactgagggtaaaaagg

SEQ ID NO: 1970 - DNA, 28 bp, synthetic construct
  source 1..28: mol_type = other DNA
atcttctgcagcttaagtaaactgaggg

SEQ ID NO: 1971 - DNA, 28 bp, synthetic construct
  source 1..28: mol_type = other DNA
catcttctgcagcttaagtaaactgagg

SEQ ID NO: 1972 - DNA, 28 bp, synthetic construct
  source 1..28: mol_type = other DNA
ctcagtttacttaagctgcagaagatgg

SEQ ID NO: 1973 - DNA, 28 bp, synthetic construct
  source 1..28: mol_type = other DNA
gtttacttaagctgcagaagatggaagg

SEQ ID NO: 1974 - DNA, 28 bp, synthetic construct
  source 1..28: mol_type = other DNA
agatttattttcctgctctttgtagagg

SEQ ID NO: 1975 - DNA, 28 bp, synthetic construct
  source 1..28: mol_type = other DNA
ttttcctgctctttgtagaggcttgtgg

SEQ ID NO: 1976 - DNA, 28 bp, synthetic construct
  source 1..28: mol_type = other DNA
agttccacaagcctctacaaagagcagg

SEQ ID NO: 1977 - DNA, 28 bp, synthetic construct
  source 1..28: mol_type = other DNA
cttgtggaactattgcagtctatcaagg

SEQ ID NO: 1978 - DNA, 28 bp, synthetic construct
  source 1..28: mol_type = other DNA
tagaataatcatcaggctctttctgtgg

SEQ ID NO: 1979 - DNA, 28 bp, synthetic construct
  source 1..28: mol_type = other DNA
cgattacaaagttagaataatcatcagg

SEQ ID NO: 1980 - DNA, 28 bp, synthetic construct
  source 1..28: mol_type = other DNA
gatgattattctaactttgtaatcgagg

SEQ ID NO: 1981 - DNA, 28 bp, synthetic construct
  source 1..28: mol_type = other DNA
ctttttatttgctgaattgtcttaaagg

SEQ ID NO: 1982 - DNA, 28 bp, synthetic construct
  source 1..28: mol_type = other DNA
caaataaaaagcataattgagaagctgg

SEQ ID NO: 1983 - DNA, 28 bp, synthetic construct
  source 1..28: mol_type = other DNA
gctggatgaacctcatgaaaaatatagg

SEQ ID NO: 1984 - DNA, 28 bp, synthetic construct
  source 1..28: mol_type = other DNA
atcttttcttcctatatttttcatgagg

SEQ ID NO: 1985 - DNA, 28 bp, synthetic construct
  source 1..28: mol_type = other DNA
agaaaagatccagtagtgcaaaatatgg

SEQ ID NO: 1986 - DNA, 28 bp, synthetic construct
  source 1..28: mol_type = other DNA
gaaaagatccagtagtgcaaaatatggg

SEQ ID NO: 1987 - DNA, 28 bp, synthetic construct
  source 1..28: mol_type = other DNA
cacttgctcccatattttgcactactgg

SEQ ID NO: 1988 - DNA, 28 bp, synthetic construct
  source 1..28: mol_type = other DNA
tgaaaaatgactttttttcttctctagg

SEQ ID NO: 1989 - DNA, 28 bp, synthetic construct
  source 1..28: mol_type = other DNA
gaaaaatgactttttttcttctctaggg

SEQ ID NO: 1990 - DNA, 28 bp, synthetic construct
  source 1..28: mol_type = other DNA
tcttctctagggaaaatccaattgttgg

SEQ ID NO: 1991 - DNA, 28 bp, synthetic construct
  source 1..28: mol_type = other DNA
cttctctagggaaaatccaattgttggg

SEQ ID NO: 1992 - DNA, 28 bp, synthetic construct
  source 1..28: mol_type = other DNA
aactctaagatgctttcccaacaattgg

SEQ ID NO: 1993 - DNA, 28 bp, synthetic construct
  source 1..28: mol_type = other DNA
gaaagcatcttagagtttaacagattgg

SEQ ID NO: 1994 - DNA, 28 bp, synthetic construct
  source 1..28: mol_type = other DNA
gtttaacagattggttcagaagaactgg

SEQ ID NO: 1995 - DNA, 28 bp, synthetic construct
  source 1..28: mol_type = other DNA
aagaactggaaaatattatttttcttgg

SEQ ID NO: 1996 - DNA, 28 bp, synthetic construct
  source 1..28: mol_type = other DNA
ttcaattcatcatgtattttgttcatgg

SEQ ID NO: 1997 - DNA, 28 bp, synthetic construct
  source 1..28: mol_type = other DNA
aatgtggaggcagatgacattgaagcgg

SEQ ID NO: 1998 - DNA, 28 bp, synthetic construct
  source 1..28: mol_type = other DNA
ttattaaatattaaatacaatgtggagg

SEQ ID NO: 1999 - DNA, 28 bp, synthetic construct
  source 1..28: mol_type = other DNA
caattattaaatattaaatacaatgtgg

SEQ ID NO: 2000 - DNA, 28 bp, synthetic construct
  source 1..28: mol_type = other DNA
tatttaataattgaaattaattgtttgg

SEQ ID NO: 2001 - DNA, 28 bp, synthetic construct
  source 1..28: mol_type = other DNA
atttaataattgaaattaattgtttggg

SEQ ID NO: 2002 - DNA, 28 bp, synthetic construct
  source 1..28: mol_type = other DNA
attgaaattaattgtttgggaatcctgg

SEQ ID NO: 2003 - DNA, 28 bp, synthetic construct
  source 1..28: mol_type = other DNA
aattctctagtaatacatcaataccagg

SEQ ID NO: 2004 - DNA, 28 bp, synthetic construct
  source 1..28: mol_type = other DNA
gtcacacaggtatgaagggaatcttggg

SEQ ID NO: 2005 - DNA, 28 bp, synthetic construct
  source 1..28: mol_type = other DNA
ggtcacacaggtatgaagggaatcttgg

SEQ ID NO: 2006 - DNA, 28 bp, synthetic construct
  source 1..28: mol_type = other DNA
atggatttggtcacacaggtatgaaggg

SEQ ID NO: 2007 - DNA, 28 bp, synthetic construct
  source 1..28: mol_type = other DNA
catggatttggtcacacaggtatgaagg

SEQ ID NO: 2008 - DNA, 28 bp, synthetic construct
  source 1..28: mol_type = other DNA
tgcagaaacatggatttggtcacacagg

SEQ ID NO: 2009 - DNA, 28 bp, synthetic construct
  source 1..28: mol_type = other DNA
aaaagaagttgcagaaacatggatttgg

SEQ ID NO: 2010 - DNA, 28 bp, synthetic construct
  source 1..28: mol_type = other DNA
cgattaaaaagaagttgcagaaacatgg

SEQ ID NO: 2011 - DNA, 28 bp, synthetic construct
  source 1..28: mol_type = other DNA
tcttcctagaaaagctttgtaacaaagg

SEQ ID NO: 2012 - DNA, 28 bp, synthetic construct
  source 1..28: mol_type = other DNA
cttcctagaaaagctttgtaacaaaggg

SEQ ID NO: 2013 - DNA, 28 bp, synthetic construct
  source 1..28: mol_type = other DNA
tctccctttgttacaaagcttttctagg

SEQ ID NO: 2014 - DNA, 28 bp, synthetic construct
  source 1..28: mol_type = other DNA
aagaagagatggtttcttgctacggagg

SEQ ID NO: 2015 - DNA, 28 bp, synthetic construct
  source 1..28: mol_type = other DNA
tacaagaagagatggtttcttgctacgg

SEQ ID NO: 2016 - DNA, 28 bp, synthetic construct
  source 1..28: mol_type = other DNA
cagaacagagtgttacaagaagagatgg

SEQ ID NO: 2017 - DNA, 28 bp, synthetic construct
  source 1..28: mol_type = other DNA
tctcttcttgtaacactctgttctgtgg

SEQ ID NO: 2018 - DNA, 28 bp, synthetic construct
  source 1..28: mol_type = other DNA
gttggcagtatagagcaggcactgatgg

SEQ ID NO: 2019 - DNA, 28 bp, synthetic construct
  source 1..28: mol_type = other DNA
aaacacaatgttggcagtatagagcagg

SEQ ID NO: 2020 - DNA, 28 bp, synthetic construct
  source 1..28: mol_type = other DNA
ggaattttctagtaaaacacaatgttgg

SEQ ID NO: 2021 - DNA, 28 bp, synthetic construct
  source 1..28: mol_type = other DNA
tgaaaagctctgaactgtcatgaattgg

SEQ ID NO: 2022 - DNA, 28 bp, synthetic construct
  source 1..28: mol_type = other DNA
attttttttcttttttaaagtgggaggg

SEQ ID NO: 2023 - DNA, 28 bp, synthetic construct
  source 1..28: mol_type = other DNA
tattttttttcttttttaaagtgggagg

SEQ ID NO: 2024 - DNA, 28 bp, synthetic construct
  source 1..28: mol_type = other DNA
tcttattttttttcttttttaaagtggg

SEQ ID NO: 2025 - DNA, 28 bp, synthetic construct
  source 1..28: mol_type = other DNA
ttcttattttttttcttttttaaagtgg

SEQ ID NO: 2026 - DNA, 28 bp, synthetic construct
  source 1..28: mol_type = other DNA
aaaaaaataagaagtgtttttcctttgg

SEQ ID NO: 2027 - DNA, 28 bp, synthetic construct
  source 1..28: mol_type = other DNA
tttcctttggtccatcagtcattacagg

SEQ ID NO: 2028 - DNA, 28 bp, synthetic construct
  source 1..28: mol_type = other DNA
gaacctgtaatgactgatggaccaaagg

SEQ ID NO: 2029 - DNA, 28 bp, synthetic construct
  source 1..28: mol_type = other DNA
cttgaatggaacctgtaatgactgatgg

SEQ ID NO: 2030 - DNA, 28 bp, synthetic construct
  source 1..28: mol_type = other DNA
ctaaagtttctatcactgtcttgaatgg

SEQ ID NO: 2031 - DNA, 28 bp, synthetic construct
  source 1..28: mol_type = other DNA
aaactgccagagcatacttgaaagttgg

SEQ ID NO: 2032 - DNA, 28 bp, synthetic construct
  source 1..28: mol_type = other DNA
gatctaccaactttcaagtatgctctgg

SEQ ID NO: 2033 - DNA, 28 bp, synthetic construct
  source 1..28: mol_type = other DNA
agttttgtttacatctttaggcaaaagg

SEQ ID NO: 2034 - DNA, 28 bp, synthetic construct
  source 1..28: mol_type = other DNA
tgtcttgagttttgtttacatctttagg

SEQ ID NO: 2035 - DNA, 28 bp, synthetic construct
  source 1..28: mol_type = other DNA
agatgtaaacaaaactcaagacagaagg

SEQ ID NO: 2036 - DNA, 28 bp, synthetic construct
  source 1..28: mol_type = other DNA
aacaaaactcaagacagaaggaatcagg

SEQ ID NO: 2037 - DNA, 28 bp, synthetic construct
  source 1..28: mol_type = other DNA
acaaaactcaagacagaaggaatcaggg

SEQ ID NO: 2038 - DNA, 28 bp, synthetic construct
  source 1..28: mol_type = other DNA
ctattgtgtgcatcttgtttacatttgg

SEQ ID NO: 2039 - DNA, 28 bp, synthetic construct
  source 1..28: mol_type = other DNA
tattgtgtgcatcttgtttacatttggg

SEQ ID NO: 2040 - DNA, 28 bp, synthetic construct
  source 1..28: mol_type = other DNA
tcttgtttacatttgggatcagtgatgg

SEQ ID NO: 2041 - DNA, 28 bp, synthetic construct
  source 1..28: mol_type = other DNA
tttaaaacaatgaaaacaatttcagtgg

SEQ ID NO: 2042 - DNA, 28 bp, synthetic construct
  source 1..28: mol_type = other DNA
aattgttttcattgttttaaataccagg

SEQ ID NO: 2043 - DNA, 28 bp, synthetic construct
  source 1..28: mol_type = other DNA
ctttcaaatcaagaaaatgagtacctgg

SEQ ID NO: 2044 - DNA, 28 bp, synthetic construct
  source 1..28: mol_type = other DNA
atttgaaagtttaacatgacttctaagg

SEQ ID NO: 2045 - DNA, 28 bp, synthetic construct
  source 1..28: mol_type = other DNA
acatctcttcaaaaagaaagtaaacagg

SEQ ID NO: 2046 - DNA, 28 bp, synthetic construct
  source 1..28: mol_type = other DNA
catctcttcaaaaagaaagtaaacaggg

SEQ ID NO: 2047 - DNA, 28 bp, synthetic construct
  source 1..28: mol_type = other DNA
caaaaagaaagtaaacagggaatgaagg

SEQ ID NO: 2048 - DNA, 28 bp, synthetic construct
  source 1..28: mol_type = other DNA
aaagaaagtaaacagggaatgaaggtgg

SEQ ID NO: 2049 - DNA, 28 bp, synthetic construct
  source 1..28: mol_type = other DNA
gaaagtaaacagggaatgaaggtggtgg

SEQ ID NO: 2050 - DNA, 28 bp, synthetic construct
  source 1..28: mol_type = other DNA
aaagtaaacagggaatgaaggtggtggg

SEQ ID NO: 2051 - DNA, 28 bp, synthetic construct
  source 1..28: mol_type = other DNA
tcacccactatttcatgttgtaataagg

SEQ ID NO: 2052 - DNA, 28 bp, synthetic construct
  source 1..28: mol_type = other DNA
cacccactatttcatgttgtaataaggg

SEQ ID NO: 2053 - DNA, 28 bp, synthetic construct
  source 1..28: mol_type = other DNA
ggcccttattacaacatgaaatagtggg

SEQ ID NO: 2054 - DNA, 28 bp, synthetic construct
  source 1..28: mol_type = other DNA
tggcccttattacaacatgaaatagtgg

SEQ ID NO: 2055 - DNA, 28 bp, synthetic construct
  source 1..28: mol_type = other DNA
tcatgttgtaataagggccaccataagg

SEQ ID NO: 2056 - DNA, 28 bp, synthetic construct
  source 1..28: mol_type = other DNA
cactatgaggagggcatccttatggtgg

SEQ ID NO: 2057 - DNA, 28 bp, synthetic construct
  source 1..28: mol_type = other DNA
gaacactatgaggagggcatccttatgg

SEQ ID NO: 2058 - DNA, 28 bp, synthetic construct
  source 1..28: mol_type = other DNA
ataaggatgccctcctcatagtgttcgg

SEQ ID NO: 2059 - DNA, 28 bp, synthetic construct
  source 1..28: mol_type = other DNA
agatcagaaccgaacactatgaggaggg

SEQ ID NO: 2060 - DNA, 28 bp, synthetic construct
  source 1..28: mol_type = other DNA
aagatcagaaccgaacactatgaggagg

SEQ ID NO: 2061 - DNA, 28 bp, synthetic construct
  source 1..28: mol_type = other DNA
aggaagatcagaaccgaacactatgagg

SEQ ID NO: 2062 - DNA, 28 bp, synthetic construct
  source 1..28: mol_type = other DNA
ctgatcttcctcgagaacagtcacttgg

SEQ ID NO: 2063 - DNA, 28 bp, synthetic construct
  source 1..28: mol_type = other DNA
aaagtgcgccaagtgactgttctcgagg

SEQ ID NO: 2064 - DNA, 28 bp, synthetic construct
  source 1..28: mol_type = other DNA
agtcacttggcgcactttaataatctgg

SEQ ID NO: 2065 - DNA, 28 bp, synthetic construct
  source 1..28: mol_type = other DNA
tccagatttgactttagatactccatgg

SEQ ID NO: 2066 - DNA, 28 bp, synthetic construct
  source 1..28: mol_type = other DNA
accatggagtatctaaagtcaaatctgg

SEQ ID NO: 2067 - DNA, 28 bp, synthetic construct
  source 1..28: mol_type = other DNA
aactgatcataaagactagataccatgg

SEQ ID NO: 2068 - DNA, 28 bp, synthetic construct
  source 1..28: mol_type = other DNA
acagcaatgaaatataaacattttcagg

SEQ ID NO: 2069 - DNA, 28 bp, synthetic construct
  source 1..28: mol_type = other DNA
gtttccttattgcctgctagccaaatgg

SEQ ID NO: 2070 - DNA, 28 bp, synthetic construct
  source 1..28: mol_type = other DNA
aattccatttggctagcaggcaataagg

SEQ ID NO: 2071 - DNA, 28 bp, synthetic construct
  source 1..28: mol_type = other DNA
tattgcctgctagccaaatggaatttgg

SEQ ID NO: 2072 - DNA, 28 bp, synthetic construct
  source 1..28: mol_type = other DNA
attgcctgctagccaaatggaatttggg

SEQ ID NO: 2073 - DNA, 28 bp, synthetic construct
  source 1..28: mol_type = other DNA
cttgcccaaattccatttggctagcagg

SEQ ID NO: 2074 - DNA, 28 bp, synthetic construct
  source 1..28: mol_type = other DNA
aagagttgcttgcccaaattccatttgg

SEQ ID NO: 2075 - DNA, 28 bp, synthetic construct
  source 1..28: mol_type = other DNA
tttttaggacaaaagtaaatttctaggg

SEQ ID NO: 2076 - DNA, 28 bp, synthetic construct
  source 1..28: mol_type = other DNA
gtttttaggacaaaagtaaatttctagg

SEQ ID NO: 2077 - DNA, 28 bp, synthetic construct
  source 1..28: mol_type = other DNA
ctgcttatttacagttagggtttttagg

SEQ ID NO: 2078 - DNA, 28 bp, synthetic construct
  source 1..28: mol_type = other DNA
tgcttcgactgcttatttacagttaggg

SEQ ID NO: 2079 - DNA, 28 bp, synthetic construct
  source 1..28: mol_type = other DNA
ttgcttcgactgcttatttacagttagg

SEQ ID NO: 2080 - DNA, 28 bp, synthetic construct
  source 1..28: mol_type = other DNA
gaagcaagttgccaccttgaagttgagg

SEQ ID NO: 2081 - DNA, 28 bp, synthetic construct
  source 1..28: mol_type = other DNA
aagcaagttgccaccttgaagttgaggg

SEQ ID NO: 2082 - DNA, 28 bp, synthetic construct
  source 1..28: mol_type = other DNA
caaagtgtatccctcaacttcaaggtgg

SEQ ID NO: 2083 - DNA, 28 bp, synthetic construct
  source 1..28: mol_type = other DNA
aagcaaagtgtatccctcaacttcaagg

SEQ ID NO: 2084 - DNA, 28 bp, synthetic construct
  source 1..28: mol_type = other DNA
tttgcttcatcagtattaaaaaccatgg

SEQ ID NO: 2085 - DNA, 28 bp, synthetic construct
  source 1..28: mol_type = other DNA
taaaaaagacaaaataagagtaccatgg

SEQ ID NO: 2086 - DNA, 28 bp, synthetic construct
  source 1..28: mol_type = other DNA
tttaattcaaaacattttctaaatgtgg

SEQ ID NO: 2087 - DNA, 28 bp, synthetic construct
  source 1..28: mol_type = other DNA
tttctaaatgtggtactttgaaccttgg

SEQ ID NO: 2088 - DNA, 28 bp, synthetic construct
  source 1..28: mol_type = other DNA
tgaacagaaacatgtaaatactccaagg

SEQ ID NO: 2089 - DNA, 28 bp, synthetic construct
  source 1..28: mol_type = other DNA
agatatactttgccaattttgttattgg

SEQ ID NO: 2090 - DNA, 28 bp, synthetic construct
  source 1..28: mol_type = other DNA
tatactttgccaattttgttattggtgg

SEQ ID NO: 2091 - DNA, 28 bp, synthetic construct
  source 1..28: mol_type = other DNA
atactttgccaattttgttattggtggg

SEQ ID NO: 2092 - DNA, 28 bp, synthetic construct
  source 1..28: mol_type = other DNA
aatgattacccaccaataacaaaattgg

SEQ ID NO: 2093 - DNA, 28 bp, synthetic construct
  source 1..28: mol_type = other DNA
atcatttttaaattatattgttattagg

SEQ ID NO: 2094 - DNA, 28 bp, synthetic construct
  source 1..28: mol_type = other DNA
ttaggtaattatttttaaagactactgg

SEQ ID NO: 2095 - DNA, 28 bp, synthetic construct
  source 1..28: mol_type = other DNA
tacattgctcagttatattcttttatgg

SEQ ID NO: 2096 - DNA, 28 bp, synthetic construct
  source 1..28: mol_type = other DNA
atgaattatgtttaagtctgcattatgg

SEQ ID NO: 2097 - DNA, 28 bp, synthetic construct
  source 1..28: mol_type = other DNA
attatgtttaagtctgcattatggtagg

SEQ ID NO: 2098 - DNA, 28 bp, synthetic construct
  source 1..28: mol_type = other DNA
ttcaaacttgtctttaaaatgagctggg

SEQ ID NO: 2099 - DNA, 28 bp, synthetic construct
  source 1..28: mol_type = other DNA
tttcaaacttgtctttaaaatgagctgg

SEQ ID NO: 2100 - DNA, 28 bp, synthetic construct
  source 1..28: mol_type = other DNA
gaatctacaagcttataaaatttaaagg

SEQ ID NO: 2101 - DNA, 28 bp, synthetic construct
  source 1..28: mol_type = other DNA
caaatgtataaatcagtgtagtttatgg

SEQ ID NO: 2102 - DNA, 28 bp, synthetic construct
  source 1..28: mol_type = other DNA
atttgagaataagaaatttattaaatgg

SEQ ID NO: 2103 - DNA, 28 bp, synthetic construct
  source 1..28: mol_type = other DNA
ggcagacatttcagacactcttaaaagg

SEQ ID NO: 2104 - DNA, 28 bp, synthetic construct
  source 1..28: mol_type = other DNA
ctggcaatgtttacatgttcttcgcagg

SEQ ID NO: 2105 - DNA, 28 bp, synthetic construct
  source 1..28: mol_type = other DNA
ccagataccagtcattattctttagtgg

SEQ ID NO: 2106 - DNA, 28 bp, synthetic construct
  source 1..28: mol_type = other DNA
taaaaagccactaaagaataatgactgg

SEQ ID NO: 2107 - DNA, 28 bp, synthetic construct
  source 1..28: mol_type = other DNA
ttttagtcctctgcttttttttttaagg

SEQ ID NO: 2108 - DNA, 28 bp, synthetic construct
  source 1..28: mol_type = other DNA
tcttttgccttaaaaaaaaaagcagagg

SEQ ID NO: 2109 - DNA, 28 bp, synthetic construct
  source 1..28: mol_type = other DNA
tttaaaacaatcacaattggggatttgg

SEQ ID NO: 2110 - DNA, 28 bp, synthetic construct
  source 1..28: mol_type = other DNA
atgatctttaaaacaatcacaattgggg

SEQ ID NO: 2111 - DNA, 28 bp, synthetic construct
  source 1..28: mol_type = other DNA
catgatctttaaaacaatcacaattggg

SEQ ID NO: 2112 - DNA, 28 bp, synthetic construct
  source 1..28: mol_type = other DNA
ccaattgtgattgttttaaagatcatgg

SEQ ID NO: 2113 - DNA, 28 bp, synthetic construct
  source 1..28: mol_type = other DNA
gttttaaagatcatggtatgatcacagg

SEQ ID NO: 2114 - DNA, 28 bp, synthetic construct
  source 1..28: mol_type = other DNA
ttttaaagatcatggtatgatcacaggg

SEQ ID NO: 2115 - DNA, 28 bp, synthetic construct
  source 1..28: mol_type = other DNA
gatcatggtatgatcacagggaccaagg

SEQ ID NO: 2116 - DNA, 28 bp, synthetic construct
  source 1..28: mol_type = other DNA
ccaaggctgtgtgcatatataactctgg

SEQ ID NO: 2117 - DNA, 28 bp, synthetic construct
  source 1..28: mol_type = other DNA
gtgcatatataactctggatttgaaagg

SEQ ID NO: 2118 - DNA, 28 bp, synthetic construct
  source 1..28: mol_type = other DNA
catatataactctggatttgaaaggagg

SEQ ID NO: 2119 - DNA, 28 bp, synthetic construct
  source 1..28: mol_type = other DNA
gtgtcatgtgaagaaaagaactagatgg

SEQ ID NO: 2120 - DNA, 28 bp, synthetic construct
  source 1..28: mol_type = other DNA
gacacttttaaacagccagtttgactgg

SEQ ID NO: 2121 - DNA, 28 bp, synthetic construct
  source 1..28: mol_type = other DNA
ccagtttgactggaattaaccaacttgg

SEQ ID NO: 2122 - DNA, 28 bp, synthetic construct
  source 1..28: mol_type = other DNA
taaccaacttggcacagcctaaaaaagg

SEQ ID NO: 2123 - DNA, 28 bp, synthetic construct
  source 1..28: mol_type = other DNA
actccttttttaggctgtgccaagttgg

SEQ ID NO: 2124 - DNA, 28 bp, synthetic construct
  source 1..28: mol_type = other DNA
tttaatttcacattactccttttttagg

SEQ ID NO: 2125 - DNA, 28 bp, synthetic construct
  source 1..28: mol_type = other DNA
ttttgaaataagagaccatgtaagtagg

SEQ ID NO: 2126 - DNA, 28 bp, synthetic construct
  source 1..28: mol_type = other DNA
tggttgtcttagggtcctacttacatgg

SEQ ID NO: 2127 - DNA, 28 bp, synthetic construct
  source 1..28: mol_type = other DNA
tgtaagtaggaccctaagacaaccaagg

SEQ ID NO: 2128 - DNA, 28 bp, synthetic construct
  source 1..28: mol_type = other DNA
ggaagcaaattccttggttgtcttaggg

SEQ ID NO: 2129 - DNA, 28 bp, synthetic construct
  source 1..28: mol_type = other DNA
tggaagcaaattccttggttgtcttagg

SEQ ID NO: 2130 - DNA, 28 bp, synthetic construct
  source 1..28: mol_type = other DNA
taagacaaccaaggaatttgcttccagg

SEQ ID NO: 2131 - DNA, 28 bp, synthetic construct
  source 1..28: mol_type = other DNA
aagacaaccaaggaatttgcttccaggg

SEQ ID NO: 2132 - DNA, 28 bp, synthetic construct
  source 1..28: mol_type = other DNA
atgagggccctggaagcaaattccttgg

SEQ ID NO: 2133 - DNA, 28 bp, synthetic construct
  source 1..28: mol_type = other DNA
agtaacagcagaggaatgagggccctgg

SEQ ID NO: 2134 - DNA, 28 bp, synthetic construct
  source 1..28: mol_type = other DNA
tttgtaagtaacagcagaggaatgaggg

SEQ ID NO: 2135 - DNA, 28 bp, synthetic construct
  source 1..28: mol_type = other DNA
atttgtaagtaacagcagaggaatgagg

SEQ ID NO: 2136 - DNA, 28 bp, synthetic construct
  source 1..28: mol_type = other DNA
ttaaaacatttgtaagtaacagcagagg

SEQ ID NO: 2137 - DNA, 28 bp, synthetic construct
  source 1..28: mol_type = other DNA
gtggaaaaggtagagaaagaatatcagg

SEQ ID NO: 2138 - DNA, 28 bp, synthetic construct
  source 1..28: mol_type = other DNA
ccttttccacatttgaaaatatacaagg

SEQ ID NO: 2139 - DNA, 28 bp, synthetic construct
  source 1..28: mol_type = other DNA
gagctgccttgtatattttcaaatgtgg

SEQ ID NO: 2140 - DNA, 28 bp, synthetic construct
  source 1..28: mol_type = other DNA
ttcatcctaaaaacctaaaaactccagg

SEQ ID NO: 2141 - DNA, 28 bp, synthetic construct
  source 1..28: mol_type = other DNA
tcctaaaaacctaaaaactccaggaagg

SEQ ID NO: 2142 - DNA, 28 bp, synthetic construct
  source 1..28: mol_type = other DNA
tccttcctggagtttttaggtttttagg

SEQ ID NO: 2143 - DNA, 28 bp, synthetic construct
  source 1..28: mol_type = other DNA
cttttctttccttcctggagtttttagg

SEQ ID NO: 2144 - DNA, 28 bp, synthetic construct
  source 1..28: mol_type = other DNA
ctaaaaactccaggaaggaaagaaaagg

SEQ ID NO: 2145 - DNA, 28 bp, synthetic construct
  source 1..28: mol_type = other DNA
ccaggaaggaaagaaaaggatgatatgg

SEQ ID NO: 2146 - DNA, 28 bp, synthetic construct
  source 1..28: mol_type = other DNA
caggaaggaaagaaaaggatgatatggg

SEQ ID NO: 2147 - DNA, 28 bp, synthetic construct
  source 1..28: mol_type = other DNA
aggaaggaaagaaaaggatgatatgggg

SEQ ID NO: 2148 - DNA, 28 bp, synthetic construct
  source 1..28: mol_type = other DNA
atatggggaaatttgccataaatgccgg

SEQ ID NO: 2149 - DNA, 28 bp, synthetic construct
  source 1..28: mol_type = other DNA
ggaaatttgccataaatgccggttctgg

SEQ ID NO: 2150 - DNA, 28 bp, synthetic construct
  source 1..28: mol_type = other DNA
aactaagaaccagaaccggcatttatgg

SEQ ID NO: 2151 - DNA, 28 bp, synthetic construct
  source 1..28: mol_type = other DNA
aaatggctaaactaagaaccagaaccgg

SEQ ID NO: 2152 - DNA, 28 bp, synthetic construct
  source 1..28: mol_type = other DNA
tagccatttccatcagttgaaattgtgg

SEQ ID NO: 2153 - DNA, 28 bp, synthetic construct
  source 1..28: mol_type = other DNA
acaccacaatttcaactgatggaaatgg

SEQ ID NO: 2154 - DNA, 28 bp, synthetic construct
  source 1..28: mol_type = other DNA
cagatcacaccacaatttcaactgatgg

SEQ ID NO: 2155 - DNA, 28 bp, synthetic construct
  source 1..28: mol_type = other DNA
ttttaatattcatttaataagatgatgg

SEQ ID NO: 2156 - DNA, 28 bp, synthetic construct
  source 1..28: mol_type = other DNA
tttaatattcatttaataagatgatggg

SEQ ID NO: 2157 - DNA, 28 bp, synthetic construct
  source 1..28: mol_type = other DNA
ggcaatagcaaacatttttactcccagg

SEQ ID NO: 2158 - DNA, 28 bp, synthetic construct
  source 1..28: mol_type = other DNA
gttcaatttgataaattatattcctggg

SEQ ID NO: 2159 - DNA, 28 bp, synthetic construct
  source 1..28: mol_type = other DNA
agttcaatttgataaattatattcctgg

SEQ ID NO: 2160 - DNA, 28 bp, synthetic construct
  source 1..28: mol_type = other DNA
ccaaagaaacttgtttttaatatcacgg

SEQ ID NO: 2161 - DNA, 28 bp, synthetic construct
  source 1..28: mol_type = other DNA
caaagaaacttgtttttaatatcacggg

SEQ ID NO: 2162 - DNA, 28 bp, synthetic construct
  source 1..28: mol_type = other DNA
aacttgtttttaatatcacgggtaatgg

SEQ ID NO: 2163 - DNA, 28 bp, synthetic construct
  source 1..28: mol_type = other DNA
acttgtttttaatatcacgggtaatggg

SEQ ID NO: 2164 - DNA, 28 bp, synthetic construct
  source 1..28: mol_type = other DNA
cgggtaatgggtaagtgtgaaaactagg

SEQ ID NO: 2165 - DNA, 28 bp, synthetic construct
  source 1..28: mol_type = other DNA
aggcttttttttatgaaacaaaaaaagg

SEQ ID NO: 2166 - DNA, 28 bp, synthetic construct
  source 1..28: mol_type = other DNA
aaacaaaaaaaggtgacgaataatatgg

SEQ ID NO: 2167 - DNA, 28 bp, synthetic construct
  source 1..28: mol_type = other DNA
tctgaagcctgatttcatttatgccagg

SEQ ID NO: 2168 - DNA, 28 bp, synthetic construct
  source 1..28: mol_type = other DNA
ttcaaaacctggcataaatgaaatcagg

SEQ ID NO: 2169 - DNA, 28 bp, synthetic construct
  source 1..28: mol_type = other DNA
agaaaaagatctgtttttcaaaacctgg

SEQ ID NO: 2170 - DNA, 28 bp, synthetic construct
  source 1..28: mol_type = other DNA
tgaaagcacctttaatttgctctaacgg

SEQ ID NO: 2171 - DNA, 28 bp, synthetic construct
  source 1..28: mol_type = other DNA
aggatgtaccgttagagcaaattaaagg

SEQ ID NO: 2172 - DNA, 28 bp, synthetic construct
  source 1..28: mol_type = other DNA
aggctatgcagaattctgtctttacagg

SEQ ID NO: 2173 - DNA, 28 bp, synthetic construct
  source 1..28: mol_type = other DNA
aagacagaattctgcatagccttttagg

SEQ ID NO: 2174 - DNA, 28 bp, synthetic construct
  source 1..28: mol_type = other DNA
ttcacatactgtaaaaacacctaaaagg

SEQ ID NO: 2175 - DNA, 28 bp, synthetic construct
  source 1..28: mol_type = other DNA
cattctagagttaaattaccaatcttgg

SEQ ID NO: 2176 - DNA, 28 bp, synthetic construct
  source 1..28: mol_type = other DNA
ggaagcagataatatcaaccaagattgg

SEQ ID NO: 2177 - DNA, 28 bp, synthetic construct
  source 1..28: mol_type = other DNA
ttatctgcttccatttttattaatttgg

SEQ ID NO: 2178 - DNA, 28 bp, synthetic construct
  source 1..28: mol_type = other DNA
atattaatttccaaattaataaaaatgg

SEQ ID NO: 2179 - DNA, 28 bp, synthetic construct
  source 1..28: mol_type = other DNA
aaattaatatgttgctagtaaatattgg

SEQ ID NO: 2180 - DNA, 28 bp, synthetic construct
  source 1..28: mol_type = other DNA
ttttgataacttacattttcaaactggg

SEQ ID NO: 2181 - DNA, 28 bp, synthetic construct
  source 1..28: mol_type = other DNA
gttttgataacttacattttcaaactgg

SEQ ID NO: 2182 - DNA, 28 bp, synthetic construct
  source 1..28: mol_type = other DNA
aaaatacattctcaacaatacaacatgg

SEQ ID NO: 2183 - DNA, 28 bp, synthetic construct
  source 1..28: mol_type = other DNA
aaaattaacttttgtaactgtcgcttgg

SEQ ID NO: 2184 - DNA, 28 bp, synthetic construct
  source 1..28: mol_type = other DNA
aaatacagtctcacaaagaacagacagg

SEQ ID NO: 2185 - RNA, 20 nt, synthetic construct
  source 1..20: mol_type = other RNA
ggcttgtgagcagactcttc

SEQ ID NO: 2186 - RNA, 20 nt, synthetic construct
  source 1..20: mol_type = other RNA
ttgtgagcagactcttctgg

SEQ ID NO: 2187 - RNA, 20 nt, synthetic construct
  source 1..20: mol_type = other RNA
gagcagactcttctggtgga

SEQ ID NO: 2188 - RNA, 20 nt, synthetic construct
  source 1..20: mol_type = other RNA
agcagactcttctggtggat

SEQ ID NO: 2189 - RNA, 20 nt, synthetic construct
  source 1..20: mol_type = other RNA
ctgagacatatctcagggaa

SEQ ID NO: 2190 - RNA, 20 nt, synthetic construct
  source 1..20: mol_type = other RNA
gagatatgtctcagttccca

SEQ ID NO: 2191 - RNA, 20 nt, synthetic construct
  source 1..20: mol_type = other RNA
gggaactgagacatatctca

SEQ ID NO: 2192 - RNA, 20 nt, synthetic construct
  source 1..20: mol_type = other RNA
tgggaactgagacatatctc

SEQ ID NO: 2193 - RNA, 20 nt, synthetic construct
  source 1..20: mol_type = other RNA
gatgtgtacagtggctcctt

SEQ ID NO: 2194 - RNA, 20 nt, synthetic construct
  source 1..20: mol_type = other RNA
ggatgtgtacagtggctcct

SEQ ID NO: 2195 - RNA, 20 nt, synthetic construct
  source 1..20: mol_type = other RNA
acaaggatggatgtgtacag

SEQ ID NO: 2196 - RNA, 20 nt, synthetic construct
  source 1..20: mol_type = other RNA
tacacatccatccttgtaca

SEQ ID NO: 2197 - RNA, 20 nt, synthetic construct
  source 1..20: mol_type = other RNA
catccttgtacacggacacc

SEQ ID NO: 2198 - RNA, 20 nt, synthetic construct
  source 1..20: mol_type = other RNA
ctggtgtccgtgtacaagga

SEQ ID NO: 2199 - RNA, 20 nt, synthetic construct
  source 1..20: mol_type = other RNA
gcacctggtgtccgtgtaca

SEQ ID NO: 2200 - RNA, 20 nt, synthetic construct
  source 1..20: mol_type = other RNA
aggtgctcagagacagacac

SEQ ID NO: 2201 - RNA, 20 nt, synthetic construct
  source 1..20: mol_type = other RNA
tgtgtctgtctctgagcacc

SEQ ID NO: 2202 - RNA, 20 nt, synthetic construct
  source 1..20: mol_type = other RNA
cacgccccccacttgctccc

SEQ ID NO: 2203 - RNA, 20 nt, synthetic construct
  source 1..20: mol_type = other RNA
cccacttgctccccggagcg

SEQ ID NO: 2204 - RNA, 20 nt, synthetic construct
  source 1..20: mol_type = other RNA
cgctccggggagcaagtggg

SEQ ID NO: 2205 - RNA, 20 nt, synthetic construct
  source 1..20: mol_type = other RNA
tcgctccggggagcaagtgg

SEQ ID NO: 2206 - RNA, 20 nt, synthetic construct
  source 1..20: mol_type = other RNA
ctcgctccggggagcaagtg

SEQ ID NO: 2207 - RNA, 20 nt, synthetic construct
  source 1..20: mol_type = other RNA
cctcgctccggggagcaagt

SEQ ID NO: 2208 - RNA, 20 nt, synthetic construct
  source 1..20: mol_type = other RNA
tcctcgctccggggagcaag

SEQ ID NO: 2209 - RNA, 20 nt, synthetic construct
  source 1..20: mol_type = other RNA
ggagactggtcctcgctccg

SEQ ID NO: 2210 - RNA, 20 nt, synthetic construct
  source 1..20: mol_type = other RNA
tggagactggtcctcgctcc

SEQ ID NO: 2211 - RNA, 20 nt, synthetic construct
  source 1..20: mol_type = other RNA
ttggagactggtcctcgctc

SEQ ID NO: 2212 - RNA, 20 nt, synthetic construct
  source 1..20: mol_type = other RNA
gttgctctgagtttggagac

SEQ ID NO: 2213 - RNA, 20 nt, synthetic construct
  source 1..20: mol_type = other RNA
caataaagttgctctgagtt

SEQ ID NO: 2214 - RNA, 20 nt, synthetic construct
  source 1..20: mol_type = other RNA
gagcaactttattgtcagcg

SEQ ID NO: 2215 - RNA, 20 nt, synthetic construct
  source 1..20: mol_type = other RNA
agcaactttattgtcagcgt

SEQ ID NO: 2216 - RNA, 20 nt, synthetic construct
  source 1..20: mol_type = other RNA
aactttattgtcagcgtggg

SEQ ID NO: 2217 - RNA, 20 nt, synthetic construct
  source 1..20: mol_type = other RNA
tgtcagcgtgggcggagcgt

SEQ ID NO: 2218 - RNA, 20 nt, synthetic construct
  source 1..20: mol_type = other RNA
gtcagcgtgggcggagcgtt

SEQ ID NO: 2219 - RNA, 20 nt, synthetic construct
  source 1..20: mol_type = other RNA
agcgtgggcggagcgttggg

SEQ ID NO: 2220 - RNA, 20 nt, synthetic construct
  source 1..20: mol_type = other RNA
aggcacctcagtcatgatac

SEQ ID NO: 2221 - RNA, 20 nt, synthetic construct
  source 1..20: mol_type = other RNA
ctcagtcatgatacaggcgc

SEQ ID NO: 2222 - RNA, 20 nt, synthetic construct
  source 1..20: mol_type = other RNA
agtcatgatacaggcgcagg

SEQ ID NO: 2223 - RNA, 20 nt, synthetic construct
  source 1..20: mol_type = other RNA
ctgcgcctgtatcatgactg

SEQ ID NO: 2224 - RNA, 20 nt, synthetic construct
  source 1..20: mol_type = other RNA
acaggcgcaggaggcagccg

SEQ ID NO: 2225 - RNA, 20 nt, synthetic construct
  source 1..20: mol_type = other RNA
ggcgcaggaggcagccgcgg

SEQ ID NO: 2226 - RNA, 20 nt, synthetic construct
  source 1..20: mol_type = other RNA
gcgcaggaggcagccgcgga

SEQ ID NO: 2227 - RNA, 20 nt, synthetic construct
  source 1..20: mol_type = other RNA
cgcggagggtgcccatgtag

SEQ ID NO: 2228 - RNA, 20 nt, synthetic construct
  source 1..20: mol_type = other RNA
cgctacatgggcaccctccg

SEQ ID NO: 2229 - RNA, 20 nt, synthetic construct
  source 1..20: mol_type = other RNA
tgcccatgtagcggtcccag

SEQ ID NO: 2230 - RNA, 20 nt, synthetic construct
  source 1..20: mol_type = other RNA
gcccatgtagcggtcccaga

SEQ ID NO: 2231 - RNA, 20 nt, synthetic construct
  source 1..20: mol_type = other RNA
tgtagcggtcccagagggcc

SEQ ID NO: 2232 - RNA, 20 nt, synthetic construct
  source 1..20: mol_type = other RNA
gccctctgggaccgctacat

SEQ ID NO: 2233 - RNA, 20 nt, synthetic construct
  source 1..20: mol_type = other RNA
ggccctctgggaccgctaca

SEQ ID NO: 2234 - RNA, 20 nt, synthetic construct
  source 1..20: mol_type = other RNA
ttacagacaccaggccctct

SEQ ID NO: 2235 - RNA, 20 nt, synthetic construct
  source 1..20: mol_type = other RNA
cttacagacaccaggccctc

SEQ ID NO: 2236 - RNA, 20 nt, synthetic construct
  source 1..20: mol_type = other RNA
ttcatgttcttacagacacc

SEQ ID NO: 2237 - RNA, 20 nt, synthetic construct
  source 1..20: mol_type = other RNA
aggaggacagggctgctcac

SEQ ID NO: 2238 - RNA, 20 nt, synthetic construct
  source 1..20: mol_type = other RNA
ctgctcaccggaagccatcg

SEQ ID NO: 2239 - RNA, 20 nt, synthetic construct
  source 1..20: mol_type = other RNA
tgctcaccggaagccatcga

SEQ ID NO: 2240 - RNA, 20 nt, synthetic construct
  source 1..20: mol_type = other RNA
accggaagccatcgagggag

SEQ ID NO: 2241 - RNA, 20 nt, synthetic construct
  source 1..20: mol_type = other RNA
tccactccctcgatggcttc

SEQ ID NO: 2242 - RNA, 20 nt, synthetic construct
  source 1..20: mol_type = other RNA
gcgtctgtccactccctcga

SEQ ID NO: 2243 - RNA, 20 nt, synthetic construct
  source 1..20: mol_type = other RNA
cagacgctgaatactgattc

SEQ ID NO: 2244 - RNA, 20 nt, synthetic construct
  source 1..20: mol_type = other RNA
aagaaccgcacgtcgctgag

SEQ ID NO: 2245 - RNA, 20 nt, synthetic construct
  source 1..20: mol_type = other RNA
gcacgtcgctgagtggccag

SEQ ID NO: 2246 - RNA, 20 nt, synthetic construct
  source 1..20: mol_type = other RNA
actggccactcagcgacgtg

SEQ ID NO: 2247 - RNA, 20 nt, synthetic construct
  source 1..20: mol_type = other RNA
gtcgctgagtggccagtggt

SEQ ID NO: 2248 - RNA, 20 nt, synthetic construct
  source 1..20: mol_type = other RNA
tgagtggccagtggtcggag

SEQ ID NO: 2249 - RNA, 20 nt, synthetic construct
  source 1..20: mol_type = other RNA
tggccagtggtcggagcggc

SEQ ID NO: 2250 - RNA, 20 nt, synthetic construct
  source 1..20: mol_type = other RNA
ggccagtggtcggagcggca

SEQ ID NO: 2251 - RNA, 20 nt, synthetic construct
  source 1..20: mol_type = other RNA
aaccctgccgctccgaccac

SEQ ID NO: 2252 - RNA, 20 nt, synthetic construct
  source 1..20: mol_type = other RNA
cggcagggttccacaaactg

SEQ ID NO: 2253 - RNA, 20 nt, synthetic construct
  source 1..20: mol_type = other RNA
ggcagggttccacaaactgc

SEQ ID NO: 2254 - RNA, 20 nt, synthetic construct
  source 1..20: mol_type = other RNA
tctcttgggcccgcagtttg

SEQ ID NO: 2255 - RNA, 20 nt, synthetic construct
  source 1..20: mol_type = other RNA
gacagctcaccttctccacg

SEQ ID NO: 2256 - RNA, 20 nt, synthetic construct
  source 1..20: mol_type = other RNA
tctccacgaggtccacaaac

SEQ ID NO: 2257 - RNA, 20 nt, synthetic construct
  source 1..20: mol_type = other RNA
gtttgtggacctcgtggaga

SEQ ID NO: 2258 - RNA, 20 nt, synthetic construct
  source 1..20: mol_type = other RNA
agacctgtttgtggacctcg

SEQ ID NO: 2259 - RNA, 20 nt, synthetic construct
  source 1..20: mol_type = other RNA
agatgtcagagacctgtttg

SEQ ID NO: 2260 - RNA, 20 nt, synthetic construct
  source 1..20: mol_type = other RNA
ggtctctgacatctttattg

SEQ ID NO: 2261 - RNA, 20 nt, synthetic construct
  source 1..20: mol_type = other RNA
gtctctgacatctttattgt

SEQ ID NO: 2262 - RNA, 20 nt, synthetic construct
  source 1..20: mol_type = other RNA
atctttattgtgggtcagct

SEQ ID NO: 2263 - RNA, 20 nt, synthetic construct
  source 1..20: mol_type = other RNA
tttattgtgggtcagcttgg

SEQ ID NO: 2264 - RNA, 20 nt, synthetic construct
  source 1..20: mol_type = other RNA
cggccacgttcaccagcccc

SEQ ID NO: 2265 - RNA, 20 nt, synthetic construct
  source 1..20: mol_type = other RNA
ggccacgttcaccagccccc

SEQ ID NO: 2266 - RNA, 20 nt, synthetic construct
  source 1..20: mol_type = other RNA
cgttcaccagcccccgggac

SEQ ID NO: 2267 - RNA, 20 nt, synthetic construct
  source 1..20: mol_type = other RNA
gtcccgggggctggtgaacg

SEQ ID NO: 2268 - RNA, 20 nt, synthetic construct
  source 1..20: mol_type = other RNA
agcccccgggacaggttctg

SEQ ID NO: 2269 - RNA, 20 nt, synthetic construct
  source 1..20: mol_type = other RNA
gcccccgggacaggttctgt

SEQ ID NO: 2270 - RNA, 20 nt, synthetic construct
  source 1..20: mol_type = other RNA
cccccgggacaggttctgtg

SEQ ID NO: 2271 - RNA, 20 nt, synthetic construct
  source 1..20: mol_type = other RNA
acagaacctgtcccgggggc

SEQ ID NO: 2272 - RNA, 20 nt, synthetic construct
  source 1..20: mol_type = other RNA
cgggacaggttctgtggggc

SEQ ID NO: 2273 - RNA, 20 nt, synthetic construct
  source 1..20: mol_type = other RNA
gggacaggttctgtggggca

SEQ ID NO: 2274 - RNA, 20 nt, synthetic construct
  source 1..20: mol_type = other RNA
gccccacagaacctgtcccg

SEQ ID NO: 2275 - RNA, 20 nt, synthetic construct
  source 1..20: mol_type = other RNA
tgccccacagaacctgtccc

SEQ ID NO: 2276 - RNA, 20 nt, synthetic construct
  source 1..20: mol_type = other RNA
ctgccccacagaacctgtcc

SEQ ID NO: 2277 - RNA, 20 nt, synthetic construct
  source 1..20: mol_type = other RNA
ttctgtggggcagggatcct

SEQ ID NO: 2278 - RNA, 20 nt, synthetic construct
  source 1..20: mol_type = other RNA
gggaccacagaccttgaagt

SEQ ID NO: 2279 - RNA, 20 nt, synthetic construct
  source 1..20: mol_type = other RNA
gaagccaacttcaaggtctg

SEQ ID NO: 2280 - RNA, 20 nt, synthetic construct
  source 1..20: mol_type = other RNA
tgagatggaagccaacttca

SEQ ID NO: 2281 - RNA, 20 nt, synthetic construct
  source 1..20: mol_type = other RNA
gctgggcgtcttctctgaga

SEQ ID NO: 2282 - RNA, 20 nt, synthetic construct
  source 1..20: mol_type = other RNA
agaagacgcccagctttccc

SEQ ID NO: 2283 - RNA, 20 nt, synthetic construct
  source 1..20: mol_type = other RNA
actgctctccggggaaagct

SEQ ID NO: 2284 - RNA, 20 nt, synthetic construct
  source 1..20: mol_type = other RNA
cactgctctccggggaaagc

SEQ ID NO: 2285 - RNA, 20 nt, synthetic construct
  source 1..20: mol_type = other RNA
cccggagagcagtgcacacc

SEQ ID NO: 2286 - RNA, 20 nt, synthetic construct
  source 1..20: mol_type = other RNA
ctggtgtgcactgctctccg

SEQ ID NO: 2287 - RNA, 20 nt, synthetic construct
  source 1..20: mol_type = other RNA
cctggtgtgcactgctctcc

SEQ ID NO: 2288 - RNA, 20 nt, synthetic construct
  source 1..20: mol_type = other RNA
gcctggtgtgcactgctctc

SEQ ID NO: 2289 - RNA, 20 nt, synthetic construct
  source 1..20: mol_type = other RNA
acaccaggctgcagagagac

SEQ ID NO: 2290 - RNA, 20 nt, synthetic construct
  source 1..20: mol_type = other RNA
caccaggctgcagagagaca

SEQ ID NO: 2291 - RNA, 20 nt, synthetic construct
  source 1..20: mol_type = other RNA
gaccctgtctctctgcagcc

SEQ ID NO: 2292 - RNA, 20 nt, synthetic construct
  source 1..20: mol_type = other RNA
ccttgtaggggcccatgggg

SEQ ID NO: 2293 - RNA, 20 nt, synthetic construct
  source 1..20: mol_type = other RNA
tgaccttgtaggggcccatg

SEQ ID NO: 2294 - RNA, 20 nt, synthetic construct
  source 1..20: mol_type = other RNA
gtgaccttgtaggggcccat

SEQ ID NO: 2295 - RNA, 20 nt, synthetic construct
  source 1..20: mol_type = other RNA
ggtgaccttgtaggggccca

SEQ ID NO: 2296 - RNA, 20 nt, synthetic construct
  source 1..20: mol_type = other RNA
tacaaggtcacctcttgtgc

SEQ ID NO: 2297 - RNA, 20 nt, synthetic construct
  source 1..20: mol_type = other RNA
cacaagaggtgaccttgtag

SEQ ID NO: 2298 - RNA, 20 nt, synthetic construct
  source 1..20: mol_type = other RNA
gcacaagaggtgaccttgta

SEQ ID NO: 2299 - RNA, 20 nt, synthetic construct
  source 1..20: mol_type = other RNA
tgcacaagaggtgaccttgt

SEQ ID NO: 2300 - RNA, 20 nt, synthetic construct
  source 1..20: mol_type = other RNA
acctcttgtgcaggtccaga

SEQ ID NO: 2301 - RNA, 20 nt, synthetic construct
  source 1..20: mol_type = other RNA
accttctggacctgcacaag

SEQ ID NO: 2302 - RNA, 20 nt, synthetic construct
  source 1..20: mol_type = other RNA
agtggctgacaaggaccttc

SEQ ID NO: 2303 - RNA, 20 nt, synthetic construct
  source 1..20: mol_type = other RNA
caaggtgctagtggctgaca

SEQ ID NO: 2304 - RNA, 20 nt, synthetic construct
  source 1..20: mol_type = other RNA
gaaggagctcaaggtgctag

SEQ ID NO: 2305 - RNA, 20 nt, synthetic construct
  source 1..20: mol_type = other RNA
ccttgagctccttcaagtcc

SEQ ID NO: 2306 - RNA, 20 nt, synthetic construct
  source 1..20: mol_type = other RNA
ccaggacttgaaggagctca

SEQ ID NO: 2307 - RNA, 20 nt, synthetic construct
  source 1..20: mol_type = other RNA
ggaatttctccaggacttga

SEQ ID NO: 2308 - RNA, 20 nt, synthetic construct
  source 1..20: mol_type = other RNA
cttagacaaggaatttctcc

SEQ ID NO: 2309 - RNA, 20 nt, synthetic construct
  source 1..20: mol_type = other RNA
catggacatggacttagaca

SEQ ID NO: 2310 - RNA, 20 nt, synthetic construct
  source 1..20: mol_type = other RNA
acagatggatgacatggaca

SEQ ID NO: 2311 - RNA, 20 nt, synthetic construct
  source 1..20: mol_type = other RNA
agactcacagatggatgaca

SEQ ID NO: 2312 - RNA, 20 nt, synthetic construct
  source 1..20: mol_type = other RNA
catccatctgtgagtctgtg

SEQ ID NO: 2313 - RNA, 20 nt, synthetic construct
  source 1..20: mol_type = other RNA
tggcctcacagactcacaga

SEQ ID NO: 2314 - RNA, 20 nt, synthetic construct
  source 1..20: mol_type = other RNA
gtgagtctgtgaggccatga

SEQ ID NO: 2315 - RNA, 20 nt, synthetic construct
  source 1..20: mol_type = other RNA
tgagtctgtgaggccatgaa

SEQ ID NO: 2316 - RNA, 20 nt, synthetic construct
  source 1..20: mol_type = other RNA
gagtctgtgaggccatgaag

SEQ ID NO: 2317 - RNA, 20 nt, synthetic construct
  source 1..20: mol_type = other RNA
agtctgtgaggccatgaagg

SEQ ID NO: 2318 - RNA, 20 nt, synthetic construct
  source 1..20: mol_type = other RNA
ctgtgaggccatgaaggggg

SEQ ID NO: 2319 - RNA, 20 nt, synthetic construct
  source 1..20: mol_type = other RNA
tgtgaggccatgaagggggt

SEQ ID NO: 2320 - RNA, 20 nt, synthetic construct
  source 1..20: mol_type = other RNA
gtgaggccatgaagggggtg

SEQ ID NO: 2321 - RNA, 20 nt, synthetic construct
  source 1..20: mol_type = other RNA
tgaggccatgaagggggtgg

SEQ ID NO: 2322 - RNA, 20 nt, synthetic construct
  source 1..20: mol_type = other RNA
ctggacgcctccccatcctc

SEQ ID NO: 2323 - RNA, 20 nt, synthetic construct
  source 1..20: mol_type = other RNA
tggggaggcgtccaggcacc

SEQ ID NO: 2324 - RNA, 20 nt, synthetic construct
  source 1..20: mol_type = other RNA
ggggaggcgtccaggcacct

SEQ ID NO: 2325 - RNA, 20 nt, synthetic construct
  source 1..20: mol_type = other RNA
cgtccaggcacctgggtcag

SEQ ID NO: 2326 - RNA, 20 nt, synthetic construct
  source 1..20: mol_type = other RNA
gtccaggcacctgggtcagt

SEQ ID NO: 2327 - RNA, 20 nt, synthetic construct
  source 1..20: mol_type = other RNA
tccaggcacctgggtcagtg

SEQ ID NO: 2328 - RNA, 20 nt, synthetic construct
  source 1..20: mol_type = other RNA
ccaggcacctgggtcagtgg

SEQ ID NO: 2329 - RNA, 20 nt, synthetic construct
  source 1..20: mol_type = other RNA
cccccactgacccaggtgcc

SEQ ID NO: 2330 - RNA, 20 nt, synthetic construct
  source 1..20: mol_type = other RNA
gtcagtgggggcctcaccga

SEQ ID NO: 2331 - RNA, 20 nt, synthetic construct
  source 1..20: mol_type = other RNA
gggcctcaccgacggctcca

SEQ ID NO: 2332 - RNA, 20 nt, synthetic construct
  source 1..20: mol_type = other RNA
ggcctcaccgacggctccaa

SEQ ID NO: 2333 - RNA, 20 nt, synthetic construct
  source 1..20: mol_type = other RNA
gacccttggagccgtcggtg

SEQ ID NO: 2334 - RNA, 20 nt, synthetic construct
  source 1..20: mol_type = other RNA
cggctccaagggtccagttt

SEQ ID NO: 2335 - RNA, 20 nt, synthetic construct
  source 1..20: mol_type = other RNA
aactggacccttggagccgt

SEQ ID NO: 2336 - RNA, 20 nt, synthetic construct
  source 1..20: mol_type = other RNA
atgatccaaaactggaccct

SEQ ID NO: 2337 - RNA, 20 nt, synthetic construct
  source 1..20: mol_type = other RNA
ctgagctcatgatccaaaac

SEQ ID NO: 2338 - RNA, 20 nt, synthetic construct
  source 1..20: mol_type = other RNA
gatcatgagctcagcgcaga

SEQ ID NO: 2339 - RNA, 20 nt, synthetic construct
  source 1..20: mol_type = other RNA
aaactgcagtatctgagctt

SEQ ID NO: 2340 - RNA, 20 nt, synthetic construct
  source 1..20: mol_type = other RNA
ttttcttccctgtctcaaag

SEQ ID NO: 2341 - RNA, 20 nt, synthetic construct
  source 1..20: mol_type = other RNA
ctaacaaccgctttgagaca

SEQ ID NO: 2342 - RNA, 20 nt, synthetic construct
  source 1..20: mol_type = other RNA
gctaacaaccgctttgagac

SEQ ID NO: 2343 - RNA, 20 nt, synthetic construct
  source 1..20: mol_type = other RNA
gttgttagcaaagaagacga

SEQ ID NO: 2344 - RNA, 20 nt, synthetic construct
  source 1..20: mol_type = other RNA
atagtccctgcacagacgag

SEQ ID NO: 2345 - RNA, 20 nt, synthetic construct
  source 1..20: mol_type = other RNA
gtccctgcacagacgagagg

SEQ ID NO: 2346 - RNA, 20 nt, synthetic construct
  source 1..20: mol_type = other RNA
tccctgcacagacgagagga

SEQ ID NO: 2347 - RNA, 20 nt, synthetic construct
  source 1..20: mol_type = other RNA
accctcctctcgtctgtgca

SEQ ID NO: 2348 - RNA, 20 nt, synthetic construct
  source 1..20: mol_type = other RNA
gaccctcctctcgtctgtgc

SEQ ID NO: 2349 - RNA, 20 nt, synthetic construct
  source 1..20: mol_type = other RNA
gaggtggctagctcctcacc

SEQ ID NO: 2350 - RNA, 20 nt, synthetic construct
  source 1..20: mol_type = other RNA
tagctcctcacctggccaac

SEQ ID NO: 2351 - RNA, 20 nt, synthetic construct
  source 1..20: mol_type = other RNA
acctggccaaccggtcagag

SEQ ID NO: 2352 - RNA, 20 nt, synthetic construct
  source 1..20: mol_type = other RNA
tctgaccggttggccaggtg

SEQ ID NO: 2353 - RNA, 20 nt, synthetic construct
  source 1..20: mol_type = other RNA
tggccaaccggtcagagagg

SEQ ID NO: 2354 - RNA, 20 nt, synthetic construct
  source 1..20: mol_type = other RNA
tcctctctgaccggttggcc

SEQ ID NO: 2355 - RNA, 20 nt, synthetic construct
  source 1..20: mol_type = other RNA
cttcctcctctctgaccggt

SEQ ID NO: 2356 - RNA, 20 nt, synthetic construct
  source 1..20: mol_type = other RNA
aacacttcctcctctctgac

SEQ ID NO: 2357 - RNA, 20 nt, synthetic construct
  source 1..20: mol_type = other RNA
gttgctgaatattgtccacc

SEQ ID NO: 2358 - RNA, 20 nt, synthetic construct
  source 1..20: mol_type = other RNA
ttgctgaatattgtccacca

SEQ ID NO: 2359 - RNA, 20 nt, synthetic construct
  source 1..20: mol_type = other RNA
ggaaatgcggggctccctgg

SEQ ID NO: 2360 - RNA, 20 nt, synthetic construct
  source 1..20: mol_type = other RNA
agaggaaatgcggggctccc

SEQ ID NO: 2361 - RNA, 20 nt, synthetic construct
  source 1..20: mol_type = other RNA
aaggtggtagaggaaatgcg

SEQ ID NO: 2362 - RNA, 20 nt, synthetic construct
  source 1..20: mol_type = other RNA
caaggtggtagaggaaatgc

SEQ ID NO: 2363 - RNA, 20 nt, synthetic construct
  source 1..20: mol_type = other RNA
tcaaggtggtagaggaaatg

SEQ ID NO: 2364 - RNA, 20 nt, synthetic construct
  source 1..20: mol_type = other RNA
acgggtcttcaaggtggtag

SEQ ID NO: 2365 - RNA, 20 nt, synthetic construct
  source 1..20: mol_type = other RNA
ctttaaacgggtcttcaagg

SEQ ID NO: 2366 - RNA, 20 nt, synthetic construct
  source 1..20: mol_type = other RNA
caactttaaacgggtcttca

SEQ ID NO: 2367 - RNA, 20 nt, synthetic construct
  source 1..20: mol_type = other RNA
gtttaaagttgtcaaactgc

SEQ ID NO: 2368 - RNA, 20 nt, synthetic construct
  source 1..20: mol_type = other RNA
tttaaagttgtcaaactgca

SEQ ID NO: 2369 - RNA, 20 nt, synthetic construct
  source 1..20: mol_type = other RNA
gcagtttgacaactttaaac

SEQ ID NO: 2370 - RNA, 20 nt, synthetic construct
  source 1..20: mol_type = other RNA
tgcagtttgacaactttaaa

SEQ ID NO: 2371 - RNA, 20 nt, synthetic construct
  source 1..20: mol_type = other RNA
tgtcaaactgcagggcagtt

SEQ ID NO: 2372 - RNA, 20 nt, synthetic construct
  source 1..20: mol_type = other RNA
gtcaaactgcagggcagtta

SEQ ID NO: 2373 - RNA, 20 nt, synthetic construct
  source 1..20: mol_type = other RNA
aggtatgcactgcatccaca

SEQ ID NO: 2374 - RNA, 20 nt, synthetic construct
  source 1..20: mol_type = other RNA
atgcagtgcatacctgtctc

SEQ ID NO: 2375 - RNA, 20 nt, synthetic construct
  source 1..20: mol_type = other RNA
cctgtctccggcagctcttg

SEQ ID NO: 2376 - RNA, 20 nt, synthetic construct
  source 1..20: mol_type = other RNA
ctgtctccggcagctcttga

SEQ ID NO: 2377 - RNA, 20 nt, synthetic construct
  source 1..20: mol_type = other RNA
cctcaagagctgccggagac

SEQ ID NO: 2378 - RNA, 20 nt, synthetic construct
  source 1..20: mol_type = other RNA
gcatcaccctcaagagctgc

SEQ ID NO: 2379 - RNA, 20 nt, synthetic construct
  source 1..20: mol_type = other RNA
cttgagggtgatgcctgttt

SEQ ID NO: 2380 - RNA, 20 nt, synthetic construct
  source 1..20: mol_type = other RNA
ttttggtgctgatgtcatcc

SEQ ID NO: 2381 - RNA, 20 nt, synthetic construct
  source 1..20: mol_type = other RNA
gatgacatcagcaccaaaac

SEQ ID NO: 2382 - RNA, 20 nt, synthetic construct
  source 1..20: mol_type = other RNA
gatgtcatccaggtctttct

SEQ ID NO: 2383 - RNA, 20 nt, synthetic construct
  source 1..20: mol_type = other RNA
caggtctttcttggtgcctt

SEQ ID NO: 2384 - RNA, 20 nt, synthetic construct
  source 1..20: mol_type = other RNA
caaaggcaccaagaaagacc

SEQ ID NO: 2385 - RNA, 20 nt, synthetic construct
  source 1..20: mol_type = other RNA
ctgggcaagaagctgtccaa

SEQ ID NO: 2386 - RNA, 20 nt, synthetic construct
  source 1..20: mol_type = other RNA
gcccagcacctcccgaacaa

SEQ ID NO: 2387 - RNA, 20 nt, synthetic construct
  source 1..20: mol_type = other RNA
gcctttgttcgggaggtgct

SEQ ID NO: 2388 - RNA, 20 nt, synthetic construct
  source 1..20: mol_type = other RNA
ggcctttgttcgggaggtgc

SEQ ID NO: 2389 - RNA, 20 nt, synthetic construct
  source 1..20: mol_type = other RNA
ccgaacaaaggcctcatcaa

SEQ ID NO: 2390 - RNA, 20 nt, synthetic construct
  source 1..20: mol_type = other RNA
tgatgaggcctttgttcggg

SEQ ID NO: 2391 - RNA, 20 nt, synthetic construct
  source 1..20: mol_type = other RNA
ctttgatgaggcctttgttc

SEQ ID NO: 2392 - RNA, 20 nt, synthetic construct
  source 1..20: mol_type = other RNA
cctttgatgaggcctttgtt

SEQ ID NO: 2393 - RNA, 20 nt, synthetic construct
  source 1..20: mol_type = other RNA
atcaaaggcatagtaccttg

SEQ ID NO: 2394 - RNA, 20 nt, synthetic construct
  source 1..20: mol_type = other RNA
aaggtactatgcctttgatg

SEQ ID NO: 2395 - RNA, 20 nt, synthetic construct
  source 1..20: mol_type = other RNA
tggtgttctctgactccaca

SEQ ID NO: 2396 - RNA, 20 nt, synthetic construct
  source 1..20: mol_type = other RNA
gtgctcaccctctgggatgg

SEQ ID NO: 2397 - RNA, 20 nt, synthetic construct
  source 1..20: mol_type = other RNA
gaggtgctcaccctctggga

SEQ ID NO: 2398 - RNA, 20 nt, synthetic construct
  source 1..20: mol_type = other RNA
tcgagaggtgctcaccctct

SEQ ID NO: 2399 - RNA, 20 nt, synthetic construct
  source 1..20: mol_type = other RNA
atcgagaggtgctcaccctc

SEQ ID NO: 2400 - RNA, 20 nt, synthetic construct
  source 1..20: mol_type = other RNA
tctcgatgagtagtgcctgc

SEQ ID NO: 2401 - RNA, 20 nt, synthetic construct
  source 1..20: mol_type = other RNA
ctcgatgagtagtgcctgcc

SEQ ID NO: 2402 - RNA, 20 nt, synthetic construct
  source 1..20: mol_type = other RNA
ggcaggcactactcatcgag

SEQ ID NO: 2403 - RNA, 20 nt, synthetic construct
  source 1..20: mol_type = other RNA
gatgagtagtgcctgccggg

SEQ ID NO: 2404 - RNA, 20 nt, synthetic construct
  source 1..20: mol_type = other RNA
atgagtagtgcctgccggga

SEQ ID NO: 2405 - RNA, 20 nt, synthetic construct
  source 1..20: mol_type = other RNA
agtagtgcctgccgggaggg

SEQ ID NO: 2406 - RNA, 20 nt, synthetic construct
  source 1..20: mol_type = other RNA
cctgccgggagggcggaatc

SEQ ID NO: 2407 - RNA, 20 nt, synthetic construct
  source 1..20: mol_type = other RNA
ccagattccgccctcccggc

SEQ ID NO: 2408 - RNA, 20 nt, synthetic construct
  source 1..20: mol_type = other RNA
tcttccagattccgccctcc

SEQ ID NO: 2409 - RNA, 20 nt, synthetic construct
  source 1..20: mol_type = other RNA
gcggaatctggaagatgagc

SEQ ID NO: 2410 - RNA, 20 nt, synthetic construct
  source 1..20: mol_type = other RNA
gatgagctggtgcagtagct

SEQ ID NO: 2411 - RNA, 20 nt, synthetic construct
  source 1..20: mol_type = other RNA
atgagctggtgcagtagctt

SEQ ID NO: 2412 - RNA, 20 nt, synthetic construct
  source 1..20: mol_type = other RNA
agctggtgcagtagcttggg

SEQ ID NO: 2413 - RNA, 20 nt, synthetic construct
  source 1..20: mol_type = other RNA
gcagcagccgctcgagcatg

SEQ ID NO: 2414 - RNA, 20 nt, synthetic construct
  source 1..20: mol_type = other RNA
cagccgctcgagcatgtgga

SEQ ID NO: 2415 - RNA, 20 nt, synthetic construct
  source 1..20: mol_type = other RNA
gctcgagcatgtggaaggtg

SEQ ID NO: 2416 - RNA, 20 nt, synthetic construct
  source 1..20: mol_type = other RNA
gcaccttccacatgctcgag

SEQ ID NO: 2417 - RNA, 20 nt, synthetic construct
  source 1..20: mol_type = other RNA
gcatgtggaaggtgcggtaa

SEQ ID NO: 2418 - RNA, 20 nt, synthetic construct
  source 1..20: mol_type = other RNA
gaaggtgcggtaatggtcca

SEQ ID NO: 2419 - RNA, 20 nt, synthetic construct
  source 1..20: mol_type = other RNA
ggtgctgcagagcgacacca

SEQ ID NO: 2420 - RNA, 20 nt, synthetic construct
  source 1..20: mol_type = other RNA
gctctgcagcaccgctgccg

SEQ ID NO: 2421 - RNA, 20 nt, synthetic construct
  source 1..20: mol_type = other RNA
gcagactggcgccacggcag

SEQ ID NO: 2422 - RNA, 20 nt, synthetic construct
  source 1..20: mol_type = other RNA
ccgtggcgccagtctgctcc

SEQ ID NO: 2423 - RNA, 20 nt, synthetic construct
  source 1..20: mol_type = other RNA
cctggagcagactggcgcca

SEQ ID NO: 2424 - RNA, 20 nt, synthetic construct
  source 1..20: mol_type = other RNA
tcgggaatcctggagcagac

SEQ ID NO: 2425 - RNA, 20 nt, synthetic construct
  source 1..20: mol_type = other RNA
ggattcccgagcgcacccgc

SEQ ID NO: 2426 - RNA, 20 nt, synthetic construct
  source 1..20: mol_type = other RNA
gattcccgagcgcacccgca

SEQ ID NO: 2427 - RNA, 20 nt, synthetic construct
  source 1..20: mol_type = other RNA
gcgggtgcgctcgggaatcc

SEQ ID NO: 2428 - RNA, 20 nt, synthetic construct
  source 1..20: mol_type = other RNA
gtggccctgcgggtgcgctc

SEQ ID NO: 2429 - RNA, 20 nt, synthetic construct
  source 1..20: mol_type = other RNA
ggtggccctgcgggtgcgct

SEQ ID NO: 2430 - RNA, 20 nt, synthetic construct
  source 1..20: mol_type = other RNA
cacccgcagggccaccgcgt

SEQ ID NO: 2431 - RNA, 20 nt, synthetic construct
  source 1..20: mol_type = other RNA
agggccaccgcgtcggtcac

SEQ ID NO: 2432 - RNA, 20 nt, synthetic construct
  source 1..20: mol_type = other RNA
tgaccgacgcggtggccctg

SEQ ID NO: 2433 - RNA, 20 nt, synthetic construct
  source 1..20: mol_type = other RNA
ccgcgtcggtcactggaaag

SEQ ID NO: 2434 - RNA, 20 nt, synthetic construct
  source 1..20: mol_type = other RNA
ctttccagtgaccgacgcgg

SEQ ID NO: 2435 - RNA, 20 nt, synthetic construct
  source 1..20: mol_type = other RNA
ccgctttccagtgaccgacg

SEQ ID NO: 2436 - RNA, 20 nt, synthetic construct
  source 1..20: mol_type = other RNA
ggaaagcggacgctagcatc

SEQ ID NO: 2437 - RNA, 20 nt, synthetic construct
  source 1..20: mol_type = other RNA
gggtccgtgaggggcgtgtg

SEQ ID NO: 2438 - RNA, 20 nt, synthetic construct
  source 1..20: mol_type = other RNA
cgggtccgtgaggggcgtgt

SEQ ID NO: 2439 - RNA, 20 nt, synthetic construct
  source 1..20: mol_type = other RNA
tcgggtccgtgaggggcgtg

SEQ ID NO: 2440 - RNA, 20 nt, synthetic construct
  source 1..20: mol_type = other RNA
tggttactcgggtccgtgag

SEQ ID NO: 2441 - RNA, 20 nt, synthetic construct
  source 1..20: mol_type = other RNA
atggttactcgggtccgtga

SEQ ID NO: 2442 - RNA, 20 nt, synthetic construct
  source 1..20: mol_type = other RNA
gatggttactcgggtccgtg

SEQ ID NO: 2443 - RNA, 20 nt, synthetic construct
  source 1..20: mol_type = other RNA
ccgagtaaccatcgagccag

SEQ ID NO: 2444 - RNA, 20 nt, synthetic construct
  source 1..20: mol_type = other RNA
ctctggctcgatggttactc

SEQ ID NO: 2445 - RNA, 20 nt, synthetic construct
  source 1..20: mol_type = other RNA
cctctggctcgatggttact

SEQ ID NO: 2446 - RNA, 20 nt, synthetic construct
  source 1..20: mol_type = other RNA
gtgtatcgcctctggctcga

SEQ ID NO: 2447 - RNA, 20 nt, synthetic construct
  source 1..20: mol_type = other RNA
acgaggacgtgtatcgcctc

SEQ ID NO: 2448 - RNA, 20 nt, synthetic construct
  source 1..20: mol_type = other RNA
gatacacgtcctcgtcgata

SEQ ID NO: 2449 - RNA, 20 nt, synthetic construct
  source 1..20: mol_type = other RNA
atacacgtcctcgtcgataa

SEQ ID NO: 2450 - RNA, 20 nt, synthetic construct
  source 1..20: mol_type = other RNA
gaacacgacccttatcgacg

SEQ ID NO: 2451 - RNA, 20 nt, synthetic construct
  source 1..20: mol_type = other RNA
cacgaagatgtccagctcac

SEQ ID NO: 2452 - RNA, 20 nt, synthetic construct
  source 1..20: mol_type = other RNA
gtgagctggacatcttcgtg

SEQ ID NO: 2453 - RNA, 20 nt, synthetic construct
  source 1..20: mol_type = other RNA
agtgagctggacatcttcgt

SEQ ID NO: 2454 - RNA, 20 nt, synthetic construct
  source 1..20: mol_type = other RNA
cagtgagctggacatcttcg

SEQ ID NO: 2455 - RNA, 20 nt, synthetic construct
  source 1..20: mol_type = other RNA
gatgtccagctcactggtca

SEQ ID NO: 2456 - RNA, 20 nt, synthetic construct
  source 1..20: mol_type = other RNA
tcactggtcatggcgacgcc

SEQ ID NO: 2457 - RNA, 20 nt, synthetic construct
  source 1..20: mol_type = other RNA
cactggtcatggcgacgccc

SEQ ID NO: 2458 - RNA, 20 nt, synthetic construct
  source 1..20: mol_type = other RNA
actggtcatggcgacgcccg

SEQ ID NO: 2459 - RNA, 20 nt, synthetic construct
  source 1..20: mol_type = other RNA
ggggccgcagcgccccgagc

SEQ ID NO: 2460 - RNA, 20 nt, synthetic construct
  source 1..20: mol_type = other RNA
gctcggggcgctgcggcccc

SEQ ID NO: 2461 - RNA, 20 nt, synthetic construct
  source 1..20: mol_type = other RNA
tgctcggggcgctgcggccc

SEQ ID NO: 2462 - RNA, 20 nt, synthetic construct
  source 1..20: mol_type = other RNA
cgctcctgctcggggcgctg

SEQ ID NO: 2463 - RNA, 20 nt, synthetic construct
  source 1..20: mol_type = other RNA
gagcaggagcgagcactgct

SEQ ID NO: 2464 - RNA, 20 nt, synthetic construct
  source 1..20: mol_type = other RNA
agcaggagcgagcactgctc

SEQ ID NO: 2465 - RNA, 20 nt, synthetic construct
  source 1..20: mol_type = other RNA
agcagtgctcgctcctgctc

SEQ ID NO: 2466 - RNA, 20 nt, synthetic construct
  source 1..20: mol_type = other RNA
gagcagtgctcgctcctgct

SEQ ID NO: 2467 - RNA, 20 nt, synthetic construct
  source 1..20: mol_type = other RNA
gagcgagcactgctcgggac

SEQ ID NO: 2468 - RNA, 20 nt, synthetic construct
  source 1..20: mol_type = other RNA
gggactggcgcgccgccttc

SEQ ID NO: 2469 - RNA, 20 nt, synthetic construct
  source 1..20: mol_type = other RNA
cgccgccttcaggccacttc

SEQ ID NO: 2470 - RNA, 20 nt, synthetic construct
  source 1..20: mol_type = other RNA
gccgccttcaggccacttcc

SEQ ID NO: 2471 - RNA, 20 nt, synthetic construct
  source 1..20: mol_type = other RNA
tcccggaagtggcctgaagg

SEQ ID NO: 2472 - RNA, 20 nt, synthetic construct
  source 1..20: mol_type = other RNA
cgctcccggaagtggcctga

SEQ ID NO: 2473 - RNA, 20 nt, synthetic construct
  source 1..20: mol_type = other RNA
aatctcggcgctcccggaag

SEQ ID NO: 2474 - RNA, 20 nt, synthetic construct
  source 1..20: mol_type = other RNA
gagcgccgagattccgctcg

SEQ ID NO: 2475 - RNA, 20 nt, synthetic construct
  source 1..20: mol_type = other RNA
gagcggaatctcggcgctcc

SEQ ID NO: 2476 - RNA, 20 nt, synthetic construct
  source 1..20: mol_type = other RNA
cgagattccgctcgcggcat

SEQ ID NO: 2477 - RNA, 20 nt, synthetic construct
  source 1..20: mol_type = other RNA
gagattccgctcgcggcatc

SEQ ID NO: 2478 - RNA, 20 nt, synthetic construct
  source 1..20: mol_type = other RNA
cgatgccgcgagcggaatct

SEQ ID NO: 2479 - RNA, 20 nt, synthetic construct
  source 1..20: mol_type = other RNA
ctgggtcccgatgccgcgag

SEQ ID NO: 2480 - RNA, 20 nt, synthetic construct
  source 1..20: mol_type = other RNA
acccagcttatgaccacttc

SEQ ID NO: 2481 - RNA, 20 nt, synthetic construct
  source 1..20: mol_type = other RNA
cccagcttatgaccacttcc

SEQ ID NO: 2482 - RNA, 20 nt, synthetic construct
  source 1..20: mol_type = other RNA
cccggaagtggtcataagct

SEQ ID NO: 2483 - RNA, 20 nt, synthetic construct
  source 1..20: mol_type = other RNA
tcccggaagtggtcataagc

SEQ ID NO: 2484 - RNA, 20 nt, synthetic construct
  source 1..20: mol_type = other RNA
acttccgggacacagccagt

SEQ ID NO: 2485 - RNA, 20 nt, synthetic construct
  source 1..20: mol_type = other RNA
cttccgggacacagccagtc

SEQ ID NO: 2486 - RNA, 20 nt, synthetic construct
  source 1..20: mol_type = other RNA
ttccgggacacagccagtcg

SEQ ID NO: 2487 - RNA, 20 nt, synthetic construct
  source 1..20: mol_type = other RNA
gactggctgtgtcccggaag

SEQ ID NO: 2488 - RNA, 20 nt, synthetic construct
  source 1..20: mol_type = other RNA
cgggacacagccagtcgggg

SEQ ID NO: 2489 - RNA, 20 nt, synthetic construct
  source 1..20: mol_type = other RNA
gggacacagccagtcgggga

SEQ ID NO: 2490 - RNA, 20 nt, synthetic construct
  source 1..20: mol_type = other RNA
ggacacagccagtcggggag

SEQ ID NO: 2491 - RNA, 20 nt, synthetic construct
  source 1..20: mol_type = other RNA
ctccccgactggctgtgtcc

SEQ ID NO: 2492 - RNA, 20 nt, synthetic construct
  source 1..20: mol_type = other RNA
acagccagtcggggagggga

SEQ ID NO: 2493 - RNA, 20 nt, synthetic construct
  source 1..20: mol_type = other RNA
cagccagtcggggaggggac

SEQ ID NO: 2494 - RNA, 20 nt, synthetic construct
  source 1..20: mol_type = other RNA
agccagtcggggaggggacg

SEQ ID NO: 2495 - RNA, 20 nt, synthetic construct
  source 1..20: mol_type = other RNA
cagtcggggaggggacgggg

SEQ ID NO: 2496 - RNA, 20 nt, synthetic construct
  source 1..20: mol_type = other RNA
agtcggggaggggacggggc

SEQ ID NO: 2497 - RNA, 20 nt, synthetic construct
  source 1..20: mol_type = other RNA
cgccccgtcccctccccgac

SEQ ID NO: 2498 - RNA, 20 nt, synthetic construct
  source 1..20: mol_type = other RNA
gggaggggacggggcgggag

SEQ ID NO: 2499 - RNA, 20 nt, synthetic construct
  source 1..20: mol_type = other RNA
gggacggggcgggagcggcg

SEQ ID NO: 2500 - RNA, 20 nt, synthetic construct
  source 1..20: mol_type = other RNA
ggacggggcgggagcggcga

SEQ ID NO: 2501 - RNA, 20 nt, synthetic construct
  source 1..20: mol_type = other RNA
cgggagcggcgagggaagag

SEQ ID NO: 2502 - RNA, 20 nt, synthetic construct
  source 1..20: mol_type = other RNA
gggagcggcgagggaagaga

SEQ ID NO: 2503 - RNA, 20 nt, synthetic construct
  source 1..20: mol_type = other RNA
ggagcggcgagggaagagag

SEQ ID NO: 2504 - RNA, 20 nt, synthetic construct
  source 1..20: mol_type = other RNA
gagcggcgagggaagagagg

SEQ ID NO: 2505 - RNA, 20 nt, synthetic construct
  source 1..20: mol_type = other RNA
cggcgagggaagagaggggg

SEQ ID NO: 2506 - RNA, 20 nt, synthetic construct
  source 1..20: mol_type = other RNA
aagagagggggaggcctgcg

SEQ ID NO: 2507 - RNA, 20 nt, synthetic construct
  source 1..20: mol_type = other RNA
agagggggaggcctgcgcgg

SEQ ID NO: 2508 - RNA, 20 nt, synthetic construct
  source 1..20: mol_type = other RNA
gaagcggtgctcctccgcgc

SEQ ID NO: 2509 - RNA, 20 nt, synthetic construct
  source 1..20: mol_type = other RNA
ggagcaccgcttcctcccgc

SEQ ID NO: 2510 - RNA, 20 nt, synthetic construct
  source 1..20: mol_type = other RNA
gagcaccgcttcctcccgcc

SEQ ID NO: 2511 - RNA, 20 nt, synthetic construct
  source 1..20: mol_type = other RNA
caccgcttcctcccgccggg

SEQ ID NO: 2512 - RNA, 20 nt, synthetic construct
  source 1..20: mol_type = other RNA
accgcttcctcccgccggga

SEQ ID NO: 2513 - RNA, 20 nt, synthetic construct
  source 1..20: mol_type = other RNA
ccgcttcctcccgccgggag

SEQ ID NO: 2514 - RNA, 20 nt, synthetic construct
  source 1..20: mol_type = other RNA
cgcttcctcccgccgggagg

SEQ ID NO: 2515 - RNA, 20 nt, synthetic construct
  source 1..20: mol_type = other RNA
cccctcccggcgggaggaag

SEQ ID NO: 2516 - RNA, 20 nt, synthetic construct
  source 1..20: mol_type = other RNA
cccgccgggagggggagtcc

SEQ ID NO: 2517 - RNA, 20 nt, synthetic construct
  source 1..20: mol_type = other RNA
ccgccgggagggggagtccc

SEQ ID NO: 2518 - RNA, 20 nt, synthetic construct
  source 1..20: mol_type = other RNA
ggactccccctcccggcggg

SEQ ID NO: 2519 - RNA, 20 nt, synthetic construct
  source 1..20: mol_type = other RNA
ccgggactccccctcccggc

SEQ ID NO: 2520 - RNA, 20 nt, synthetic construct
  source 1..20: mol_type = other RNA
cccgggactccccctcccgg

SEQ ID NO: 2521 - RNA, 20 nt, synthetic construct
  source 1..20: mol_type = other RNA
gagcccgggactccccctcc

SEQ ID NO: 2522 - RNA, 20 nt, synthetic construct
  source 1..20: mol_type = other RNA
gagacaggacgcaggagccc

SEQ ID NO: 2523 - RNA, 20 nt, synthetic construct
  source 1..20: mol_type = other RNA
ggagacaggacgcaggagcc

SEQ ID NO: 2524 - RNA, 20 nt, synthetic construct
  source 1..20: mol_type = other RNA
ctgcgtcctgtctccctccc

SEQ ID NO: 2525 - RNA, 20 nt, synthetic construct
  source 1..20: mol_type = other RNA
cggggagggagacaggacgc

SEQ ID NO: 2526 - RNA, 20 nt, synthetic construct
  source 1..20: mol_type = other RNA
ctccctccccggccgtctgc

SEQ ID NO: 2527 - RNA, 20 nt, synthetic construct
  source 1..20: mol_type = other RNA
ctcctgcagacggccgggga

SEQ ID NO: 2528 - RNA, 20 nt, synthetic construct
  source 1..20: mol_type = other RNA
gctcctgcagacggccgggg

SEQ ID NO: 2529 - RNA, 20 nt, synthetic construct
  source 1..20: mol_type = other RNA
ggccgtctgcaggagcacga

SEQ ID NO: 2530 - RNA, 20 nt, synthetic construct
  source 1..20: mol_type = other RNA
gccgtctgcaggagcacgaa

SEQ ID NO: 2531 - RNA, 20 nt, synthetic construct
  source 1..20: mol_type = other RNA
tcgtgctcctgcagacggcc

SEQ ID NO: 2532 - RNA, 20 nt, synthetic construct
  source 1..20: mol_type = other RNA
ttcgtgctcctgcagacggc

SEQ ID NO: 2533 - RNA, 20 nt, synthetic construct
  source 1..20: mol_type = other RNA
tcccttcgtgctcctgcaga

SEQ ID NO: 2534 - RNA, 20 nt, synthetic construct
  source 1..20: mol_type = other RNA
gtgcctcctcttcgtctcct

SEQ ID NO: 2535 - RNA, 20 nt, synthetic construct
  source 1..20: mol_type = other RNA
ggaccgaggagacgaagagg

SEQ ID NO: 2536 - RNA, 20 nt, synthetic construct
  source 1..20: mol_type = other RNA
cggggaccgaggagacgaag

SEQ ID NO: 2537 - RNA, 20 nt, synthetic construct
  source 1..20: mol_type = other RNA
gggagaagttacggggaccg

SEQ ID NO: 2538 - RNA, 20 nt, synthetic construct
  source 1..20: mol_type = other RNA
aagtgaggggagaagttacg

SEQ ID NO: 2539 - RNA, 20 nt, synthetic construct
  source 1..20: mol_type = other RNA
gaagtgaggggagaagttac

SEQ ID NO: 2540 - RNA, 20 nt, synthetic construct
  source 1..20: mol_type = other RNA
ggaagtgaggggagaagtta

SEQ ID NO: 2541 - RNA, 20 nt, synthetic construct
  source 1..20: mol_type = other RNA
cttctcccctcacttcctcc

SEQ ID NO: 2542 - RNA, 20 nt, synthetic construct
  source 1..20: mol_type = other RNA
aaaagccaggaggaagtgag

SEQ ID NO: 2543 - RNA, 20 nt, synthetic construct
  source 1..20: mol_type = other RNA
gaaaagccaggaggaagtga

SEQ ID NO: 2544 - RNA, 20 nt, synthetic construct
  source 1..20: mol_type = other RNA
agaaaagccaggaggaagtg

SEQ ID NO: 2545 - RNA, 20 nt, synthetic construct
  source 1..20: mol_type = other RNA
aaggtgggagaaaagccagg

SEQ ID NO: 2546 - RNA, 20 nt, synthetic construct
  source 1..20: mol_type = other RNA
gagaaggtgggagaaaagcc

SEQ ID NO: 2547 - RNA, 20 nt, synthetic construct
  source 1..20: mol_type = other RNA
cccaccttctctgccctctt

SEQ ID NO: 2548 - RNA, 20 nt, synthetic construct
  source 1..20: mol_type = other RNA
ccaccttctctgccctcttc

SEQ ID NO: 2549 - RNA, 20 nt, synthetic construct
  source 1..20: mol_type = other RNA
ccgaagagggcagagaaggt

SEQ ID NO: 2550 - RNA, 20 nt, synthetic construct
  source 1..20: mol_type = other RNA
cccgaagagggcagagaagg

SEQ ID NO: 2551 - RNA, 20 nt, synthetic construct
  source 1..20: mol_type = other RNA
ggtcccgaagagggcagaga

SEQ ID NO: 2552 - RNA, 20 nt, synthetic construct
  source 1..20: mol_type = other RNA
aacttaggaggtcccgaaga

SEQ ID NO: 2553 - RNA, 20 nt, synthetic construct
  source 1..20: mol_type = other RNA
aaacttaggaggtcccgaag

SEQ ID NO: 2554 - RNA, 20 nt, synthetic construct
  source 1..20: mol_type = other RNA
ggatacaggtcaaacttagg

SEQ ID NO: 2555 - RNA, 20 nt, synthetic construct
  source 1..20: mol_type = other RNA
ttaggatacaggtcaaactt

SEQ ID NO: 2556 - RNA, 20 nt, synthetic construct
  source 1..20: mol_type = other RNA
ttgacctgtatcctaaactt

SEQ ID NO: 2557 - RNA, 20 nt, synthetic construct
  source 1..20: mol_type = other RNA
tgacctgtatcctaaactta

SEQ ID NO: 2558 - RNA, 20 nt, synthetic construct
  source 1..20: mol_type = other RNA
gacctgtatcctaaacttag

SEQ ID NO: 2559 - RNA, 20 nt, synthetic construct
  source 1..20: mol_type = other RNA
aacccctaagtttaggatac

SEQ ID NO: 2560 - RNA, 20 nt, synthetic construct
  source 1..20: mol_type = other RNA
cctaaacttaggggtttcac

SEQ ID NO: 2561 - RNA, 20 nt, synthetic construct
  source 1..20: mol_type = other RNA
ctaaacttaggggtttcaca

SEQ ID NO: 2562 - RNA, 20 nt, synthetic construct
  source 1..20: mol_type = other RNA
cctgtgaaacccctaagttt

SEQ ID NO: 2563 - RNA, 20 nt, synthetic construct
  source 1..20: mol_type = other RNA
atcctaaatctccgcaaaaa

SEQ ID NO: 2564 - RNA, 20 nt, synthetic construct
  source 1..20: mol_type = other RNA
tcctaaatctccgcaaaaat

SEQ ID NO: 2565 - RNA, 20 nt, synthetic construct
  source 1..20: mol_type = other RNA
cctaaatctccgcaaaaatg

SEQ ID NO: 2566 - RNA, 20 nt, synthetic construct
  source 1..20: mol_type = other RNA
ccccatttttgcggagattt

SEQ ID NO: 2567 - RNA, 20 nt, synthetic construct
  source 1..20: mol_type = other RNA
cgggtcataccccatttttg

SEQ ID NO: 2568 - RNA, 20 nt, synthetic construct
  source 1..20: mol_type = other RNA
ggggtatgacccgacttcct

SEQ ID NO: 2569 - RNA, 20 nt, synthetic construct
  source 1..20: mol_type = other RNA
gggtatgacccgacttcctc

SEQ ID NO: 2570 - RNA, 20 nt, synthetic construct
  source 1..20: mol_type = other RNA
cgacttcctcgggctcttgc

SEQ ID NO: 2571 - RNA, 20 nt, synthetic construct
  source 1..20: mol_type = other RNA
agcaagagcccgaggaagtc

SEQ ID NO: 2572 - RNA, 20 nt, synthetic construct
  source 1..20: mol_type = other RNA
cagcaagagcccgaggaagt

SEQ ID NO: 2573 - RNA, 20 nt, synthetic construct
  source 1..20: mol_type = other RNA
ctcgggctcttgctggagac

SEQ ID NO: 2574 - RNA, 20 nt, synthetic construct
  source 1..20: mol_type = other RNA
cagtctccagcaagagcccg

SEQ ID NO: 2575 - RNA, 20 nt, synthetic construct
  source 1..20: mol_type = other RNA
ctgcgcatgagcacctctcc

SEQ ID NO: 2576 - RNA, 20 nt, synthetic construct
  source 1..20: mol_type = other RNA
tgcgcatgagcacctctcct

SEQ ID NO: 2577 - RNA, 20 nt, synthetic construct
  source 1..20: mol_type = other RNA
caggagaggtgctcatgcgc

SEQ ID NO: 2578 - RNA, 20 nt, synthetic construct
  source 1..20: mol_type = other RNA
atgagcacctctcctgggtt

SEQ ID NO: 2579 - RNA, 20 nt, synthetic construct
  source 1..20: mol_type = other RNA
tgagcacctctcctgggttt

SEQ ID NO: 2580 - RNA, 20 nt, synthetic construct
  source 1..20: mol_type = other RNA
gagcacctctcctgggtttg

SEQ ID NO: 2581 - RNA, 20 nt, synthetic construct
  source 1..20: mol_type = other RNA
aggtgccccaaacccaggag

SEQ ID NO: 2582 - RNA, 20 nt, synthetic construct
  source 1..20: mol_type = other RNA
ggagcaggtgccccaaaccc

SEQ ID NO: 2583 - RNA, 20 nt, synthetic construct
  source 1..20: mol_type = other RNA
tggggcacctgctcccacct

SEQ ID NO: 2584 - RNA, 20 nt, synthetic construct
  source 1..20: mol_type = other RNA
attaaaaccaaggtgggagc

SEQ ID NO: 2585 - RNA, 20 nt, synthetic construct
  source 1..20: mol_type = other RNA
ggtgggattaaaaccaaggt

SEQ ID NO: 2586 - RNA, 20 nt, synthetic construct
  source 1..20: mol_type = other RNA
gggtgggattaaaaccaagg

SEQ ID NO: 2587 - RNA, 20 nt, synthetic construct
  source 1..20: mol_type = other RNA
tgggggtgggattaaaacca

SEQ ID NO: 2588 - RNA, 20 nt, synthetic construct
  source 1..20: mol_type = other RNA
tagctcgtggggctgggggt

SEQ ID NO: 2589 - RNA, 20 nt, synthetic construct
  source 1..20: mol_type = other RNA
gtagctcgtggggctggggg

SEQ ID NO: 2590 - RNA, 20 nt, synthetic construct
  source 1..20: mol_type = other RNA
tcagtagctcgtggggctgg

SEQ ID NO: 2591 - RNA, 20 nt, synthetic construct
  source 1..20: mol_type = other RNA
gtcagtagctcgtggggctg

SEQ ID NO: 2592 - RNA, 20 nt, synthetic construct
  source 1..20: mol_type = other RNA
cgtcagtagctcgtggggct

SEQ ID NO: 2593 - RNA, 20 nt, synthetic construct
  source 1..20: mol_type = other RNA
acgtcagtagctcgtggggc

SEQ ID NO: 2594 - RNA, 20 nt, synthetic construct
  source 1..20: mol_type = other RNA
agagacgtcagtagctcgtg

SEQ ID NO: 2595 - RNA, 20 nt, synthetic construct
  source 1..20: mol_type = other RNA
tagagacgtcagtagctcgt

SEQ ID NO: 2596 - RNA, 20 nt, synthetic construct
  source 1..20: mol_type = other RNA
ttagagacgtcagtagctcg

SEQ ID NO: 2597 - RNA, 20 nt, synthetic construct
  source 1..20: mol_type = other RNA
ctgcccctccgagctctgcc

SEQ ID NO: 2598 - RNA, 20 nt, synthetic construct
  source 1..20: mol_type = other RNA
cttccaggcagagctcggag

SEQ ID NO: 2599 - RNA, 20 nt, synthetic construct
  source 1..20: mol_type = other RNA
acttccaggcagagctcgga

SEQ ID NO: 2600 - RNA, 20 nt, synthetic construct
  source 1..20: mol_type = other RNA
gacttccaggcagagctcgg

SEQ ID NO: 2601 - RNA, 20 nt, synthetic construct
  source 1..20: mol_type = other RNA
gtggacttccaggcagagct

SEQ ID NO: 2602 - RNA, 20 nt, synthetic construct
  source 1..20: mol_type = other RNA
tctgcctggaagtccacatc

SEQ ID NO: 2603 - RNA, 20 nt, synthetic construct
  source 1..20: mol_type = other RNA
gcctggaagtccacatccgg

SEQ ID NO: 2604 - RNA, 20 nt, synthetic construct
  source 1..20: mol_type = other RNA
cctggaagtccacatccgga

SEQ ID NO: 2605 - RNA, 20 nt, synthetic construct
  source 1..20: mol_type = other RNA
ctggaagtccacatccggag

SEQ ID NO: 2606 - RNA, 20 nt, synthetic construct
  source 1..20: mol_type = other RNA
ccctccggatgtggacttcc

SEQ ID NO: 2607 - RNA, 20 nt, synthetic construct
  source 1..20: mol_type = other RNA
catccggaggggccgcctat

SEQ ID NO: 2608 - RNA, 20 nt, synthetic construct
  source 1..20: mol_type = other RNA
ataggcggcccctccggatg

SEQ ID NO: 2609 - RNA, 20 nt, synthetic construct
  source 1..20: mol_type = other RNA
tggccgataggcggcccctc

SEQ ID NO: 2610 - RNA, 20 nt, synthetic construct
  source 1..20: mol_type = other RNA
ggatagacttggccgatagg

SEQ ID NO: 2611 - RNA, 20 nt, synthetic construct
  source 1..20: mol_type = other RNA
tgtggatagacttggccgat

SEQ ID NO: 2612 - RNA, 20 nt, synthetic construct
  source 1..20: mol_type = other RNA
gggaagagtgtggatagact

SEQ ID NO: 2613 - RNA, 20 nt, synthetic construct
  source 1..20: mol_type = other RNA
aggggcttacgggaagagtg

SEQ ID NO: 2614 - RNA, 20 nt, synthetic construct
  source 1..20: mol_type = other RNA
tgagcttttgaggggcttac

SEQ ID NO: 2615 - RNA, 20 nt, synthetic construct
  source 1..20: mol_type = other RNA
ttgagcttttgaggggctta

SEQ ID NO: 2616 - RNA, 20 nt, synthetic construct
  source 1..20: mol_type = other RNA
gaatatgttgagcttttgag

SEQ ID NO: 2617 - RNA, 20 nt, synthetic construct
  source 1..20: mol_type = other RNA
agaatatgttgagcttttga

SEQ ID NO: 2618 - RNA, 20 nt, synthetic construct
  source 1..20: mol_type = other RNA
tagaatatgttgagcttttg

SEQ ID NO: 2619 - RNA, 20 nt, synthetic construct
  source 1..20: mol_type = other RNA
aaacaaatggggagaggcag

SEQ ID NO: 2620 - RNA, 20 nt, synthetic construct
  source 1..20: mol_type = other RNA
ggaaagaaacaaatggggag

SEQ ID NO: 2621 - RNA, 20 nt, synthetic construct
  source 1..20: mol_type = other RNA
acgcaggaaagaaacaaatg

SEQ ID NO: 2622 - RNA, 20 nt, synthetic construct
  source 1..20: mol_type = other RNA
gacgcaggaaagaaacaaat

SEQ ID NO: 2623 - RNA, 20 nt, synthetic construct
  source 1..20: mol_type = other RNA
ggacgcaggaaagaaacaaa

SEQ ID NO: 2624 - RNA, 20 nt, synthetic construct
  source 1..20: mol_type = other RNA
tgtcactgagatagggacgc

SEQ ID NO: 2625 - RNA, 20 nt, synthetic construct
  source 1..20: mol_type = other RNA
ttagggctgtcactgagata

SEQ ID NO: 2626 - RNA, 20 nt, synthetic construct
  source 1..20: mol_type = other RNA
gttagggctgtcactgagat

SEQ ID NO: 2627 - RNA, 20 nt, synthetic construct
  source 1..20: mol_type = other RNA
atgagaactggtggatgtta

SEQ ID NO: 2628 - RNA, 20 nt, synthetic construct
  source 1..20: mol_type = other RNA
tatgagaactggtggatgtt

SEQ ID NO: 2629 - RNA, 20 nt, synthetic construct
  source 1..20: mol_type = other RNA
cagttctcatacgagaaacc

SEQ ID NO: 2630 - RNA, 20 nt, synthetic construct
  source 1..20: mol_type = other RNA
agttctcatacgagaaacct

SEQ ID NO: 2631 - RNA, 20 nt, synthetic construct
  source 1..20: mol_type = other RNA
caggtttctcgtatgagaac

SEQ ID NO: 2632 - RNA, 20 nt, synthetic construct
  source 1..20: mol_type = other RNA
aggagtctggaagaacgccc

SEQ ID NO: 2633 - RNA, 20 nt, synthetic construct
  source 1..20: mol_type = other RNA
aatgtggggagagaggagtc

SEQ ID NO: 2634 - RNA, 20 nt, synthetic construct
  source 1..20: mol_type = other RNA
ctctctccccacattcagtt

SEQ ID NO: 2635 - RNA, 20 nt, synthetic construct
  source 1..20: mol_type = other RNA
cgaactgaatgtggggagag

SEQ ID NO: 2636 - RNA, 20 nt, synthetic construct
  source 1..20: mol_type = other RNA
aatcagccgaactgaatgtg

SEQ ID NO: 2637 - RNA, 20 nt, synthetic construct
  source 1..20: mol_type = other RNA
aaatcagccgaactgaatgt

SEQ ID NO: 2638 - RNA, 20 nt, synthetic construct
  source 1..20: mol_type = other RNA
caaatcagccgaactgaatg

SEQ ID NO: 2639 - RNA, 20 nt, synthetic construct
  source 1..20: mol_type = other RNA
agatactagaaatattcggg

SEQ ID NO: 2640 - RNA, 20 nt, synthetic construct
  source 1..20: mol_type = other RNA
aacagatactagaaatattc

SEQ ID NO: 2641 - RNA, 20 nt, synthetic construct
  source 1..20: mol_type = other RNA
aaacagatactagaaatatt

SEQ ID NO: 2642 - RNA, 20 nt, synthetic construct
  source 1..20: mol_type = other RNA
cagcatcagtgggggtggag

SEQ ID NO: 2643 - RNA, 20 nt, synthetic construct
  source 1..20: mol_type = other RNA
tggggcagcatcagtggggg

SEQ ID NO: 2644 - RNA, 20 nt, synthetic construct
  source 1..20: mol_type = other RNA
ggctggggcagcatcagtgg

SEQ ID NO: 2645 - RNA, 20 nt, synthetic construct
  source 1..20: mol_type = other RNA
cggctggggcagcatcagtg

SEQ ID NO: 2646 - RNA, 20 nt, synthetic construct
  source 1..20: mol_type = other RNA
acggctggggcagcatcagt

SEQ ID NO: 2647 - RNA, 20 nt, synthetic construct
  source 1..20: mol_type = other RNA
gacggctggggcagcatcag

SEQ ID NO: 2648 - RNA, 20 nt, synthetic construct
  source 1..20: mol_type = other RNA
gctaagcagaaagacggctg

SEQ ID NO: 2649 - RNA, 20 nt, synthetic construct
  source 1..20: mol_type = other RNA
agctaagcagaaagacggct

SEQ ID NO: 2650 - RNA, 20 nt, synthetic construct
  source 1..20: mol_type = other RNA
gagctaagcagaaagacggc

SEQ ID NO: 2651 - RNA, 20 nt, synthetic construct
  source 1..20: mol_type = other RNA
aggagagctaagcagaaaga

SEQ ID NO: 2652 - RNA, 20 nt, synthetic construct
  source 1..20: mol_type = other RNA
ggtgtcaaagagcaagagca

SEQ ID NO: 2653 - RNA, 20 nt, synthetic construct
  source 1..20: mol_type = other RNA
ataaacagggagattagtaa

SEQ ID NO: 2654 - RNA, 20 nt, synthetic construct
  source 1..20: mol_type = other RNA
tgtttatgtcccctccccgc

SEQ ID NO: 2655 - RNA, 20 nt, synthetic construct
  source 1..20: mol_type = other RNA
gtttatgtcccctccccgca

SEQ ID NO: 2656 - RNA, 20 nt, synthetic construct
  source 1..20: mol_type = other RNA
gcggggaggggacataaaca

SEQ ID NO: 2657 - RNA, 20 nt, synthetic construct
  source 1..20: mol_type = other RNA
tgcggggaggggacataaac

SEQ ID NO: 2658 - RNA, 20 nt, synthetic construct
  source 1..20: mol_type = other RNA
tgtcccctccccgcagggtc

SEQ ID NO: 2659 - RNA, 20 nt, synthetic construct
  source 1..20: mol_type = other RNA
gggccggaccctgcggggag

SEQ ID NO: 2660 - RNA, 20 nt, synthetic construct
  source 1..20: mol_type = other RNA
tgggccggaccctgcgggga

SEQ ID NO: 2661 - RNA, 20 nt, synthetic construct
  source 1..20: mol_type = other RNA
gtgggccggaccctgcgggg

SEQ ID NO: 2662 - RNA, 20 nt, synthetic construct
  source 1..20: mol_type = other RNA
tgtgtgggccggaccctgcg

SEQ ID NO: 2663 - RNA, 20 nt, synthetic construct
  source 1..20: mol_type = other RNA
ctgtgtgggccggaccctgc

SEQ ID NO: 2664 - RNA, 20 nt, synthetic construct
  source 1..20: mol_type = other RNA
tctgtgtgggccggaccctg

SEQ ID NO: 2665 - RNA, 20 nt, synthetic construct
  source 1..20: mol_type = other RNA
ttgggctgatctgtgtgggc

SEQ ID NO: 2666 - RNA, 20 nt, synthetic construct
  source 1..20: mol_type = other RNA
aagattgggctgatctgtgt

SEQ ID NO: 2667 - RNA, 20 nt, synthetic construct
  source 1..20: mol_type = other RNA
aaagattgggctgatctgtg

SEQ ID NO: 2668 - RNA, 20 nt, synthetic construct
  source 1..20: mol_type = other RNA
aaaatgtatttaaaaagatt

SEQ ID NO: 2669 - RNA, 20 nt, synthetic construct
  source 1..20: mol_type = other RNA
aaaaatgtatttaaaaagat

SEQ ID NO: 2670 - RNA, 20 nt, synthetic construct
  source 1..20: mol_type = other RNA
agcgtctcgctctgtcgccc

SEQ ID NO: 2671 - RNA, 20 nt, synthetic construct
  source 1..20: mol_type = other RNA
tctcgctctgtcgcccaggc

SEQ ID NO: 2672 - RNA, 20 nt, synthetic construct
  source 1..20: mol_type = other RNA
tcgcccaggctggagtgcag

SEQ ID NO: 2673 - RNA, 20 nt, synthetic construct
  source 1..20: mol_type = other RNA
gcgccactgcactccagcct

SEQ ID NO: 2674 - RNA, 20 nt, synthetic construct
  source 1..20: mol_type = other RNA
cgcgccactgcactccagcc

SEQ ID NO: 2675 - RNA, 20 nt, synthetic construct
  source 1..20: mol_type = other RNA
ggagtgcagtggcgcgatct

SEQ ID NO: 2676 - RNA, 20 nt, synthetic construct
  source 1..20: mol_type = other RNA
tcactgcaacctccgcctcc

SEQ ID NO: 2677 - RNA, 20 nt, synthetic construct
  source 1..20: mol_type = other RNA
cactgcaacctccgcctccc

SEQ ID NO: 2678 - RNA, 20 nt, synthetic construct
  source 1..20: mol_type = other RNA
tgcttgaacccgggaggcgg

SEQ ID NO: 2679 - RNA, 20 nt, synthetic construct
  source 1..20: mol_type = other RNA
aactgcttgaacccgggagg

SEQ ID NO: 2680 - RNA, 20 nt, synthetic construct
  source 1..20: mol_type = other RNA
gagaactgcttgaacccggg

SEQ ID NO: 2681 - RNA, 20 nt, synthetic construct
  source 1..20: mol_type = other RNA
gcagagaactgcttgaaccc

SEQ ID NO: 2682 - RNA, 20 nt, synthetic construct
  source 1..20: mol_type = other RNA
ggcagagaactgcttgaacc

SEQ ID NO: 2683 - RNA, 20 nt, synthetic construct
  source 1..20: mol_type = other RNA
ctcagctactcgggaggctg

SEQ ID NO: 2684 - RNA, 20 nt, synthetic construct
  source 1..20: mol_type = other RNA
tcccgagtagctgagattac

SEQ ID NO: 2685 - RNA, 20 nt, synthetic construct
  source 1..20: mol_type = other RNA
tgtaatctcagctactcggg

SEQ ID NO: 2686 - RNA, 20 nt, synthetic construct
  source 1..20: mol_type = other RNA
gcctgtaatctcagctactc

SEQ ID NO: 2687 - RNA, 20 nt, synthetic construct
  source 1..20: mol_type = other RNA
agcctgtaatctcagctact

SEQ ID NO: 2688 - RNA, 20 nt, synthetic construct
  source 1..20: mol_type = other RNA
caggctcctcccaccacgcc

SEQ ID NO: 2689 - RNA, 20 nt, synthetic construct
  source 1..20: mol_type = other RNA
aattagccgggcgtggtggg

SEQ ID NO: 2690 - RNA, 20 nt, synthetic construct
  source 1..20: mol_type = other RNA
aaaaattagccgggcgtggt

SEQ ID NO: 2691 - RNA, 20 nt, synthetic construct
  source 1..20: mol_type = other RNA
caaaaattagccgggcgtgg

SEQ ID NO: 2692 - RNA, 20 nt, synthetic construct
  source 1..20: mol_type = other RNA
atacaaaaattagccgggcg

SEQ ID NO: 2693 - RNA, 20 nt, synthetic construct
  source 1..20: mol_type = other RNA
taaaaatacaaaaattagcc

SEQ ID NO: 2694 - RNA, 20 nt, synthetic construct
  source 1..20: mol_type = other RNA
ctaaaaatacaaaaattagc

SEQ ID NO: 2695 - RNA, 20 nt, synthetic construct
  source 1..20: mol_type = other RNA
ttttgtatttttagtagaaa

SEQ ID NO: 2696 - RNA, 20 nt, synthetic construct
  source 1..20: mol_type = other RNA
tttgtatttttagtagaaac

SEQ ID NO: 2697 - RNA, 20 nt, synthetic construct
  source 1..20: mol_type = other RNA
ttgtatttttagtagaaacg

SEQ ID NO: 2698 - RNA, 20 nt, synthetic construct
  source 1..20: mol_type = other RNA
gaaacggggtttcaccatct

SEQ ID NO: 2699 - RNA, 20 nt, synthetic construct
  source 1..20: mol_type = other RNA
tcaccatcttggccagttaa

SEQ ID NO: 2700 - RNA, 20 nt, synthetic construct
  source 1..20: mol_type = other RNA
atgcctttaactggccaaga

SEQ ID NO: 2701 - RNA, 20 nt, synthetic construct
  source 1..20: mol_type = other RNA
ttttaaaatatgcctttaac

SEQ ID NO: 2702 - RNA, 20 nt, synthetic construct
  source 1..20: mol_type = other RNA
tttgtaaggatgttaagcaa

SEQ ID NO: 2703 - RNA, 20 nt, synthetic construct
  source 1..20: mol_type = other RNA
atttgtaaggatgttaagca

SEQ ID NO: 2704 - RNA, 20 nt, synthetic construct
  source 1..20: mol_type = other RNA
gcaagagagtaacatttgta

SEQ ID NO: 2705 - RNA, 20 nt, synthetic construct
  source 1..20: mol_type = other RNA
ctcttgcttaacatccttag

SEQ ID NO: 2706 - RNA, 20 nt, synthetic construct
  source 1..20: mol_type = other RNA
ttaacatccttagtggcctt

SEQ ID NO: 2707 - RNA, 20 nt, synthetic construct
  source 1..20: mol_type = other RNA
agcatttccaaaggccacta

SEQ ID NO: 2708 - RNA, 20 nt, synthetic construct
  source 1..20: mol_type = other RNA
cctttggaaatgctccaacc

SEQ ID NO: 2709 - RNA, 20 nt, synthetic construct
  source 1..20: mol_type = other RNA
ccaggttggagcatttccaa

SEQ ID NO: 2710 - RNA, 20 nt, synthetic construct
  source 1..20: mol_type = other RNA
gaaatgctccaacctggtac

SEQ ID NO: 2711 - RNA, 20 nt, synthetic construct
  source 1..20: mol_type = other RNA
aagaacttccagtaccaggt

SEQ ID NO: 2712 - RNA, 20 nt, synthetic construct
  source 1..20: mol_type = other RNA
tcttaagaacttccagtacc

SEQ ID NO: 2713 - RNA, 20 nt, synthetic construct
  source 1..20: mol_type = other RNA
actggaagttcttaagaatc

SEQ ID NO: 2714 - RNA, 20 nt, synthetic construct
  source 1..20: mol_type = other RNA
gagagcgaggcttcaaaggt

SEQ ID NO: 2715 - RNA, 20 nt, synthetic construct
  source 1..20: mol_type = other RNA
gagagagagcgaggcttcaa

SEQ ID NO: 2716 - RNA, 20 nt, synthetic construct
  source 1..20: mol_type = other RNA
atgctaagagagagagagcg

SEQ ID NO: 2717 - RNA, 20 nt, synthetic construct
  source 1..20: mol_type = other RNA
taggaacaatgaggatagct

SEQ ID NO: 2718 - RNA, 20 nt, synthetic construct
  source 1..20: mol_type = other RNA
tcattgttcctaaagcagct

SEQ ID NO: 2719 - RNA, 20 nt, synthetic construct
  source 1..20: mol_type = other RNA
tagctgctttaggaacaatg

SEQ ID NO: 2720 - RNA, 20 nt, synthetic construct
  source 1..20: mol_type = other RNA
ctaaagcagctaggctcttt

SEQ ID NO: 2721 - RNA, 20 nt, synthetic construct
  source 1..20: mol_type = other RNA
taaagcagctaggctctttc

SEQ ID NO: 2722 - RNA, 20 nt, synthetic construct
  source 1..20: mol_type = other RNA
cgaaagagcctagctgcttt

SEQ ID NO: 2723 - RNA, 20 nt, synthetic construct
  source 1..20: mol_type = other RNA
aataacatagtgaaagacac

SEQ ID NO: 2724 - RNA, 20 nt, synthetic construct
  source 1..20: mol_type = other RNA
ccctgaaatagctctttact

SEQ ID NO: 2725 - RNA, 20 nt, synthetic construct
  source 1..20: mol_type = other RNA
ccaagtaaagagctatttca

SEQ ID NO: 2726 - RNA, 20 nt, synthetic construct
  source 1..20: mol_type = other RNA
gccaagtaaagagctatttc

SEQ ID NO: 2727 - RNA, 20 nt, synthetic construct
  source 1..20: mol_type = other RNA
ctttacttggcaaagtccta

SEQ ID NO: 2728 - RNA, 20 nt, synthetic construct
  source 1..20: mol_type = other RNA
atggatctaccagagcctct

SEQ ID NO: 2729 - RNA, 20 nt, synthetic construct
  source 1..20: mol_type = other RNA
agaggctctggtagatccat

SEQ ID NO: 2730 - RNA, 20 nt, synthetic construct
  source 1..20: mol_type = other RNA
agatgctatccaagaggctc

SEQ ID NO: 2731 - RNA, 20 nt, synthetic construct
  source 1..20: mol_type = other RNA
caaaagagatgctatccaag

SEQ ID NO: 2732 - DNA, 28 bp, synthetic construct
  source 1..28: mol_type = other DNA
cctctggcttgtgagcagactcttctgg

SEQ ID NO: 2733 - DNA, 28 bp, synthetic construct
  source 1..28: mol_type = other DNA
ctggcttgtgagcagactcttctggtgg

SEQ ID NO: 2734 - DNA, 28 bp, synthetic construct
  source 1..28: mol_type = other DNA
cttgtgagcagactcttctggtggatgg

SEQ ID NO: 2735 - DNA, 28 bp, synthetic construct
  source 1..28: mol_type = other DNA
ttgtgagcagactcttctggtggatggg

SEQ ID NO: 2736 - DNA, 28 bp, synthetic construct
  source 1..28: mol_type = other DNA
gggaactgagacatatctcagggaatgg

SEQ ID NO: 2737 - DNA, 28 bp, synthetic construct
  source 1..28: mol_type = other DNA
tccctgagatatgtctcagttcccaagg

SEQ ID NO: 2738 - DNA, 28 bp, synthetic construct
  source 1..28: mol_type = other DNA
tccttgggaactgagacatatctcaggg

SEQ ID NO: 2739 - DNA, 28 bp, synthetic construct
  source 1..28: mol_type = other DNA
ctccttgggaactgagacatatctcagg

SEQ ID NO: 2740 - DNA, 28 bp, synthetic construct
  source 1..28: mol_type = other DNA
ggatggatgtgtacagtggctccttggg

SEQ ID NO: 2741 - DNA, 28 bp, synthetic construct
  source 1..28: mol_type = other DNA
aggatggatgtgtacagtggctccttgg

SEQ ID NO: 2742 - DNA, 28 bp, synthetic construct
  source 1..28: mol_type = other DNA
cgtgtacaaggatggatgtgtacagtgg

SEQ ID NO: 2743 - DNA, 28 bp, synthetic construct
  source 1..28: mol_type = other DNA
cactgtacacatccatccttgtacacgg

SEQ ID NO: 2744 - DNA, 28 bp, synthetic construct
  source 1..28: mol_type = other DNA
acatccatccttgtacacggacaccagg

SEQ ID NO: 2745 - DNA, 28 bp, synthetic construct
  source 1..28: mol_type = other DNA
agcacctggtgtccgtgtacaaggatgg

SEQ ID NO: 2746 - DNA, 28 bp, synthetic construct
  source 1..28: mol_type = other DNA
tctgagcacctggtgtccgtgtacaagg

SEQ ID NO: 2747 - DNA, 28 bp, synthetic construct
  source 1..28: mol_type = other DNA
acaccaggtgctcagagacagacacagg

SEQ ID NO: 2748 - DNA, 28 bp, synthetic construct
  source 1..28: mol_type = other DNA
gtgcctgtgtctgtctctgagcacctgg

SEQ ID NO: 2749 - DNA, 28 bp, synthetic construct
  source 1..28: mol_type = other DNA
atctgcacgccccccacttgctccccgg

SEQ ID NO: 2750 - DNA, 28 bp, synthetic construct
  source 1..28: mol_type = other DNA
cgccccccacttgctccccggagcgagg

SEQ ID NO: 2751 - DNA, 28 bp, synthetic construct
  source 1..28: mol_type = other DNA
gtcctcgctccggggagcaagtgggggg

SEQ ID NO: 2752 - DNA, 28 bp, synthetic construct
  source 1..28: mol_type = other DNA
ggtcctcgctccggggagcaagtggggg

SEQ ID NO: 2753 - DNA, 28 bp, synthetic construct
  source 1..28: mol_type = other DNA
tggtcctcgctccggggagcaagtgggg

SEQ ID NO: 2754 - DNA, 28 bp, synthetic construct
  source 1..28: mol_type = other DNA
ctggtcctcgctccggggagcaagtggg

SEQ ID NO: 2755 - DNA, 28 bp, synthetic construct
  source 1..28: mol_type = other DNA
actggtcctcgctccggggagcaagtgg

SEQ ID NO: 2756 - DNA, 28 bp, synthetic construct
  source 1..28: mol_type = other DNA
agtttggagactggtcctcgctccgggg

SEQ ID NO: 2757 - DNA, 28 bp, synthetic construct
  source 1..28: mol_type = other DNA
gagtttggagactggtcctcgctccggg

SEQ ID NO: 2758 - DNA, 28 bp, synthetic construct
  source 1..28: mol_type = other DNA
tgagtttggagactggtcctcgctccgg

SEQ ID NO: 2759 - DNA, 28 bp, synthetic construct
  source 1..28: mol_type = other DNA
ataaagttgctctgagtttggagactgg

SEQ ID NO: 2760 - DNA, 28 bp, synthetic construct
  source 1..28: mol_type = other DNA
gctgacaataaagttgctctgagtttgg

SEQ ID NO: 2761 - DNA, 28 bp, synthetic construct
  source 1..28: mol_type = other DNA
actcagagcaactttattgtcagcgtgg

SEQ ID NO: 2762 - DNA, 28 bp, synthetic construct
  source 1..28: mol_type = other DNA
ctcagagcaactttattgtcagcgtggg

SEQ ID NO: 2763 - DNA, 28 bp, synthetic construct
  source 1..28: mol_type = other DNA
agagcaactttattgtcagcgtgggcgg

SEQ ID NO: 2764 - DNA, 28 bp, synthetic construct
  source 1..28: mol_type = other DNA
tttattgtcagcgtgggcggagcgttgg

SEQ ID NO: 2765 - DNA, 28 bp, synthetic construct
  source 1..28: mol_type = other DNA
ttattgtcagcgtgggcggagcgttggg

SEQ ID NO: 2766 - DNA, 28 bp, synthetic construct
  source 1..28: mol_type = other DNA
ttgtcagcgtgggcggagcgttgggagg

SEQ ID NO: 2767 - DNA, 28 bp, synthetic construct
  source 1..28: mol_type = other DNA
ttgggaggcacctcagtcatgatacagg

SEQ ID NO: 2768 - DNA, 28 bp, synthetic construct
  source 1..28: mol_type = other DNA
ggcacctcagtcatgatacaggcgcagg

SEQ ID NO: 2769 - DNA, 28 bp, synthetic construct
  source 1..28: mol_type = other DNA
acctcagtcatgatacaggcgcaggagg

SEQ ID NO: 2770 - DNA, 28 bp, synthetic construct
  source 1..28: mol_type = other DNA
gcctcctgcgcctgtatcatgactgagg

SEQ ID NO: 2771 - DNA, 28 bp, synthetic construct
  source 1..28: mol_type = other DNA
atgatacaggcgcaggaggcagccgcgg

SEQ ID NO: 2772 - DNA, 28 bp, synthetic construct
  source 1..28: mol_type = other DNA
atacaggcgcaggaggcagccgcggagg

SEQ ID NO: 2773 - DNA, 28 bp, synthetic construct
  source 1..28: mol_type = other DNA
tacaggcgcaggaggcagccgcggaggg

SEQ ID NO: 2774 - DNA, 28 bp, synthetic construct
  source 1..28: mol_type = other DNA
gcagccgcggagggtgcccatgtagcgg

SEQ ID NO: 2775 - DNA, 28 bp, synthetic construct
  source 1..28: mol_type = other DNA
gggaccgctacatgggcaccctccgcgg

SEQ ID NO: 2776 - DNA, 28 bp, synthetic construct
  source 1..28: mol_type = other DNA
gagggtgcccatgtagcggtcccagagg

SEQ ID NO: 2777 - DNA, 28 bp, synthetic construct
  source 1..28: mol_type = other DNA
agggtgcccatgtagcggtcccagaggg

SEQ ID NO: 2778 - DNA, 28 bp, synthetic construct
  source 1..28: mol_type = other DNA
gcccatgtagcggtcccagagggcctgg

SEQ ID NO: 2779 - DNA, 28 bp, synthetic construct
  source 1..28: mol_type = other DNA
accaggccctctgggaccgctacatggg

SEQ ID NO: 2780 - DNA, 28 bp, synthetic construct
  source 1..28: mol_type = other DNA
caccaggccctctgggaccgctacatgg

SEQ ID NO: 2781 - DNA, 28 bp, synthetic construct
  source 1..28: mol_type = other DNA
tgttcttacagacaccaggccctctggg

SEQ ID NO: 2782 - DNA, 28 bp, synthetic construct
  source 1..28: mol_type = other DNA
atgttcttacagacaccaggccctctgg

SEQ ID NO: 2783 - DNA, 28 bp, synthetic construct
  source 1..28: mol_type = other DNA
cactgttcatgttcttacagacaccagg

SEQ ID NO: 2784 - DNA, 28 bp, synthetic construct
  source 1..28: mol_type = other DNA
tggacaggaggacagggctgctcaccgg

SEQ ID NO: 2785 - DNA, 28 bp, synthetic construct
  source 1..28: mol_type = other DNA
cagggctgctcaccggaagccatcgagg

SEQ ID NO: 2786 - DNA, 28 bp, synthetic construct
  source 1..28: mol_type = other DNA
agggctgctcaccggaagccatcgaggg

SEQ ID NO: 2787 - DNA, 28 bp, synthetic construct
  source 1..28: mol_type = other DNA
tgctcaccggaagccatcgagggagtgg

SEQ ID NO: 2788 - DNA, 28 bp, synthetic construct
  source 1..28: mol_type = other DNA
gtctgtccactccctcgatggcttccgg

SEQ ID NO: 2789 - DNA, 28 bp, synthetic construct
  source 1..28: mol_type = other DNA
attcagcgtctgtccactccctcgatgg

SEQ ID NO: 2790 - DNA, 28 bp, synthetic construct
  source 1..28: mol_type = other DNA
gtggacagacgctgaatactgattcagg

SEQ ID NO: 2791 - DNA, 28 bp, synthetic construct
  source 1..28: mol_type = other DNA
tcaggaagaaccgcacgtcgctgagtgg

SEQ ID NO: 2792 - DNA, 28 bp, synthetic construct
  source 1..28: mol_type = other DNA
gaaccgcacgtcgctgagtggccagtgg

SEQ ID NO: 2793 - DNA, 28 bp, synthetic construct
  source 1..28: mol_type = other DNA
cgaccactggccactcagcgacgtgcgg

SEQ ID NO: 2794 - DNA, 28 bp, synthetic construct
  source 1..28: mol_type = other DNA
cgcacgtcgctgagtggccagtggtcgg

SEQ ID NO: 2795 - DNA, 28 bp, synthetic construct
  source 1..28: mol_type = other DNA
gtcgctgagtggccagtggtcggagcgg

SEQ ID NO: 2796 - DNA, 28 bp, synthetic construct
  source 1..28: mol_type = other DNA
ctgagtggccagtggtcggagcggcagg

SEQ ID NO: 2797 - DNA, 28 bp, synthetic construct
  source 1..28: mol_type = other DNA
tgagtggccagtggtcggagcggcaggg

SEQ ID NO: 2798 - DNA, 28 bp, synthetic construct
  source 1..28: mol_type = other DNA
tgtggaaccctgccgctccgaccactgg

SEQ ID NO: 2799 - DNA, 28 bp, synthetic construct
  source 1..28: mol_type = other DNA
cggagcggcagggttccacaaactgcgg

SEQ ID NO: 2800 - DNA, 28 bp, synthetic construct
  source 1..28: mol_type = other DNA
ggagcggcagggttccacaaactgcggg

SEQ ID NO: 2801 - DNA, 28 bp, synthetic construct
  source 1..28: mol_type = other DNA
agtattctcttgggcccgcagtttgtgg

SEQ ID NO: 2802 - DNA, 28 bp, synthetic construct
  source 1..28: mol_type = other DNA
agcacgacagctcaccttctccacgagg

SEQ ID NO: 2803 - DNA, 28 bp, synthetic construct
  source 1..28: mol_type = other DNA
caccttctccacgaggtccacaaacagg

SEQ ID NO: 2804 - DNA, 28 bp, synthetic construct
  source 1..28: mol_type = other DNA
gacctgtttgtggacctcgtggagaagg

SEQ ID NO: 2805 - DNA, 28 bp, synthetic construct
  source 1..28: mol_type = other DNA
gtcagagacctgtttgtggacctcgtgg

SEQ ID NO: 2806 - DNA, 28 bp, synthetic construct
  source 1..28: mol_type = other DNA
aataaagatgtcagagacctgtttgtgg

SEQ ID NO: 2807 - DNA, 28 bp, synthetic construct
  source 1..28: mol_type = other DNA
aaacaggtctctgacatctttattgtgg

SEQ ID NO: 2808 - DNA, 28 bp, synthetic construct
  source 1..28: mol_type = other DNA
aacaggtctctgacatctttattgtggg

SEQ ID NO: 2809 - DNA, 28 bp, synthetic construct
  source 1..28: mol_type = other DNA
ctgacatctttattgtgggtcagcttgg

SEQ ID NO: 2810 - DNA, 28 bp, synthetic construct
  source 1..28: mol_type = other DNA
acatctttattgtgggtcagcttggcgg

SEQ ID NO: 2811 - DNA, 28 bp, synthetic construct
  source 1..28: mol_type = other DNA
cttggcggccacgttcaccagcccccgg

SEQ ID NO: 2812 - DNA, 28 bp, synthetic construct
  source 1..28: mol_type = other DNA
ttggcggccacgttcaccagcccccggg

SEQ ID NO: 2813 - DNA, 28 bp, synthetic construct
  source 1..28: mol_type = other DNA
ggccacgttcaccagcccccgggacagg

SEQ ID NO: 2814 - DNA, 28 bp, synthetic construct
  source 1..28: mol_type = other DNA
aacctgtcccgggggctggtgaacgtgg

SEQ ID NO: 2815 - DNA, 28 bp, synthetic construct
  source 1..28: mol_type = other DNA
tcaccagcccccgggacaggttctgtgg

SEQ ID NO: 2816 - DNA, 28 bp, synthetic construct
  source 1..28: mol_type = other DNA
caccagcccccgggacaggttctgtggg

SEQ ID NO: 2817 - DNA, 28 bp, synthetic construct
  source 1..28: mol_type = other DNA
accagcccccgggacaggttctgtgggg

SEQ ID NO: 2818 - DNA, 28 bp, synthetic construct
  source 1..28: mol_type = other DNA
gccccacagaacctgtcccgggggctgg

SEQ ID NO: 2819 - DNA, 28 bp, synthetic construct
  source 1..28: mol_type = other DNA
gcccccgggacaggttctgtggggcagg

SEQ ID NO: 2820 - DNA, 28 bp, synthetic construct
  source 1..28: mol_type = other DNA
cccccgggacaggttctgtggggcaggg

SEQ ID NO: 2821 - DNA, 28 bp, synthetic construct
  source 1..28: mol_type = other DNA
tccctgccccacagaacctgtcccgggg

SEQ ID NO: 2822 - DNA, 28 bp, synthetic construct
  source 1..28: mol_type = other DNA
atccctgccccacagaacctgtcccggg

SEQ ID NO: 2823 - DNA, 28 bp, synthetic construct
  source 1..28: mol_type = other DNA
gatccctgccccacagaacctgtcccgg

SEQ ID NO: 2824 - DNA, 28 bp, synthetic construct
  source 1..28: mol_type = other DNA
acaggttctgtggggcagggatccttgg

SEQ ID NO: 2825 - DNA, 28 bp, synthetic construct
  source 1..28: mol_type = other DNA
tggatgggaccacagaccttgaagttgg

SEQ ID NO: 2826 - DNA, 28 bp, synthetic construct
  source 1..28: mol_type = other DNA
agatggaagccaacttcaaggtctgtgg

SEQ ID NO: 2827 - DNA, 28 bp, synthetic construct
  source 1..28: mol_type = other DNA
ttctctgagatggaagccaacttcaagg

SEQ ID NO: 2828 - DNA, 28 bp, synthetic construct
  source 1..28: mol_type = other DNA
ggaaagctgggcgtcttctctgagatgg

SEQ ID NO: 2829 - DNA, 28 bp, synthetic construct
  source 1..28: mol_type = other DNA
ctcagagaagacgcccagctttccccgg

SEQ ID NO: 2830 - DNA, 28 bp, synthetic construct
  source 1..28: mol_type = other DNA
tgtgcactgctctccggggaaagctggg

SEQ ID NO: 2831 - DNA, 28 bp, synthetic construct
  source 1..28: mol_type = other DNA
gtgtgcactgctctccggggaaagctgg

SEQ ID NO: 2832 - DNA, 28 bp, synthetic construct
  source 1..28: mol_type = other DNA
ctttccccggagagcagtgcacaccagg

SEQ ID NO: 2833 - DNA, 28 bp, synthetic construct
  source 1..28: mol_type = other DNA
gcagcctggtgtgcactgctctccgggg

SEQ ID NO: 2834 - DNA, 28 bp, synthetic construct
  source 1..28: mol_type = other DNA
tgcagcctggtgtgcactgctctccggg

SEQ ID NO: 2835 - DNA, 28 bp, synthetic construct
  source 1..28: mol_type = other DNA
ctgcagcctggtgtgcactgctctccgg

SEQ ID NO: 2836 - DNA, 28 bp, synthetic construct
  source 1..28: mol_type = other DNA
agtgcacaccaggctgcagagagacagg

SEQ ID NO: 2837 - DNA, 28 bp, synthetic construct
  source 1..28: mol_type = other DNA
gtgcacaccaggctgcagagagacaggg

SEQ ID NO: 2838 - DNA, 28 bp, synthetic construct
  source 1..28: mol_type = other DNA
ggcgtgaccctgtctctctgcagcctgg

SEQ ID NO: 2839 - DNA, 28 bp, synthetic construct
  source 1..28: mol_type = other DNA
ggtgaccttgtaggggcccatggggcgg

SEQ ID NO: 2840 - DNA, 28 bp, synthetic construct
  source 1..28: mol_type = other DNA
agaggtgaccttgtaggggcccatgggg

SEQ ID NO: 2841 - DNA, 28 bp, synthetic construct
  source 1..28: mol_type = other DNA
aagaggtgaccttgtaggggcccatggg

SEQ ID NO: 2842 - DNA, 28 bp, synthetic construct
  source 1..28: mol_type = other DNA
caagaggtgaccttgtaggggcccatgg

SEQ ID NO: 2843 - DNA, 28 bp, synthetic construct
  source 1..28: mol_type = other DNA
gcccctacaaggtcacctcttgtgcagg

SEQ ID NO: 2844 - DNA, 28 bp, synthetic construct
  source 1..28: mol_type = other DNA
acctgcacaagaggtgaccttgtagggg

SEQ ID NO: 2845 - DNA, 28 bp, synthetic construct
  source 1..28: mol_type = other DNA
gacctgcacaagaggtgaccttgtaggg

SEQ ID NO: 2846 - DNA, 28 bp, synthetic construct
  source 1..28: mol_type = other DNA
ggacctgcacaagaggtgaccttgtagg

SEQ ID NO: 2847 - DNA, 28 bp, synthetic construct
  source 1..28: mol_type = other DNA
aggtcacctcttgtgcaggtccagaagg

SEQ ID NO: 2848 - DNA, 28 bp, synthetic construct
  source 1..28: mol_type = other DNA
caaggaccttctggacctgcacaagagg

SEQ ID NO: 2849 - DNA, 28 bp, synthetic construct
  source 1..28: mol_type = other DNA
gtgctagtggctgacaaggaccttctgg

SEQ ID NO: 2850 - DNA, 28 bp, synthetic construct
  source 1..28: mol_type = other DNA
gagctcaaggtgctagtggctgacaagg

SEQ ID NO: 2851 - DNA, 28 bp, synthetic construct
  source 1..28: mol_type = other DNA
gacttgaaggagctcaaggtgctagtgg

SEQ ID NO: 2852 - DNA, 28 bp, synthetic construct
  source 1..28: mol_type = other DNA
tagcaccttgagctccttcaagtcctgg

SEQ ID NO: 2853 - DNA, 28 bp, synthetic construct
  source 1..28: mol_type = other DNA
tttctccaggacttgaaggagctcaagg

SEQ ID NO: 2854 - DNA, 28 bp, synthetic construct
  source 1..28: mol_type = other DNA
gacaaggaatttctccaggacttgaagg

SEQ ID NO: 2855 - DNA, 28 bp, synthetic construct
  source 1..28: mol_type = other DNA
atggacttagacaaggaatttctccagg

SEQ ID NO: 2856 - DNA, 28 bp, synthetic construct
  source 1..28: mol_type = other DNA
gatgacatggacatggacttagacaagg

SEQ ID NO: 2857 - DNA, 28 bp, synthetic construct
  source 1..28: mol_type = other DNA
gactcacagatggatgacatggacatgg

SEQ ID NO: 2858 - DNA, 28 bp, synthetic construct
  source 1..28: mol_type = other DNA
ctcacagactcacagatggatgacatgg

SEQ ID NO: 2859 - DNA, 28 bp, synthetic construct
  source 1..28: mol_type = other DNA
catgtcatccatctgtgagtctgtgagg

SEQ ID NO: 2860 - DNA, 28 bp, synthetic construct
  source 1..28: mol_type = other DNA
cttcatggcctcacagactcacagatgg

SEQ ID NO: 2861 - DNA, 28 bp, synthetic construct
  source 1..28: mol_type = other DNA
catctgtgagtctgtgaggccatgaagg

SEQ ID NO: 2862 - DNA, 28 bp, synthetic construct
  source 1..28: mol_type = other DNA
atctgtgagtctgtgaggccatgaaggg

SEQ ID NO: 2863 - DNA, 28 bp, synthetic construct
  source 1..28: mol_type = other DNA
tctgtgagtctgtgaggccatgaagggg

SEQ ID NO: 2864 - DNA, 28 bp, synthetic construct
  source 1..28: mol_type = other DNA
ctgtgagtctgtgaggccatgaaggggg

SEQ ID NO: 2865 - DNA, 28 bp, synthetic construct
  source 1..28: mol_type = other DNA
tgagtctgtgaggccatgaagggggtgg

SEQ ID NO: 2866 - DNA, 28 bp, synthetic construct
  source 1..28: mol_type = other DNA
gagtctgtgaggccatgaagggggtggg

SEQ ID NO: 2867 - DNA, 28 bp, synthetic construct
  source 1..28: mol_type = other DNA
agtctgtgaggccatgaagggggtgggg

SEQ ID NO: 2868 - DNA, 28 bp, synthetic construct
  source 1..28: mol_type = other DNA
gtctgtgaggccatgaagggggtggggg

SEQ ID NO: 2869 - DNA, 28 bp, synthetic construct
  source 1..28: mol_type = other DNA
ggtgcctggacgcctccccatcctcagg

SEQ ID NO: 2870 - DNA, 28 bp, synthetic construct
  source 1..28: mol_type = other DNA
gaggatggggaggcgtccaggcacctgg

SEQ ID NO: 2871 - DNA, 28 bp, synthetic construct
  source 1..28: mol_type = other DNA
aggatggggaggcgtccaggcacctggg

SEQ ID NO: 2872 - DNA, 28 bp, synthetic construct
  source 1..28: mol_type = other DNA
ggaggcgtccaggcacctgggtcagtgg

SEQ ID NO: 2873 - DNA, 28 bp, synthetic construct
  source 1..28: mol_type = other DNA
gaggcgtccaggcacctgggtcagtggg

SEQ ID NO: 2874 - DNA, 28 bp, synthetic construct
  source 1..28: mol_type = other DNA
aggcgtccaggcacctgggtcagtgggg

SEQ ID NO: 2875 - DNA, 28 bp, synthetic construct
  source 1..28: mol_type = other DNA
ggcgtccaggcacctgggtcagtggggg

SEQ ID NO: 2876 - DNA, 28 bp, synthetic construct
  source 1..28: mol_type = other DNA
tgaggcccccactgacccaggtgcctgg

SEQ ID NO: 2877 - DNA, 28 bp, synthetic construct
  source 1..28: mol_type = other DNA
cctgggtcagtgggggcctcaccgacgg

SEQ ID NO: 2878 - DNA, 28 bp, synthetic construct
  source 1..28: mol_type = other DNA
agtgggggcctcaccgacggctccaagg

SEQ ID NO: 2879 - DNA, 28 bp, synthetic construct
  source 1..28: mol_type = other DNA
gtgggggcctcaccgacggctccaaggg

SEQ ID NO: 2880 - DNA, 28 bp, synthetic construct
  source 1..28: mol_type = other DNA
aactggacccttggagccgtcggtgagg

SEQ ID NO: 2881 - DNA, 28 bp, synthetic construct
  source 1..28: mol_type = other DNA
accgacggctccaagggtccagttttgg

SEQ ID NO: 2882 - DNA, 28 bp, synthetic construct
  source 1..28: mol_type = other DNA
tccaaaactggacccttggagccgtcgg

SEQ ID NO: 2883 - DNA, 28 bp, synthetic construct
  source 1..28: mol_type = other DNA
agctcatgatccaaaactggacccttgg

SEQ ID NO: 2884 - DNA, 28 bp, synthetic construct
  source 1..28: mol_type = other DNA
ctgcgctgagctcatgatccaaaactgg

SEQ ID NO: 2885 - DNA, 28 bp, synthetic construct
  source 1..28: mol_type = other DNA
ttttggatcatgagctcagcgcagaagg

SEQ ID NO: 2886 - DNA, 28 bp, synthetic construct
  source 1..28: mol_type = other DNA
agaaaaaactgcagtatctgagcttcgg

SEQ ID NO: 2887 - DNA, 28 bp, synthetic construct
  source 1..28: mol_type = other DNA
cagttttttcttccctgtctcaaagcgg

SEQ ID NO: 2888 - DNA, 28 bp, synthetic construct
  source 1..28: mol_type = other DNA
ctttgctaacaaccgctttgagacaggg

SEQ ID NO: 2889 - DNA, 28 bp, synthetic construct
  source 1..28: mol_type = other DNA
tctttgctaacaaccgctttgagacagg

SEQ ID NO: 2890 - DNA, 28 bp, synthetic construct
  source 1..28: mol_type = other DNA
aagcggttgttagcaaagaagacgatgg

SEQ ID NO: 2891 - DNA, 28 bp, synthetic construct
  source 1..28: mol_type = other DNA
gctgcatagtccctgcacagacgagagg

SEQ ID NO: 2892 - DNA, 28 bp, synthetic construct
  source 1..28: mol_type = other DNA
gcatagtccctgcacagacgagaggagg

SEQ ID NO: 2893 - DNA, 28 bp, synthetic construct
  source 1..28: mol_type = other DNA
catagtccctgcacagacgagaggaggg

SEQ ID NO: 2894 - DNA, 28 bp, synthetic construct
  source 1..28: mol_type = other DNA
agaggaccctcctctcgtctgtgcaggg

SEQ ID NO: 2895 - DNA, 28 bp, synthetic construct
  source 1..28: mol_type = other DNA
aagaggaccctcctctcgtctgtgcagg

SEQ ID NO: 2896 - DNA, 28 bp, synthetic construct
  source 1..28: mol_type = other DNA
atggggaggtggctagctcctcacctgg

SEQ ID NO: 2897 - DNA, 28 bp, synthetic construct
  source 1..28: mol_type = other DNA
gtggctagctcctcacctggccaaccgg

SEQ ID NO: 2898 - DNA, 28 bp, synthetic construct
  source 1..28: mol_type = other DNA
tcctcacctggccaaccggtcagagagg

SEQ ID NO: 2899 - DNA, 28 bp, synthetic construct
  source 1..28: mol_type = other DNA
tcctctctgaccggttggccaggtgagg

SEQ ID NO: 2900 - DNA, 28 bp, synthetic construct
  source 1..28: mol_type = other DNA
tcacctggccaaccggtcagagaggagg

SEQ ID NO: 2901 - DNA, 28 bp, synthetic construct
  source 1..28: mol_type = other DNA
cttcctcctctctgaccggttggccagg

SEQ ID NO: 2902 - DNA, 28 bp, synthetic construct
  source 1..28: mol_type = other DNA
caacacttcctcctctctgaccggttgg

SEQ ID NO: 2903 - DNA, 28 bp, synthetic construct
  source 1..28: mol_type = other DNA
tcagcaacacttcctcctctctgaccgg

SEQ ID NO: 2904 - DNA, 28 bp, synthetic construct
  source 1..28: mol_type = other DNA
gaagtgttgctgaatattgtccaccagg

SEQ ID NO: 2905 - DNA, 28 bp, synthetic construct
  source 1..28: mol_type = other DNA
aagtgttgctgaatattgtccaccaggg

SEQ ID NO: 2906 - DNA, 28 bp, synthetic construct
  source 1..28: mol_type = other DNA
gtagaggaaatgcggggctccctggtgg

SEQ ID NO: 2907 - DNA, 28 bp, synthetic construct
  source 1..28: mol_type = other DNA
gtggtagaggaaatgcggggctccctgg

SEQ ID NO: 2908 - DNA, 28 bp, synthetic construct
  source 1..28: mol_type = other DNA
tcttcaaggtggtagaggaaatgcgggg

SEQ ID NO: 2909 - DNA, 28 bp, synthetic construct
  source 1..28: mol_type = other DNA
gtcttcaaggtggtagaggaaatgcggg

SEQ ID NO: 2910 - DNA, 28 bp, synthetic construct
  source 1..28: mol_type = other DNA
ggtcttcaaggtggtagaggaaatgcgg

SEQ ID NO: 2911 - DNA, 28 bp, synthetic construct
  source 1..28: mol_type = other DNA
tttaaacgggtcttcaaggtggtagagg

SEQ ID NO: 2912 - DNA, 28 bp, synthetic construct
  source 1..28: mol_type = other DNA
gacaactttaaacgggtcttcaaggtgg

SEQ ID NO: 2913 - DNA, 28 bp, synthetic construct
  source 1..28: mol_type = other DNA
tttgacaactttaaacgggtcttcaagg

SEQ ID NO: 2914 - DNA, 28 bp, synthetic construct
  source 1..28: mol_type = other DNA
gacccgtttaaagttgtcaaactgcagg

SEQ ID NO: 2915 - DNA, 28 bp, synthetic construct
  source 1..28: mol_type = other DNA
acccgtttaaagttgtcaaactgcaggg

SEQ ID NO: 2916 - DNA, 28 bp, synthetic construct
  source 1..28: mol_type = other DNA
gccctgcagtttgacaactttaaacggg

SEQ ID NO: 2917 - DNA, 28 bp, synthetic construct
  source 1..28: mol_type = other DNA
tgccctgcagtttgacaactttaaacgg

SEQ ID NO: 2918 - DNA, 28 bp, synthetic construct
  source 1..28: mol_type = other DNA
aaagttgtcaaactgcagggcagttagg

SEQ ID NO: 2919 - DNA, 28 bp, synthetic construct
  source 1..28: mol_type = other DNA
aagttgtcaaactgcagggcagttaggg

SEQ ID NO: 2920 - DNA, 28 bp, synthetic construct
  source 1..28: mol_type = other DNA
gagacaggtatgcactgcatccacacgg

SEQ ID NO: 2921 - DNA, 28 bp, synthetic construct
  source 1..28: mol_type = other DNA
tgtggatgcagtgcatacctgtctccgg

SEQ ID NO: 2922 - DNA, 28 bp, synthetic construct
  source 1..28: mol_type = other DNA
gcatacctgtctccggcagctcttgagg

SEQ ID NO: 2923 - DNA, 28 bp, synthetic construct
  source 1..28: mol_type = other DNA
catacctgtctccggcagctcttgaggg

SEQ ID NO: 2924 - DNA, 28 bp, synthetic construct
  source 1..28: mol_type = other DNA
atcaccctcaagagctgccggagacagg

SEQ ID NO: 2925 - DNA, 28 bp, synthetic construct
  source 1..28: mol_type = other DNA
aacaggcatcaccctcaagagctgccgg

SEQ ID NO: 2926 - DNA, 28 bp, synthetic construct
  source 1..28: mol_type = other DNA
cagctcttgagggtgatgcctgttttgg

SEQ ID NO: 2927 - DNA, 28 bp, synthetic construct
  source 1..28: mol_type = other DNA
gcctgttttggtgctgatgtcatccagg

SEQ ID NO: 2928 - DNA, 28 bp, synthetic construct
  source 1..28: mol_type = other DNA
acctggatgacatcagcaccaaaacagg

SEQ ID NO: 2929 - DNA, 28 bp, synthetic construct
  source 1..28: mol_type = other DNA
gtgctgatgtcatccaggtctttcttgg

SEQ ID NO: 2930 - DNA, 28 bp, synthetic construct
  source 1..28: mol_type = other DNA
tcatccaggtctttcttggtgcctttgg

SEQ ID NO: 2931 - DNA, 28 bp, synthetic construct
  source 1..28: mol_type = other DNA
ctgtccaaaggcaccaagaaagacctgg

SEQ ID NO: 2932 - DNA, 28 bp, synthetic construct
  source 1..28: mol_type = other DNA
aggtgctgggcaagaagctgtccaaagg

SEQ ID NO: 2933 - DNA, 28 bp, synthetic construct
  source 1..28: mol_type = other DNA
ttcttgcccagcacctcccgaacaaagg

SEQ ID NO: 2934 - DNA, 28 bp, synthetic construct
  source 1..28: mol_type = other DNA
atgaggcctttgttcgggaggtgctggg

SEQ ID NO: 2935 - DNA, 28 bp, synthetic construct
  source 1..28: mol_type = other DNA
gatgaggcctttgttcgggaggtgctgg

SEQ ID NO: 2936 - DNA, 28 bp, synthetic construct
  source 1..28: mol_type = other DNA
acctcccgaacaaaggcctcatcaaagg

SEQ ID NO: 2937 - DNA, 28 bp, synthetic construct
  source 1..28: mol_type = other DNA
gcctttgatgaggcctttgttcgggagg

SEQ ID NO: 2938 - DNA, 28 bp, synthetic construct
  source 1..28: mol_type = other DNA
tatgcctttgatgaggcctttgttcggg

SEQ ID NO: 2939 - DNA, 28 bp, synthetic construct
  source 1..28: mol_type = other DNA
ctatgcctttgatgaggcctttgttcgg

SEQ ID NO: 2940 - DNA, 28 bp, synthetic construct
  source 1..28: mol_type = other DNA
gcctcatcaaaggcatagtaccttgtgg

SEQ ID NO: 2941 - DNA, 28 bp, synthetic construct
  source 1..28: mol_type = other DNA
tccacaaggtactatgcctttgatgagg

SEQ ID NO: 2942 - DNA, 28 bp, synthetic construct
  source 1..28: mol_type = other DNA
gtcaatggtgttctctgactccacaagg

SEQ ID NO: 2943 - DNA, 28 bp, synthetic construct
  source 1..28: mol_type = other DNA
gagaggtgctcaccctctgggatggtgg

SEQ ID NO: 2944 - DNA, 28 bp, synthetic construct
  source 1..28: mol_type = other DNA
atcgagaggtgctcaccctctgggatgg

SEQ ID NO: 2945 - DNA, 28 bp, synthetic construct
  source 1..28: mol_type = other DNA
actcatcgagaggtgctcaccctctggg

SEQ ID NO: 2946 - DNA, 28 bp, synthetic construct
  source 1..28: mol_type = other DNA
tactcatcgagaggtgctcaccctctgg

SEQ ID NO: 2947 - DNA, 28 bp, synthetic construct
  source 1..28: mol_type = other DNA
gcacctctcgatgagtagtgcctgccgg

SEQ ID NO: 2948 - DNA, 28 bp, synthetic construct
  source 1..28: mol_type = other DNA
cacctctcgatgagtagtgcctgccggg

SEQ ID NO: 2949 - DNA, 28 bp, synthetic construct
  source 1..28: mol_type = other DNA
ctcccggcaggcactactcatcgagagg

SEQ ID NO: 2950 - DNA, 28 bp, synthetic construct
  source 1..28: mol_type = other DNA
ctctcgatgagtagtgcctgccgggagg

SEQ ID NO: 2951 - DNA, 28 bp, synthetic construct
  source 1..28: mol_type = other DNA
tctcgatgagtagtgcctgccgggaggg

SEQ ID NO: 2952 - DNA, 28 bp, synthetic construct
  source 1..28: mol_type = other DNA
cgatgagtagtgcctgccgggagggcgg

SEQ ID NO: 2953 - DNA, 28 bp, synthetic construct
  source 1..28: mol_type = other DNA
tagtgcctgccgggagggcggaatctgg

SEQ ID NO: 2954 - DNA, 28 bp, synthetic construct
  source 1..28: mol_type = other DNA
atcttccagattccgccctcccggcagg

SEQ ID NO: 2955 - DNA, 28 bp, synthetic construct
  source 1..28: mol_type = other DNA
gctcatcttccagattccgccctcccgg

SEQ ID NO: 2956 - DNA, 28 bp, synthetic construct
  source 1..28: mol_type = other DNA
ggagggcggaatctggaagatgagctgg

SEQ ID NO: 2957 - DNA, 28 bp, synthetic construct
  source 1..28: mol_type = other DNA
tggaagatgagctggtgcagtagcttgg

SEQ ID NO: 2958 - DNA, 28 bp, synthetic construct
  source 1..28: mol_type = other DNA
ggaagatgagctggtgcagtagcttggg

SEQ ID NO: 2959 - DNA, 28 bp, synthetic construct
  source 1..28: mol_type = other DNA
agatgagctggtgcagtagcttgggcgg

SEQ ID NO: 2960 - DNA, 28 bp, synthetic construct
  source 1..28: mol_type = other DNA
cgcatgcagcagccgctcgagcatgtgg

SEQ ID NO: 2961 - DNA, 28 bp, synthetic construct
  source 1..28: mol_type = other DNA
tgcagcagccgctcgagcatgtggaagg

SEQ ID NO: 2962 - DNA, 28 bp, synthetic construct
  source 1..28: mol_type = other DNA
cagccgctcgagcatgtggaaggtgcgg

SEQ ID NO: 2963 - DNA, 28 bp, synthetic construct
  source 1..28: mol_type = other DNA
ttaccgcaccttccacatgctcgagcgg

SEQ ID NO: 2964 - DNA, 28 bp, synthetic construct
  source 1..28: mol_type = other DNA
ctcgagcatgtggaaggtgcggtaatgg

SEQ ID NO: 2965 - DNA, 28 bp, synthetic construct
  source 1..28: mol_type = other DNA
atgtggaaggtgcggtaatggtccatgg

SEQ ID NO: 2966 - DNA, 28 bp, synthetic construct
  source 1..28: mol_type = other DNA
gcagcggtgctgcagagcgacaccatgg

SEQ ID NO: 2967 - DNA, 28 bp, synthetic construct
  source 1..28: mol_type = other DNA
gtgtcgctctgcagcaccgctgccgtgg

SEQ ID NO: 2968 - DNA, 28 bp, synthetic construct
  source 1..28: mol_type = other DNA
ctggagcagactggcgccacggcagcgg

SEQ ID NO: 2969 - DNA, 28 bp, synthetic construct
  source 1..28: mol_type = other DNA
cgctgccgtggcgccagtctgctccagg

SEQ ID NO: 2970 - DNA, 28 bp, synthetic construct
  source 1..28: mol_type = other DNA
ggaatcctggagcagactggcgccacgg

SEQ ID NO: 2971 - DNA, 28 bp, synthetic construct
  source 1..28: mol_type = other DNA
tgcgctcgggaatcctggagcagactgg

SEQ ID NO: 2972 - DNA, 28 bp, synthetic construct
  source 1..28: mol_type = other DNA
ctccaggattcccgagcgcacccgcagg

SEQ ID NO: 2973 - DNA, 28 bp, synthetic construct
  source 1..28: mol_type = other DNA
tccaggattcccgagcgcacccgcaggg

SEQ ID NO: 2974 - DNA, 28 bp, synthetic construct
  source 1..28: mol_type = other DNA
gccctgcgggtgcgctcgggaatcctgg

SEQ ID NO: 2975 - DNA, 28 bp, synthetic construct
  source 1..28: mol_type = other DNA
acgcggtggccctgcgggtgcgctcggg

SEQ ID NO: 2976 - DNA, 28 bp, synthetic construct
  source 1..28: mol_type = other DNA
gacgcggtggccctgcgggtgcgctcgg

SEQ ID NO: 2977 - DNA, 28 bp, synthetic construct
  source 1..28: mol_type = other DNA
gagcgcacccgcagggccaccgcgtcgg

SEQ ID NO: 2978 - DNA, 28 bp, synthetic construct
  source 1..28: mol_type = other DNA
cccgcagggccaccgcgtcggtcactgg

SEQ ID NO: 2979 - DNA, 28 bp, synthetic construct
  source 1..28: mol_type = other DNA
tccagtgaccgacgcggtggccctgcgg

SEQ ID NO: 2980 - DNA, 28 bp, synthetic construct
  source 1..28: mol_type = other DNA
ggccaccgcgtcggtcactggaaagcgg

SEQ ID NO: 2981 - DNA, 28 bp, synthetic construct
  source 1..28: mol_type = other DNA
gtccgctttccagtgaccgacgcggtgg

SEQ ID NO: 2982 - DNA, 28 bp, synthetic construct
  source 1..28: mol_type = other DNA
agcgtccgctttccagtgaccgacgcgg

SEQ ID NO: 2983 - DNA, 28 bp, synthetic construct
  source 1..28: mol_type = other DNA
tcactggaaagcggacgctagcatcagg

SEQ ID NO: 2984 - DNA, 28 bp, synthetic construct
  source 1..28: mol_type = other DNA
tactcgggtccgtgaggggcgtgtgggg

SEQ ID NO: 2985 - DNA, 28 bp, synthetic construct
  source 1..28: mol_type = other DNA
ttactcgggtccgtgaggggcgtgtggg

SEQ ID NO: 2986 - DNA, 28 bp, synthetic construct
  source 1..28: mol_type = other DNA
gttactcgggtccgtgaggggcgtgtgg

SEQ ID NO: 2987 - DNA, 28 bp, synthetic construct
  source 1..28: mol_type = other DNA
ctcgatggttactcgggtccgtgagggg

SEQ ID NO: 2988 - DNA, 28 bp, synthetic construct
  source 1..28: mol_type = other DNA
gctcgatggttactcgggtccgtgaggg

SEQ ID NO: 2989 - DNA, 28 bp, synthetic construct
  source 1..28: mol_type = other DNA
ggctcgatggttactcgggtccgtgagg

SEQ ID NO: 2990 - DNA, 28 bp, synthetic construct
  source 1..28: mol_type = other DNA
cggacccgagtaaccatcgagccagagg

SEQ ID NO: 2991 - DNA, 28 bp, synthetic construct
  source 1..28: mol_type = other DNA
atcgcctctggctcgatggttactcggg

SEQ ID NO: 2992 - DNA, 28 bp, synthetic construct
  source 1..28: mol_type = other DNA
tatcgcctctggctcgatggttactcgg

SEQ ID NO: 2993 - DNA, 28 bp, synthetic construct
  source 1..28: mol_type = other DNA
aggacgtgtatcgcctctggctcgatgg

SEQ ID NO: 2994 - DNA, 28 bp, synthetic construct
  source 1..28: mol_type = other DNA
tatcgacgaggacgtgtatcgcctctgg

SEQ ID NO: 2995 - DNA, 28 bp, synthetic construct
  source 1..28: mol_type = other DNA
gaggcgatacacgtcctcgtcgataagg

SEQ ID NO: 2996 - DNA, 28 bp, synthetic construct
  source 1..28: mol_type = other DNA
aggcgatacacgtcctcgtcgataaggg

SEQ ID NO: 2997 - DNA, 28 bp, synthetic construct
  source 1..28: mol_type = other DNA
gtggggaacacgacccttatcgacgagg

SEQ ID NO: 2998 - DNA, 28 bp, synthetic construct
  source 1..28: mol_type = other DNA
ttccccacgaagatgtccagctcactgg

SEQ ID NO: 2999 - DNA, 28 bp, synthetic construct
  source 1..28: mol_type = other DNA
gaccagtgagctggacatcttcgtgggg

SEQ ID NO: 3000 - DNA, 28 bp, synthetic construct
  source 1..28: mol_type = other DNA
tgaccagtgagctggacatcttcgtggg

SEQ ID NO: 3001 - DNA, 28 bp, synthetic construct
  source 1..28: mol_type = other DNA
atgaccagtgagctggacatcttcgtgg

SEQ ID NO: 3002 - DNA, 28 bp, synthetic construct
  source 1..28: mol_type = other DNA
acgaagatgtccagctcactggtcatgg

SEQ ID NO: 3003 - DNA, 28 bp, synthetic construct
  source 1..28: mol_type = other DNA
ccagctcactggtcatggcgacgcccgg

SEQ ID NO: 3004 - DNA, 28 bp, synthetic construct
  source 1..28: mol_type = other DNA
cagctcactggtcatggcgacgcccggg

SEQ ID NO: 3005 - DNA, 28 bp, synthetic construct
  source 1..28: mol_type = other DNA
agctcactggtcatggcgacgcccgggg

SEQ ID NO: 3006 - DNA, 28 bp, synthetic construct
  source 1..28: mol_type = other DNA
cgcccggggccgcagcgccccgagcagg

SEQ ID NO: 3007 - DNA, 28 bp, synthetic construct
  source 1..28: mol_type = other DNA
ctcctgctcggggcgctgcggccccggg

SEQ ID NO: 3008 - DNA, 28 bp, synthetic construct
  source 1..28: mol_type = other DNA
gctcctgctcggggcgctgcggccccgg

SEQ ID NO: 3009 - DNA, 28 bp, synthetic construct
  source 1..28: mol_type = other DNA
gtgctcgctcctgctcggggcgctgcgg

SEQ ID NO: 3010 - DNA, 28 bp, synthetic construct
  source 1..28: mol_type = other DNA
gccccgagcaggagcgagcactgctcgg

SEQ ID NO: 3011 - DNA, 28 bp, synthetic construct
  source 1..28: mol_type = other DNA
ccccgagcaggagcgagcactgctcggg

SEQ ID NO: 3012 - DNA, 28 bp, synthetic construct
  source 1..28: mol_type = other DNA
tcccgagcagtgctcgctcctgctcggg

SEQ ID NO: 3013 - DNA, 28 bp, synthetic construct
  source 1..28: mol_type = other DNA
gtcccgagcagtgctcgctcctgctcgg

SEQ ID NO: 3014 - DNA, 28 bp, synthetic construct
  source 1..28: mol_type = other DNA
agcaggagcgagcactgctcgggactgg

SEQ ID NO: 3015 - DNA, 28 bp, synthetic construct
  source 1..28: mol_type = other DNA
tgctcgggactggcgcgccgccttcagg

SEQ ID NO: 3016 - DNA, 28 bp, synthetic construct
  source 1..28: mol_type = other DNA
tggcgcgccgccttcaggccacttccgg

SEQ ID NO: 3017 - DNA, 28 bp, synthetic construct
  source 1..28: mol_type = other DNA
ggcgcgccgccttcaggccacttccggg

SEQ ID NO: 3018 - DNA, 28 bp, synthetic construct
  source 1..28: mol_type = other DNA
ggcgctcccggaagtggcctgaaggcgg

SEQ ID NO: 3019 - DNA, 28 bp, synthetic construct
  source 1..28: mol_type = other DNA
ctcggcgctcccggaagtggcctgaagg

SEQ ID NO: 3020 - DNA, 28 bp, synthetic construct
  source 1..28: mol_type = other DNA
agcggaatctcggcgctcccggaagtgg

SEQ ID NO: 3021 - DNA, 28 bp, synthetic construct
  source 1..28: mol_type = other DNA
tccgggagcgccgagattccgctcgcgg

SEQ ID NO: 3022 - DNA, 28 bp, synthetic construct
  source 1..28: mol_type = other DNA
gccgcgagcggaatctcggcgctcccgg

SEQ ID NO: 3023 - DNA, 28 bp, synthetic construct
  source 1..28: mol_type = other DNA
agcgccgagattccgctcgcggcatcgg

SEQ ID NO: 3024 - DNA, 28 bp, synthetic construct
  source 1..28: mol_type = other DNA
gcgccgagattccgctcgcggcatcggg

SEQ ID NO: 3025 - DNA, 28 bp, synthetic construct
  source 1..28: mol_type = other DNA
ggtcccgatgccgcgagcggaatctcgg

SEQ ID NO: 3026 - DNA, 28 bp, synthetic construct
  source 1..28: mol_type = other DNA
ataagctgggtcccgatgccgcgagcgg

SEQ ID NO: 3027 - DNA, 28 bp, synthetic construct
  source 1..28: mol_type = other DNA
tcgggacccagcttatgaccacttccgg

SEQ ID NO: 3028 - DNA, 28 bp, synthetic construct
  source 1..28: mol_type = other DNA
cgggacccagcttatgaccacttccggg

SEQ ID NO: 3029 - DNA, 28 bp, synthetic construct
  source 1..28: mol_type = other DNA
tgtgtcccggaagtggtcataagctggg

SEQ ID NO: 3030 - DNA, 28 bp, synthetic construct
  source 1..28: mol_type = other DNA
ctgtgtcccggaagtggtcataagctgg

SEQ ID NO: 3031 - DNA, 28 bp, synthetic construct
  source 1..28: mol_type = other DNA
tgaccacttccgggacacagccagtcgg

SEQ ID NO: 3032 - DNA, 28 bp, synthetic construct
  source 1..28: mol_type = other DNA
gaccacttccgggacacagccagtcggg

SEQ ID NO: 3033 - DNA, 28 bp, synthetic construct
  source 1..28: mol_type = other DNA
accacttccgggacacagccagtcgggg

SEQ ID NO: 3034 - DNA, 28 bp, synthetic construct
  source 1..28: mol_type = other DNA
tccccgactggctgtgtcccggaagtgg

SEQ ID NO: 3035 - DNA, 28 bp, synthetic construct
  source 1..28: mol_type = other DNA
acttccgggacacagccagtcggggagg

SEQ ID NO: 3036 - DNA, 28 bp, synthetic construct
  source 1..28: mol_type = other DNA
cttccgggacacagccagtcggggaggg

SEQ ID NO: 3037 - DNA, 28 bp, synthetic construct
  source 1..28: mol_type = other DNA
ttccgggacacagccagtcggggagggg

SEQ ID NO: 3038 - DNA, 28 bp, synthetic construct
  source 1..28: mol_type = other DNA
gtcccctccccgactggctgtgtcccgg

SEQ ID NO: 3039 - DNA, 28 bp, synthetic construct
  source 1..28: mol_type = other DNA
gggacacagccagtcggggaggggacgg

SEQ ID NO: 3040 - DNA, 28 bp, synthetic construct
  source 1..28: mol_type = other DNA
ggacacagccagtcggggaggggacggg

SEQ ID NO: 3041 - DNA, 28 bp, synthetic construct
  source 1..28: mol_type = other DNA
gacacagccagtcggggaggggacgggg

SEQ ID NO: 3042 - DNA, 28 bp, synthetic construct
  source 1..28: mol_type = other DNA
acagccagtcggggaggggacggggcgg

SEQ ID NO: 3043 - DNA, 28 bp, synthetic construct
  source 1..28: mol_type = other DNA
cagccagtcggggaggggacggggcggg

SEQ ID NO: 3044 - DNA, 28 bp, synthetic construct
  source 1..28: mol_type = other DNA
gctcccgccccgtcccctccccgactgg

SEQ ID NO: 3045 - DNA, 28 bp, synthetic construct
  source 1..28: mol_type = other DNA
agtcggggaggggacggggcgggagcgg

SEQ ID NO: 3046 - DNA, 28 bp, synthetic construct
  source 1..28: mol_type = other DNA
gggaggggacggggcgggagcggcgagg

SEQ ID NO: 3047 - DNA, 28 bp, synthetic construct
  source 1..28: mol_type = other DNA
ggaggggacggggcgggagcggcgaggg

SEQ ID NO: 3048 - DNA, 28 bp, synthetic construct
  source 1..28: mol_type = other DNA
cggggcgggagcggcgagggaagagagg

SEQ ID NO: 3049 - DNA, 28 bp, synthetic construct
  source 1..28: mol_type = other DNA
ggggcgggagcggcgagggaagagaggg

SEQ ID NO: 3050 - DNA, 28 bp, synthetic construct
  source 1..28: mol_type = other DNA
gggcgggagcggcgagggaagagagggg

SEQ ID NO: 3051 - DNA, 28 bp, synthetic construct
  source 1..28: mol_type = other DNA
ggcgggagcggcgagggaagagaggggg

SEQ ID NO: 3052 - DNA, 28 bp, synthetic construct
  source 1..28: mol_type = other DNA
gggagcggcgagggaagagagggggagg

SEQ ID NO: 3053 - DNA, 28 bp, synthetic construct
  source 1..28: mol_type = other DNA
gagggaagagagggggaggcctgcgcgg

SEQ ID NO: 3054 - DNA, 28 bp, synthetic construct
  source 1..28: mol_type = other DNA
ggaagagagggggaggcctgcgcggagg

SEQ ID NO: 3055 - DNA, 28 bp, synthetic construct
  source 1..28: mol_type = other DNA
gggaggaagcggtgctcctccgcgcagg

SEQ ID NO: 3056 - DNA, 28 bp, synthetic construct
  source 1..28: mol_type = other DNA
gcggaggagcaccgcttcctcccgccgg

SEQ ID NO: 3057 - DNA, 28 bp, synthetic construct
  source 1..28: mol_type = other DNA
cggaggagcaccgcttcctcccgccggg

SEQ ID NO: 3058 - DNA, 28 bp, synthetic construct
  source 1..28: mol_type = other DNA
aggagcaccgcttcctcccgccgggagg

SEQ ID NO: 3059 - DNA, 28 bp, synthetic construct
  source 1..28: mol_type = other DNA
ggagcaccgcttcctcccgccgggaggg

SEQ ID NO: 3060 - DNA, 28 bp, synthetic construct
  source 1..28: mol_type = other DNA
gagcaccgcttcctcccgccgggagggg

SEQ ID NO: 3061 - DNA, 28 bp, synthetic construct
  source 1..28: mol_type = other DNA
agcaccgcttcctcccgccgggaggggg

SEQ ID NO: 3062 - DNA, 28 bp, synthetic construct
  source 1..28: mol_type = other DNA
gactccccctcccggcgggaggaagcgg

SEQ ID NO: 3063 - DNA, 28 bp, synthetic construct
  source 1..28: mol_type = other DNA
ttcctcccgccgggagggggagtcccgg

SEQ ID NO: 3064 - DNA, 28 bp, synthetic construct
  source 1..28: mol_type = other DNA
tcctcccgccgggagggggagtcccggg

SEQ ID NO: 3065 - DNA, 28 bp, synthetic construct
  source 1..28: mol_type = other DNA
gcccgggactccccctcccggcgggagg

SEQ ID NO: 3066 - DNA, 28 bp, synthetic construct
  source 1..28: mol_type = other DNA
ggagcccgggactccccctcccggcggg

SEQ ID NO: 3067 - DNA, 28 bp, synthetic construct
  source 1..28: mol_type = other DNA
aggagcccgggactccccctcccggcgg

SEQ ID NO: 3068 - DNA, 28 bp, synthetic construct
  source 1..28: mol_type = other DNA
cgcaggagcccgggactccccctcccgg

SEQ ID NO: 3069 - DNA, 28 bp, synthetic construct
  source 1..28: mol_type = other DNA
ggagggagacaggacgcaggagcccggg

SEQ ID NO: 3070 - DNA, 28 bp, synthetic construct
  source 1..28: mol_type = other DNA
gggagggagacaggacgcaggagcccgg

SEQ ID NO: 3071 - DNA, 28 bp, synthetic construct
  source 1..28: mol_type = other DNA
ggctcctgcgtcctgtctccctccccgg

SEQ ID NO: 3072 - DNA, 28 bp, synthetic construct
  source 1..28: mol_type = other DNA
acggccggggagggagacaggacgcagg

SEQ ID NO: 3073 - DNA, 28 bp, synthetic construct
  source 1..28: mol_type = other DNA
cctgtctccctccccggccgtctgcagg

SEQ ID NO: 3074 - DNA, 28 bp, synthetic construct
  source 1..28: mol_type = other DNA
tcgtgctcctgcagacggccggggaggg

SEQ ID NO: 3075 - DNA, 28 bp, synthetic construct
  source 1..28: mol_type = other DNA
ttcgtgctcctgcagacggccggggagg

SEQ ID NO: 3076 - DNA, 28 bp, synthetic construct
  source 1..28: mol_type = other DNA
tccccggccgtctgcaggagcacgaagg

SEQ ID NO: 3077 - DNA, 28 bp, synthetic construct
  source 1..28: mol_type = other DNA
ccccggccgtctgcaggagcacgaaggg

SEQ ID NO: 3078 - DNA, 28 bp, synthetic construct
  source 1..28: mol_type = other DNA
tcccttcgtgctcctgcagacggccggg

SEQ ID NO: 3079 - DNA, 28 bp, synthetic construct
  source 1..28: mol_type = other DNA
ctcccttcgtgctcctgcagacggccgg

SEQ ID NO: 3080 - DNA, 28 bp, synthetic construct
  source 1..28: mol_type = other DNA
ggcactcccttcgtgctcctgcagacgg

SEQ ID NO: 3081 - DNA, 28 bp, synthetic construct
  source 1..28: mol_type = other DNA
agggagtgcctcctcttcgtctcctcgg

SEQ ID NO: 3082 - DNA, 28 bp, synthetic construct
  source 1..28: mol_type = other DNA
tacggggaccgaggagacgaagaggagg

SEQ ID NO: 3083 - DNA, 28 bp, synthetic construct
  source 1..28: mol_type = other DNA
agttacggggaccgaggagacgaagagg

SEQ ID NO: 3084 - DNA, 28 bp, synthetic construct
  source 1..28: mol_type = other DNA
gtgaggggagaagttacggggaccgagg

SEQ ID NO: 3085 - DNA, 28 bp, synthetic construct
  source 1..28: mol_type = other DNA
ggaggaagtgaggggagaagttacgggg

SEQ ID NO: 3086 - DNA, 28 bp, synthetic construct
  source 1..28: mol_type = other DNA
aggaggaagtgaggggagaagttacggg

SEQ ID NO: 3087 - DNA, 28 bp, synthetic construct
  source 1..28: mol_type = other DNA
caggaggaagtgaggggagaagttacgg

SEQ ID NO: 3088 - DNA, 28 bp, synthetic construct
  source 1..28: mol_type = other DNA
cgtaacttctcccctcacttcctcctgg

SEQ ID NO: 3089 - DNA, 28 bp, synthetic construct
  source 1..28: mol_type = other DNA
gggagaaaagccaggaggaagtgagggg

SEQ ID NO: 3090 - DNA, 28 bp, synthetic construct
  source 1..28: mol_type = other DNA
tgggagaaaagccaggaggaagtgaggg

SEQ ID NO: 3091 - DNA, 28 bp, synthetic construct
  source 1..28: mol_type = other DNA
gtgggagaaaagccaggaggaagtgagg

SEQ ID NO: 3092 - DNA, 28 bp, synthetic construct
  source 1..28: mol_type = other DNA
cagagaaggtgggagaaaagccaggagg

SEQ ID NO: 3093 - DNA, 28 bp, synthetic construct
  source 1..28: mol_type = other DNA
gggcagagaaggtgggagaaaagccagg

SEQ ID NO: 3094 - DNA, 28 bp, synthetic construct
  source 1..28: mol_type = other DNA
tttctcccaccttctctgccctcttcgg

SEQ ID NO: 3095 - DNA, 28 bp, synthetic construct
  source 1..28: mol_type = other DNA
ttctcccaccttctctgccctcttcggg

SEQ ID NO: 3096 - DNA, 28 bp, synthetic construct
  source 1..28: mol_type = other DNA
aggtcccgaagagggcagagaaggtggg

SEQ ID NO: 3097 - DNA, 28 bp, synthetic construct
  source 1..28: mol_type = other DNA
gaggtcccgaagagggcagagaaggtgg

SEQ ID NO: 3098 - DNA, 28 bp, synthetic construct
  source 1..28: mol_type = other DNA
taggaggtcccgaagagggcagagaagg

SEQ ID NO: 3099 - DNA, 28 bp, synthetic construct
  source 1..28: mol_type = other DNA
ggtcaaacttaggaggtcccgaagaggg

SEQ ID NO: 3100 - DNA, 28 bp, synthetic construct
  source 1..28: mol_type = other DNA
aggtcaaacttaggaggtcccgaagagg

SEQ ID NO: 3101 - DNA, 28 bp, synthetic construct
  source 1..28: mol_type = other DNA
gtttaggatacaggtcaaacttaggagg

SEQ ID NO: 3102 - DNA, 28 bp, synthetic construct
  source 1..28: mol_type = other DNA
taagtttaggatacaggtcaaacttagg

SEQ ID NO: 3103 - DNA, 28 bp, synthetic construct
  source 1..28: mol_type = other DNA
taagtttgacctgtatcctaaacttagg

SEQ ID NO: 3104 - DNA, 28 bp, synthetic construct
  source 1..28: mol_type = other DNA
aagtttgacctgtatcctaaacttaggg

SEQ ID NO: 3105 - DNA, 28 bp, synthetic construct
  source 1..28: mol_type = other DNA
agtttgacctgtatcctaaacttagggg

SEQ ID NO: 3106 - DNA, 28 bp, synthetic construct
  source 1..28: mol_type = other DNA
tgtgaaacccctaagtttaggatacagg

SEQ ID NO: 3107 - DNA, 28 bp, synthetic construct
  source 1..28: mol_type = other DNA
tgtatcctaaacttaggggtttcacagg

SEQ ID NO: 3108 - DNA, 28 bp, synthetic construct
  source 1..28: mol_type = other DNA
gtatcctaaacttaggggtttcacaggg

SEQ ID NO: 3109 - DNA, 28 bp, synthetic construct
  source 1..28: mol_type = other DNA
agagccctgtgaaacccctaagtttagg

SEQ ID NO: 3110 - DNA, 28 bp, synthetic construct
  source 1..28: mol_type = other DNA
gctctatcctaaatctccgcaaaaatgg

SEQ ID NO: 3111 - DNA, 28 bp, synthetic construct
  source 1..28: mol_type = other DNA
ctctatcctaaatctccgcaaaaatggg

SEQ ID NO: 3112 - DNA, 28 bp, synthetic construct
  source 1..28: mol_type = other DNA
tctatcctaaatctccgcaaaaatgggg

SEQ ID NO: 3113 - DNA, 28 bp, synthetic construct
  source 1..28: mol_type = other DNA
tcataccccatttttgcggagatttagg

SEQ ID NO: 3114 - DNA, 28 bp, synthetic construct
  source 1..28: mol_type = other DNA
gaagtcgggtcataccccatttttgcgg

SEQ ID NO: 3115 - DNA, 28 bp, synthetic construct
  source 1..28: mol_type = other DNA
aaaatggggtatgacccgacttcctcgg

SEQ ID NO: 3116 - DNA, 28 bp, synthetic construct
  source 1..28: mol_type = other DNA
aaatggggtatgacccgacttcctcggg

SEQ ID NO: 3117 - DNA, 28 bp, synthetic construct
  source 1..28: mol_type = other DNA
tgacccgacttcctcgggctcttgctgg

SEQ ID NO: 3118 - DNA, 28 bp, synthetic construct
  source 1..28: mol_type = other DNA
tctccagcaagagcccgaggaagtcggg

SEQ ID NO: 3119 - DNA, 28 bp, synthetic construct
  source 1..28: mol_type = other DNA
gtctccagcaagagcccgaggaagtcgg

SEQ ID NO: 3120 - DNA, 28 bp, synthetic construct
  source 1..28: mol_type = other DNA
acttcctcgggctcttgctggagactgg

SEQ ID NO: 3121 - DNA, 28 bp, synthetic construct
  source 1..28: mol_type = other DNA
caaaccagtctccagcaagagcccgagg

SEQ ID NO: 3122 - DNA, 28 bp, synthetic construct
  source 1..28: mol_type = other DNA
ccatcctgcgcatgagcacctctcctgg

SEQ ID NO: 3123 - DNA, 28 bp, synthetic construct
  source 1..28: mol_type = other DNA
catcctgcgcatgagcacctctcctggg

SEQ ID NO: 3124 - DNA, 28 bp, synthetic construct
  source 1..28: mol_type = other DNA
aaacccaggagaggtgctcatgcgcagg

SEQ ID NO: 3125 - DNA, 28 bp, synthetic construct
  source 1..28: mol_type = other DNA
tgcgcatgagcacctctcctgggtttgg

SEQ ID NO: 3126 - DNA, 28 bp, synthetic construct
  source 1..28: mol_type = other DNA
gcgcatgagcacctctcctgggtttggg

SEQ ID NO: 3127 - DNA, 28 bp, synthetic construct
  source 1..28: mol_type = other DNA
cgcatgagcacctctcctgggtttgggg

SEQ ID NO: 3128 - DNA, 28 bp, synthetic construct
  source 1..28: mol_type = other DNA
ggagcaggtgccccaaacccaggagagg

SEQ ID NO: 3129 - DNA, 28 bp, synthetic construct
  source 1..28: mol_type = other DNA
aggtgggagcaggtgccccaaacccagg

SEQ ID NO: 3130 - DNA, 28 bp, synthetic construct
  source 1..28: mol_type = other DNA
gggtttggggcacctgctcccaccttgg

SEQ ID NO: 3131 - DNA, 28 bp, synthetic construct
  source 1..28: mol_type = other DNA
gtgggattaaaaccaaggtgggagcagg

SEQ ID NO: 3132 - DNA, 28 bp, synthetic construct
  source 1..28: mol_type = other DNA
ctgggggtgggattaaaaccaaggtggg

SEQ ID NO: 3133 - DNA, 28 bp, synthetic construct
  source 1..28: mol_type = other DNA
gctgggggtgggattaaaaccaaggtgg

SEQ ID NO: 3134 - DNA, 28 bp, synthetic construct
  source 1..28: mol_type = other DNA
ggggctgggggtgggattaaaaccaagg

SEQ ID NO: 3135 - DNA, 28 bp, synthetic construct
  source 1..28: mol_type = other DNA
gtcagtagctcgtggggctgggggtggg

SEQ ID NO: 3136 - DNA, 28 bp, synthetic construct
  source 1..28: mol_type = other DNA
cgtcagtagctcgtggggctgggggtgg

SEQ ID NO: 3137 - DNA, 28 bp, synthetic construct
  source 1..28: mol_type = other DNA
agacgtcagtagctcgtggggctggggg

SEQ ID NO: 3138 - DNA, 28 bp, synthetic construct
  source 1..28: mol_type = other DNA
gagacgtcagtagctcgtggggctgggg

SEQ ID NO: 3139 - DNA, 28 bp, synthetic construct
  source 1..28: mol_type = other DNA
agagacgtcagtagctcgtggggctggg

SEQ ID NO: 3140 - DNA, 28 bp, synthetic construct
  source 1..28: mol_type = other DNA
tagagacgtcagtagctcgtggggctgg

SEQ ID NO: 3141 - DNA, 28 bp, synthetic construct
  source 1..28: mol_type = other DNA
gaattagagacgtcagtagctcgtgggg

SEQ ID NO: 3142 - DNA, 28 bp, synthetic construct
  source 1..28: mol_type = other DNA
agaattagagacgtcagtagctcgtggg

SEQ ID NO: 3143 - DNA, 28 bp, synthetic construct
  source 1..28: mol_type = other DNA
cagaattagagacgtcagtagctcgtgg

SEQ ID NO: 3144 - DNA, 28 bp, synthetic construct
  source 1..28: mol_type = other DNA
taattctgcccctccgagctctgcctgg

SEQ ID NO: 3145 - DNA, 28 bp, synthetic construct
  source 1..28: mol_type = other DNA
gtggacttccaggcagagctcggagggg

SEQ ID NO: 3146 - DNA, 28 bp, synthetic construct
  source 1..28: mol_type = other DNA
tgtggacttccaggcagagctcggaggg

SEQ ID NO: 3147 - DNA, 28 bp, synthetic construct
  source 1..28: mol_type = other DNA
atgtggacttccaggcagagctcggagg

SEQ ID NO: 3148 - DNA, 28 bp, synthetic construct
  source 1..28: mol_type = other DNA
cggatgtggacttccaggcagagctcgg

SEQ ID NO: 3149 - DNA, 28 bp, synthetic construct
  source 1..28: mol_type = other DNA
cgagctctgcctggaagtccacatccgg

SEQ ID NO: 3150 - DNA, 28 bp, synthetic construct
  source 1..28: mol_type = other DNA
gctctgcctggaagtccacatccggagg

SEQ ID NO: 3151 - DNA, 28 bp, synthetic construct
  source 1..28: mol_type = other DNA
ctctgcctggaagtccacatccggaggg

SEQ ID NO: 3152 - DNA, 28 bp, synthetic construct
  source 1..28: mol_type = other DNA
tctgcctggaagtccacatccggagggg

SEQ ID NO: 3153 - DNA, 28 bp, synthetic construct
  source 1..28: mol_type = other DNA
gcggcccctccggatgtggacttccagg

SEQ ID NO: 3154 - DNA, 28 bp, synthetic construct
  source 1..28: mol_type = other DNA
gtccacatccggaggggccgcctatcgg

SEQ ID NO: 3155 - DNA, 28 bp, synthetic construct
  source 1..28: mol_type = other DNA
ggccgataggcggcccctccggatgtgg

SEQ ID NO: 3156 - DNA, 28 bp, synthetic construct
  source 1..28: mol_type = other DNA
agacttggccgataggcggcccctccgg

SEQ ID NO: 3157 - DNA, 28 bp, synthetic construct
  source 1..28: mol_type = other DNA
agtgtggatagacttggccgataggcgg

SEQ ID NO: 3158 - DNA, 28 bp, synthetic construct
  source 1..28: mol_type = other DNA
aagagtgtggatagacttggccgatagg

SEQ ID NO: 3159 - DNA, 28 bp, synthetic construct
  source 1..28: mol_type = other DNA
cttacgggaagagtgtggatagacttgg

SEQ ID NO: 3160 - DNA, 28 bp, synthetic construct
  source 1..28: mol_type = other DNA
ttttgaggggcttacgggaagagtgtgg

SEQ ID NO: 3161 - DNA, 28 bp, synthetic construct
  source 1..28: mol_type = other DNA
tatgttgagcttttgaggggcttacggg

SEQ ID NO: 3162 - DNA, 28 bp, synthetic construct
  source 1..28: mol_type = other DNA
atatgttgagcttttgaggggcttacgg

SEQ ID NO: 3163 - DNA, 28 bp, synthetic construct
  source 1..28: mol_type = other DNA
gtctagaatatgttgagcttttgagggg

SEQ ID NO: 3164 - DNA, 28 bp, synthetic construct
  source 1..28: mol_type = other DNA
tgtctagaatatgttgagcttttgaggg

SEQ ID NO: 3165 - DNA, 28 bp, synthetic construct
  source 1..28: mol_type = other DNA
ctgtctagaatatgttgagcttttgagg

SEQ ID NO: 3166 - DNA, 28 bp, synthetic construct
  source 1..28: mol_type = other DNA
gaaagaaacaaatggggagaggcagagg

SEQ ID NO: 3167 - DNA, 28 bp, synthetic construct
  source 1..28: mol_type = other DNA
acgcaggaaagaaacaaatggggagagg

SEQ ID NO: 3168 - DNA, 28 bp, synthetic construct
  source 1..28: mol_type = other DNA
tagggacgcaggaaagaaacaaatgggg

SEQ ID NO: 3169 - DNA, 28 bp, synthetic construct
  source 1..28: mol_type = other DNA
atagggacgcaggaaagaaacaaatggg

SEQ ID NO: 3170 - DNA, 28 bp, synthetic construct
  source 1..28: mol_type = other DNA
gatagggacgcaggaaagaaacaaatgg

SEQ ID NO: 3171 - DNA, 28 bp, synthetic construct
  source 1..28: mol_type = other DNA
agggctgtcactgagatagggacgcagg

SEQ ID NO: 3172 - DNA, 28 bp, synthetic construct
  source 1..28: mol_type = other DNA
ggatgttagggctgtcactgagataggg

SEQ ID NO: 3173 - DNA, 28 bp, synthetic construct
  source 1..28: mol_type = other DNA
tggatgttagggctgtcactgagatagg

SEQ ID NO: 3174 - DNA, 28 bp, synthetic construct
  source 1..28: mol_type = other DNA
ctcgtatgagaactggtggatgttaggg

SEQ ID NO: 3175 - DNA, 28 bp, synthetic construct
  source 1..28: mol_type = other DNA
tctcgtatgagaactggtggatgttagg

SEQ ID NO: 3176 - DNA, 28 bp, synthetic construct
  source 1..28: mol_type = other DNA
tccaccagttctcatacgagaaacctgg

SEQ ID NO: 3177 - DNA, 28 bp, synthetic construct
  source 1..28: mol_type = other DNA
ccaccagttctcatacgagaaacctggg

SEQ ID NO: 3178 - DNA, 28 bp, synthetic construct
  source 1..28: mol_type = other DNA
acgcccaggtttctcgtatgagaactgg

SEQ ID NO: 3179 - DNA, 28 bp, synthetic construct
  source 1..28: mol_type = other DNA
gagagaggagtctggaagaacgcccagg

SEQ ID NO: 3180 - DNA, 28 bp, synthetic construct
  source 1..28: mol_type = other DNA
aactgaatgtggggagagaggagtctgg

SEQ ID NO: 3181 - DNA, 28 bp, synthetic construct
  source 1..28: mol_type = other DNA
gactcctctctccccacattcagttcgg

SEQ ID NO: 3182 - DNA, 28 bp, synthetic construct
  source 1..28: mol_type = other DNA
tcagccgaactgaatgtggggagagagg

SEQ ID NO: 3183 - DNA, 28 bp, synthetic construct
  source 1..28: mol_type = other DNA
aggcaaatcagccgaactgaatgtgggg

SEQ ID NO: 3184 - DNA, 28 bp, synthetic construct
  source 1..28: mol_type = other DNA
gaggcaaatcagccgaactgaatgtggg

SEQ ID NO: 3185 - DNA, 28 bp, synthetic construct
  source 1..28: mol_type = other DNA
ggaggcaaatcagccgaactgaatgtgg

SEQ ID NO: 3186 - DNA, 28 bp, synthetic construct
  source 1..28: mol_type = other DNA
caaacagatactagaaatattcgggagg

SEQ ID NO: 3187 - DNA, 28 bp, synthetic construct
  source 1..28: mol_type = other DNA
ggacaaacagatactagaaatattcggg

SEQ ID NO: 3188 - DNA, 28 bp, synthetic construct
  source 1..28: mol_type = other DNA
aggacaaacagatactagaaatattcgg

SEQ ID NO: 3189 - DNA, 28 bp, synthetic construct
  source 1..28: mol_type = other DNA
tggggcagcatcagtgggggtggagagg

SEQ ID NO: 3190 - DNA, 28 bp, synthetic construct
  source 1..28: mol_type = other DNA
acggctggggcagcatcagtgggggtgg

SEQ ID NO: 3191 - DNA, 28 bp, synthetic construct
  source 1..28: mol_type = other DNA
aagacggctggggcagcatcagtggggg

SEQ ID NO: 3192 - DNA, 28 bp, synthetic construct
  source 1..28: mol_type = other DNA
aaagacggctggggcagcatcagtgggg

SEQ ID NO: 3193 - DNA, 28 bp, synthetic construct
  source 1..28: mol_type = other DNA
gaaagacggctggggcagcatcagtggg

SEQ ID NO: 3194 - DNA, 28 bp, synthetic construct
  source 1..28: mol_type = other DNA
agaaagacggctggggcagcatcagtgg

SEQ ID NO: 3195 - DNA, 28 bp, synthetic construct
  source 1..28: mol_type = other DNA
ggagagctaagcagaaagacggctgggg

SEQ ID NO: 3196 - DNA, 28 bp, synthetic construct
  source 1..28: mol_type = other DNA
aggagagctaagcagaaagacggctggg

SEQ ID NO: 3197 - DNA, 28 bp, synthetic construct
  source 1..28: mol_type = other DNA
aaggagagctaagcagaaagacggctgg

SEQ ID NO: 3198 - DNA, 28 bp, synthetic construct
  source 1..28: mol_type = other DNA
gagcaaggagagctaagcagaaagacgg

SEQ ID NO: 3199 - DNA, 28 bp, synthetic construct
  source 1..28: mol_type = other DNA
gtaacggtgtcaaagagcaagagcaagg

SEQ ID NO: 3200 - DNA, 28 bp, synthetic construct
  source 1..28: mol_type = other DNA
gggacataaacagggagattagtaacgg

SEQ ID NO: 3201 - DNA, 28 bp, synthetic construct
  source 1..28: mol_type = other DNA
ctccctgtttatgtcccctccccgcagg

SEQ ID NO: 3202 - DNA, 28 bp, synthetic construct
  source 1..28: mol_type = other DNA
tccctgtttatgtcccctccccgcaggg

SEQ ID NO: 3203 - DNA, 28 bp, synthetic construct
  source 1..28: mol_type = other DNA
accctgcggggaggggacataaacaggg

SEQ ID NO: 3204 - DNA, 28 bp, synthetic construct
  source 1..28: mol_type = other DNA
gaccctgcggggaggggacataaacagg

SEQ ID NO: 3205 - DNA, 28 bp, synthetic construct
  source 1..28: mol_type = other DNA
gtttatgtcccctccccgcagggtccgg

SEQ ID NO: 3206 - DNA, 28 bp, synthetic construct
  source 1..28: mol_type = other DNA
tgtgtgggccggaccctgcggggagggg

SEQ ID NO: 3207 - DNA, 28 bp, synthetic construct
  source 1..28: mol_type = other DNA
ctgtgtgggccggaccctgcggggaggg

SEQ ID NO: 3208 - DNA, 28 bp, synthetic construct
  source 1..28: mol_type = other DNA
tctgtgtgggccggaccctgcggggagg

SEQ ID NO: 3209 - DNA, 28 bp, synthetic construct
  source 1..28: mol_type = other DNA
tgatctgtgtgggccggaccctgcgggg

SEQ ID NO: 3210 - DNA, 28 bp, synthetic construct
  source 1..28: mol_type = other DNA
ctgatctgtgtgggccggaccctgcggg

SEQ ID NO: 3211 - DNA, 28 bp, synthetic construct
  source 1..28: mol_type = other DNA
gctgatctgtgtgggccggaccctgcgg

SEQ ID NO: 3212 - DNA, 28 bp, synthetic construct
  source 1..28: mol_type = other DNA
aaagattgggctgatctgtgtgggccgg

SEQ ID NO: 3213 - DNA, 28 bp, synthetic construct
  source 1..28: mol_type = other DNA
ttaaaaagattgggctgatctgtgtggg

SEQ ID NO: 3214 - DNA, 28 bp, synthetic construct
  source 1..28: mol_type = other DNA
tttaaaaagattgggctgatctgtgtgg

SEQ ID NO: 3215 - DNA, 28 bp, synthetic construct
  source 1..28: mol_type = other DNA
aaaaaaaaatgtatttaaaaagattggg

SEQ ID NO: 3216 - DNA, 28 bp, synthetic construct
  source 1..28: mol_type = other DNA
aaaaaaaaaatgtatttaaaaagattgg

SEQ ID NO: 3217 - DNA, 28 bp, synthetic construct
  source 1..28: mol_type = other DNA
gagacagcgtctcgctctgtcgcccagg

SEQ ID NO: 3218 - DNA, 28 bp, synthetic construct
  source 1..28: mol_type = other DNA
cagcgtctcgctctgtcgcccaggctgg

SEQ ID NO: 3219 - DNA, 28 bp, synthetic construct
  source 1..28: mol_type = other DNA
ctctgtcgcccaggctggagtgcagtgg

SEQ ID NO: 3220 - DNA, 28 bp, synthetic construct
  source 1..28: mol_type = other DNA
agatcgcgccactgcactccagcctggg

SEQ ID NO: 3221 - DNA, 28 bp, synthetic construct
  source 1..28: mol_type = other DNA
gagatcgcgccactgcactccagcctgg

SEQ ID NO: 3222 - DNA, 28 bp, synthetic construct
  source 1..28: mol_type = other DNA
aggctggagtgcagtggcgcgatctcgg

SEQ ID NO: 3223 - DNA, 28 bp, synthetic construct
  source 1..28: mol_type = other DNA
tcggctcactgcaacctccgcctcccgg

SEQ ID NO: 3224 - DNA, 28 bp, synthetic construct
  source 1..28: mol_type = other DNA
cggctcactgcaacctccgcctcccggg

SEQ ID NO: 3225 - DNA, 28 bp, synthetic construct
  source 1..28: mol_type = other DNA
agaactgcttgaacccgggaggcggagg

SEQ ID NO: 3226 - DNA, 28 bp, synthetic construct
  source 1..28: mol_type = other DNA
cagagaactgcttgaacccgggaggcgg

SEQ ID NO: 3227 - DNA, 28 bp, synthetic construct
  source 1..28: mol_type = other DNA
aggcagagaactgcttgaacccgggagg

SEQ ID NO: 3228 - DNA, 28 bp, synthetic construct
  source 1..28: mol_type = other DNA
ctgaggcagagaactgcttgaacccggg

SEQ ID NO: 3229 - DNA, 28 bp, synthetic construct
  source 1..28: mol_type = other DNA
gctgaggcagagaactgcttgaacccgg

SEQ ID NO: 3230 - DNA, 28 bp, synthetic construct
  source 1..28: mol_type = other DNA
gtaatctcagctactcgggaggctgagg

SEQ ID NO: 3231 - DNA, 28 bp, synthetic construct
  source 1..28: mol_type = other DNA
cagcctcccgagtagctgagattacagg

SEQ ID NO: 3232 - DNA, 28 bp, synthetic construct
  source 1..28: mol_type = other DNA
gagcctgtaatctcagctactcgggagg

SEQ ID NO: 3233 - DNA, 28 bp, synthetic construct
  source 1..28: mol_type = other DNA
gaggagcctgtaatctcagctactcggg

SEQ ID NO: 3234 - DNA, 28 bp, synthetic construct
  source 1..28: mol_type = other DNA
ggaggagcctgtaatctcagctactcgg

SEQ ID NO: 3235 - DNA, 28 bp, synthetic construct
  source 1..28: mol_type = other DNA
gattacaggctcctcccaccacgcccgg

SEQ ID NO: 3236 - DNA, 28 bp, synthetic construct
  source 1..28: mol_type = other DNA
acaaaaattagccgggcgtggtgggagg

SEQ ID NO: 3237 - DNA, 28 bp, synthetic construct
  source 1..28: mol_type = other DNA
aatacaaaaattagccgggcgtggtggg

SEQ ID NO: 3238 - DNA, 28 bp, synthetic construct
  source 1..28: mol_type = other DNA
aaatacaaaaattagccgggcgtggtgg

SEQ ID NO: 3239 - DNA, 28 bp, synthetic construct
  source 1..28: mol_type = other DNA
taaaaatacaaaaattagccgggcgtgg

SEQ ID NO: 3240 - DNA, 28 bp, synthetic construct
  source 1..28: mol_type = other DNA
tctactaaaaatacaaaaattagccggg

SEQ ID NO: 3241 - DNA, 28 bp, synthetic construct
  source 1..28: mol_type = other DNA
ttctactaaaaatacaaaaattagccgg

SEQ ID NO: 3242 - DNA, 28 bp, synthetic construct
  source 1..28: mol_type = other DNA
ctaatttttgtatttttagtagaaacgg

SEQ ID NO: 3243 - DNA, 28 bp, synthetic construct
  source 1..28: mol_type = other DNA
taatttttgtatttttagtagaaacggg

SEQ ID NO: 3244 - DNA, 28 bp, synthetic construct
  source 1..28: mol_type = other DNA
aatttttgtatttttagtagaaacgggg

SEQ ID NO: 3245 - DNA, 28 bp, synthetic construct
  source 1..28: mol_type = other DNA
tagtagaaacggggtttcaccatcttgg

SEQ ID NO: 3246 - DNA, 28 bp, synthetic construct
  source 1..28: mol_type = other DNA
gggtttcaccatcttggccagttaaagg

SEQ ID NO: 3247 - DNA, 28 bp, synthetic construct
  source 1..28: mol_type = other DNA
aaaatatgcctttaactggccaagatgg

SEQ ID NO: 3248 - DNA, 28 bp, synthetic construct
  source 1..28: mol_type = other DNA
taacattttaaaatatgcctttaactgg

SEQ ID NO: 3249 - DNA, 28 bp, synthetic construct
  source 1..28: mol_type = other DNA
taacatttgtaaggatgttaagcaaggg

SEQ ID NO: 3250 - DNA, 28 bp, synthetic construct
  source 1..28: mol_type = other DNA
gtaacatttgtaaggatgttaagcaagg

SEQ ID NO: 3251 - DNA, 28 bp, synthetic construct
  source 1..28: mol_type = other DNA
gttaagcaagagagtaacatttgtaagg

SEQ ID NO: 3252 - DNA, 28 bp, synthetic construct
  source 1..28: mol_type = other DNA
ttactctcttgcttaacatccttagtgg

SEQ ID NO: 3253 - DNA, 28 bp, synthetic construct
  source 1..28: mol_type = other DNA
cttgcttaacatccttagtggcctttgg

SEQ ID NO: 3254 - DNA, 28 bp, synthetic construct
  source 1..28: mol_type = other DNA
gttggagcatttccaaaggccactaagg

SEQ ID NO: 3255 - DNA, 28 bp, synthetic construct
  source 1..28: mol_type = other DNA
agtggcctttggaaatgctccaacctgg

SEQ ID NO: 3256 - DNA, 28 bp, synthetic construct
  source 1..28: mol_type = other DNA
cagtaccaggttggagcatttccaaagg

SEQ ID NO: 3257 - DNA, 28 bp, synthetic construct
  source 1..28: mol_type = other DNA
ctttggaaatgctccaacctggtactgg

SEQ ID NO: 3258 - DNA, 28 bp, synthetic construct
  source 1..28: mol_type = other DNA
ttcttaagaacttccagtaccaggttgg

SEQ ID NO: 3259 - DNA, 28 bp, synthetic construct
  source 1..28: mol_type = other DNA
cagattcttaagaacttccagtaccagg

SEQ ID NO: 3260 - DNA, 28 bp, synthetic construct
  source 1..28: mol_type = other DNA
ctggtactggaagttcttaagaatctgg

SEQ ID NO: 3261 - DNA, 28 bp, synthetic construct
  source 1..28: mol_type = other DNA
agagagagagcgaggcttcaaaggtagg

SEQ ID NO: 3262 - DNA, 28 bp, synthetic construct
  source 1..28: mol_type = other DNA
taagagagagagagcgaggcttcaaagg

SEQ ID NO: 3263 - DNA, 28 bp, synthetic construct
  source 1..28: mol_type = other DNA
agaaaatgctaagagagagagagcgagg

SEQ ID NO: 3264 - DNA, 28 bp, synthetic construct
  source 1..28: mol_type = other DNA
tgctttaggaacaatgaggatagcttgg

SEQ ID NO: 3265 - DNA, 28 bp, synthetic construct
  source 1..28: mol_type = other DNA
tatcctcattgttcctaaagcagctagg

SEQ ID NO: 3266 - DNA, 28 bp, synthetic construct
  source 1..28: mol_type = other DNA
gagcctagctgctttaggaacaatgagg

SEQ ID NO: 3267 - DNA, 28 bp, synthetic construct
  source 1..28: mol_type = other DNA
tgttcctaaagcagctaggctctttcgg

SEQ ID NO: 3268 - DNA, 28 bp, synthetic construct
  source 1..28: mol_type = other DNA
gttcctaaagcagctaggctctttcggg

SEQ ID NO: 3269 - DNA, 28 bp, synthetic construct
  source 1..28: mol_type = other DNA
gtgcccgaaagagcctagctgctttagg

SEQ ID NO: 3270 - DNA, 28 bp, synthetic construct
  source 1..28: mol_type = other DNA
gagagaataacatagtgaaagacactgg

SEQ ID NO: 3271 - DNA, 28 bp, synthetic construct
  source 1..28: mol_type = other DNA
tctctccctgaaatagctctttacttgg

SEQ ID NO: 3272 - DNA, 28 bp, synthetic construct
  source 1..28: mol_type = other DNA
ctttgccaagtaaagagctatttcaggg

SEQ ID NO: 3273 - DNA, 28 bp, synthetic construct
  source 1..28: mol_type = other DNA
actttgccaagtaaagagctatttcagg

SEQ ID NO: 3274 - DNA, 28 bp, synthetic construct
  source 1..28: mol_type = other DNA
tagctctttacttggcaaagtcctatgg

SEQ ID NO: 3275 - DNA, 28 bp, synthetic construct
  source 1..28: mol_type = other DNA
gtcctatggatctaccagagcctcttgg

SEQ ID NO: 3276 - DNA, 28 bp, synthetic construct
  source 1..28: mol_type = other DNA
atccaagaggctctggtagatccatagg

SEQ ID NO: 3277 - DNA, 28 bp, synthetic construct
  source 1..28: mol_type = other DNA
aaaagagatgctatccaagaggctctgg

SEQ ID NO: 3278 - DNA, 28 bp, synthetic construct
  source 1..28: mol_type = other DNA
gttcccaaaagagatgctatccaagagg

SEQ ID NO: 3279 - RNA, 20 nt, synthetic construct
  source 1..20: mol_type = other RNA
ttttatttattgttttgaga

SEQ ID NO: 3280 - RNA, 20 nt, synthetic construct
  source 1..20: mol_type = other RNA
aacatttgaactaactctga

SEQ ID NO: 3281 - RNA, 20 nt, synthetic construct
  source 1..20: mol_type = other RNA
acctcagcctcctgagcagc

SEQ ID NO: 3282 - RNA, 20 nt, synthetic construct
  source 1..20: mol_type = other RNA
gccagctgctcaggaggctg

SEQ ID NO: 3283 - RNA, 20 nt, synthetic construct
  source 1..20: mol_type = other RNA
tcctgagcagctggcattac

SEQ ID NO: 3284 - RNA, 20 nt, synthetic construct
  source 1..20: mol_type = other RNA
tgtaatgccagctgctcagg

SEQ ID NO: 3285 - RNA, 20 nt, synthetic construct
  source 1..20: mol_type = other RNA
gcctgtaatgccagctgctc

SEQ ID NO: 3286 - RNA, 20 nt, synthetic construct
  source 1..20: mol_type = other RNA
aaattagcttgtgtggtggc

SEQ ID NO: 3287 - RNA, 20 nt, synthetic construct
  source 1..20: mol_type = other RNA
acaaaaattagcttgtgtgg

SEQ ID NO: 3288 - RNA, 20 nt, synthetic construct
  source 1..20: mol_type = other RNA
aatacaaaaattagcttgtg

SEQ ID NO: 3289 - RNA, 20 nt, synthetic construct
  source 1..20: mol_type = other RNA
ttttgtatttttagtagaga

SEQ ID NO: 3290 - RNA, 20 nt, synthetic construct
  source 1..20: mol_type = other RNA
tttgtatttttagtagagat

SEQ ID NO: 3291 - RNA, 20 nt, synthetic construct
  source 1..20: mol_type = other RNA
gagatgggatttcaccacgt

SEQ ID NO: 3292 - RNA, 20 nt, synthetic construct
  source 1..20: mol_type = other RNA
gggatttcaccacgttggcc

SEQ ID NO: 3293 - RNA, 20 nt, synthetic construct
  source 1..20: mol_type = other RNA
tttcaccacgttggccaggc

SEQ ID NO: 3294 - RNA, 20 nt, synthetic construct
  source 1..20: mol_type = other RNA
caagaccagcctggccaacg

SEQ ID NO: 3295 - RNA, 20 nt, synthetic construct
  source 1..20: mol_type = other RNA
tcaggagttcaagaccagcc

SEQ ID NO: 3296 - RNA, 20 nt, synthetic construct
  source 1..20: mol_type = other RNA
ggtcttgaactcctgacctc

SEQ ID NO: 3297 - RNA, 20 nt, synthetic construct
  source 1..20: mol_type = other RNA
cctcaggtgattccctgcct

SEQ ID NO: 3298 - RNA, 20 nt, synthetic construct
  source 1..20: mol_type = other RNA
ccaaggcagggaatcacctg

SEQ ID NO: 3299 - RNA, 20 nt, synthetic construct
  source 1..20: mol_type = other RNA
gccttggcctcccaaagtgc

SEQ ID NO: 3300 - RNA, 20 nt, synthetic construct
  source 1..20: mol_type = other RNA
ccttggcctcccaaagtgct

SEQ ID NO: 3301 - RNA, 20 nt, synthetic construct
  source 1..20: mol_type = other RNA
gcactttgggaggccaaggc

SEQ ID NO: 3302 - RNA, 20 nt, synthetic construct
  source 1..20: mol_type = other RNA
cccagcactttgggaggcca

SEQ ID NO: 3303 - RNA, 20 nt, synthetic construct
  source 1..20: mol_type = other RNA
ctcccaaagtgctgggatta

SEQ ID NO: 3304 - RNA, 20 nt, synthetic construct
  source 1..20: mol_type = other RNA
cgtaatcccagcactttggg

SEQ ID NO: 3305 - RNA, 20 nt, synthetic construct
  source 1..20: mol_type = other RNA
gtccgtaatcccagcacttt

SEQ ID NO: 3306 - RNA, 20 nt, synthetic construct
  source 1..20: mol_type = other RNA
cgtccgtaatcccagcactt

SEQ ID NO: 3307 - RNA, 20 nt, synthetic construct
  source 1..20: mol_type = other RNA
taattcaaggcggggagtgg

SEQ ID NO: 3308 - RNA, 20 nt, synthetic construct
  source 1..20: mol_type = other RNA
aagtaattcaaggcggggag

SEQ ID NO: 3309 - RNA, 20 nt, synthetic construct
  source 1..20: mol_type = other RNA
agaagaagtaattcaaggcg

SEQ ID NO: 3310 - RNA, 20 nt, synthetic construct
  source 1..20: mol_type = other RNA
aagaagaagtaattcaaggc

SEQ ID NO: 3311 - RNA, 20 nt, synthetic construct
  source 1..20: mol_type = other RNA
aaagaagaagtaattcaagg

SEQ ID NO: 3312 - RNA, 20 nt, synthetic construct
  source 1..20: mol_type = other RNA
tggaaagaagaagtaattca

SEQ ID NO: 3313 - RNA, 20 nt, synthetic construct
  source 1..20: mol_type = other RNA
aaaatgctattgaatcacaa

SEQ ID NO: 3314 - RNA, 20 nt, synthetic construct
  source 1..20: mol_type = other RNA
cattttgttatttttgttac

SEQ ID NO: 3315 - RNA, 20 nt, synthetic construct
  source 1..20: mol_type = other RNA
ttacttttgttacagcacac

SEQ ID NO: 3316 - RNA, 20 nt, synthetic construct
  source 1..20: mol_type = other RNA
ctggctgtcttttctctaaa

SEQ ID NO: 3317 - RNA, 20 nt, synthetic construct
  source 1..20: mol_type = other RNA
tttctctaaaaggcaataca

SEQ ID NO: 3318 - RNA, 20 nt, synthetic construct
  source 1..20: mol_type = other RNA
tctaaaaggcaatacaaggc

SEQ ID NO: 3319 - RNA, 20 nt, synthetic construct
  source 1..20: mol_type = other RNA
gcaatacaaggccggcacag

SEQ ID NO: 3320 - RNA, 20 nt, synthetic construct
  source 1..20: mol_type = other RNA
acaggcgtgcgccactgtgc

SEQ ID NO: 3321 - RNA, 20 nt, synthetic construct
  source 1..20: mol_type = other RNA
gtggcgcacgcctgtagtcc

SEQ ID NO: 3322 - RNA, 20 nt, synthetic construct
  source 1..20: mol_type = other RNA
acgcctgtagtccaggctac

SEQ ID NO: 3323 - RNA, 20 nt, synthetic construct
  source 1..20: mol_type = other RNA
cgcctgtagtccaggctact

SEQ ID NO: 3324 - RNA, 20 nt, synthetic construct
  source 1..20: mol_type = other RNA
ctgtagtccaggctactggg

SEQ ID NO: 3325 - RNA, 20 nt, synthetic construct
  source 1..20: mol_type = other RNA
ctcccagtagcctggactac

SEQ ID NO: 3326 - RNA, 20 nt, synthetic construct
  source 1..20: mol_type = other RNA
tccaggctactgggaggctg

SEQ ID NO: 3327 - RNA, 20 nt, synthetic construct
  source 1..20: mol_type = other RNA
aggctactgggaggctgagg

SEQ ID NO: 3328 - RNA, 20 nt, synthetic construct
  source 1..20: mol_type = other RNA
ggctactgggaggctgaggc

SEQ ID NO: 3329 - RNA, 20 nt, synthetic construct
  source 1..20: mol_type = other RNA
gcctcagcctcccagtagcc

SEQ ID NO: 3330 - RNA, 20 nt, synthetic construct
  source 1..20: mol_type = other RNA
tactgggaggctgaggcggg

SEQ ID NO: 3331 - RNA, 20 nt, synthetic construct
  source 1..20: mol_type = other RNA
ggctgaggcgggaggatcgc

SEQ ID NO: 3332 - RNA, 20 nt, synthetic construct
  source 1..20: mol_type = other RNA
gaggatcgctggagtccaga

SEQ ID NO: 3333 - RNA, 20 nt, synthetic construct
  source 1..20: mol_type = other RNA
tcactgcagcatcaaccttc

SEQ ID NO: 3334 - RNA, 20 nt, synthetic construct
  source 1..20: mol_type = other RNA
ggagtgcagtggcgctatca

SEQ ID NO: 3335 - RNA, 20 nt, synthetic construct
  source 1..20: mol_type = other RNA
gcgccactgcactccagcct

SEQ ID NO: 3336 - RNA, 20 nt, synthetic construct
  source 1..20: mol_type = other RNA
tcgcctaggctggagtgcag

SEQ ID NO: 3337 - RNA, 20 nt, synthetic construct
  source 1..20: mol_type = other RNA
cactccagcctaggcgacag

SEQ ID NO: 3338 - RNA, 20 nt, synthetic construct
  source 1..20: mol_type = other RNA
actccagcctaggcgacaga

SEQ ID NO: 3339 - RNA, 20 nt, synthetic construct
  source 1..20: mol_type = other RNA
tctccctctgtcgcctaggc

SEQ ID NO: 3340 - RNA, 20 nt, synthetic construct
  source 1..20: mol_type = other RNA
aggttctccctctgtcgcct

SEQ ID NO: 3341 - RNA, 20 nt, synthetic construct
  source 1..20: mol_type = other RNA
ctatttgtttattttgaggc

SEQ ID NO: 3342 - RNA, 20 nt, synthetic construct
  source 1..20: mol_type = other RNA
attgctatttgtttattttg

SEQ ID NO: 3343 - RNA, 20 nt, synthetic construct
  source 1..20: mol_type = other RNA
acaaatagcaatacgacaat

SEQ ID NO: 3344 - RNA, 20 nt, synthetic construct
  source 1..20: mol_type = other RNA
gcaatacgacaataggatat

SEQ ID NO: 3345 - RNA, 20 nt, synthetic construct
  source 1..20: mol_type = other RNA
cgacaataggatattggctc

SEQ ID NO: 3346 - RNA, 20 nt, synthetic construct
  source 1..20: mol_type = other RNA
cagctactgagtaacagagc

SEQ ID NO: 3347 - RNA, 20 nt, synthetic construct
  source 1..20: mol_type = other RNA
actcagtagctgtataatat

SEQ ID NO: 3348 - RNA, 20 nt, synthetic construct
  source 1..20: mol_type = other RNA
attttgcggatggaggaagc

SEQ ID NO: 3349 - RNA, 20 nt, synthetic construct
  source 1..20: mol_type = other RNA
tggctcgattttgcggatgg

SEQ ID NO: 3350 - RNA, 20 nt, synthetic construct
  source 1..20: mol_type = other RNA
tattggctcgattttgcgga

SEQ ID NO: 3351 - RNA, 20 nt, synthetic construct
  source 1..20: mol_type = other RNA
ttattattggctcgattttg

SEQ ID NO: 3352 - RNA, 20 nt, synthetic construct
  source 1..20: mol_type = other RNA
ataataatccctaactcatg

SEQ ID NO: 3353 - RNA, 20 nt, synthetic construct
  source 1..20: mol_type = other RNA
catgagttagggattattat

SEQ ID NO: 3354 - RNA, 20 nt, synthetic construct
  source 1..20: mol_type = other RNA
gctcacagcctcatgagtta

SEQ ID NO: 3355 - RNA, 20 nt, synthetic construct
  source 1..20: mol_type = other RNA
tgctcacagcctcatgagtt

SEQ ID NO: 3356 - RNA, 20 nt, synthetic construct
  source 1..20: mol_type = other RNA
tgaggctgtgagcagattaa

SEQ ID NO: 3357 - RNA, 20 nt, synthetic construct
  source 1..20: mol_type = other RNA
tgaaaagcatctgacacaat

SEQ ID NO: 3358 - RNA, 20 nt, synthetic construct
  source 1..20: mol_type = other RNA
gtgcctctttagctagacca

SEQ ID NO: 3359 - RNA, 20 nt, synthetic construct
  source 1..20: mol_type = other RNA
tgcctctttagctagaccaa

SEQ ID NO: 3360 - RNA, 20 nt, synthetic construct
  source 1..20: mol_type = other RNA
aacccttggtctagctaaag

SEQ ID NO: 3361 - RNA, 20 nt, synthetic construct
  source 1..20: mol_type = other RNA
tagaccaagggttcttaacc

SEQ ID NO: 3362 - RNA, 20 nt, synthetic construct
  source 1..20: mol_type = other RNA
ggttcttaacctggagttca

SEQ ID NO: 3363 - RNA, 20 nt, synthetic construct
  source 1..20: mol_type = other RNA
cctggagttcatggaccctt

SEQ ID NO: 3364 - RNA, 20 nt, synthetic construct
  source 1..20: mol_type = other RNA
ctggagttcatggaccctta

SEQ ID NO: 3365 - RNA, 20 nt, synthetic construct
  source 1..20: mol_type = other RNA
tggagttcatggacccttag

SEQ ID NO: 3366 - RNA, 20 nt, synthetic construct
  source 1..20: mol_type = other RNA
cctaagggtccatgaactcc

SEQ ID NO: 3367 - RNA, 20 nt, synthetic construct
  source 1..20: mol_type = other RNA
atggacccttaggggataca

SEQ ID NO: 3368 - RNA, 20 nt, synthetic construct
  source 1..20: mol_type = other RNA
ttcatccatgtatcccctaa

SEQ ID NO: 3369 - RNA, 20 nt, synthetic construct
  source 1..20: mol_type = other RNA
gttcatccatgtatccccta

SEQ ID NO: 3370 - RNA, 20 nt, synthetic construct
  source 1..20: mol_type = other RNA
gggatacatggatgaacttc

SEQ ID NO: 3371 - RNA, 20 nt, synthetic construct
  source 1..20: mol_type = other RNA
ggatacatggatgaacttca

SEQ ID NO: 3372 - RNA, 20 nt, synthetic construct
  source 1..20: mol_type = other RNA
gatacatggatgaacttcag

SEQ ID NO: 3373 - RNA, 20 nt, synthetic construct
  source 1..20: mol_type = other RNA
attattattattattatttc

SEQ ID NO: 3374 - RNA, 20 nt, synthetic construct
  source 1..20: mol_type = other RNA
ttattattattattatttct

SEQ ID NO: 3375 - RNA, 20 nt, synthetic construct
  source 1..20: mol_type = other RNA
tattattatttctgggaaga

SEQ ID NO: 3376 - RNA, 20 nt, synthetic construct
  source 1..20: mol_type = other RNA
agctttcatcagcaccttta

SEQ ID NO: 3377 - RNA, 20 nt, synthetic construct
  source 1..20: mol_type = other RNA
gctttcatcagcacctttaa

SEQ ID NO: 3378 - RNA, 20 nt, synthetic construct
  source 1..20: mol_type = other RNA
tttgattcacaaacccttaa

SEQ ID NO: 3379 - RNA, 20 nt, synthetic construct
  source 1..20: mol_type = other RNA
gaatcaaaaacgttagtatg

SEQ ID NO: 3380 - RNA, 20 nt, synthetic construct
  source 1..20: mol_type = other RNA
acgttagtatgcggtaccct

SEQ ID NO: 3381 - RNA, 20 nt, synthetic construct
  source 1..20: mol_type = other RNA
cgttagtatgcggtaccctt

SEQ ID NO: 3382 - RNA, 20 nt, synthetic construct
  source 1..20: mol_type = other RNA
ttgtttgtttttctgcccaa

SEQ ID NO: 3383 - RNA, 20 nt, synthetic construct
  source 1..20: mol_type = other RNA
cttgtttgtttttctgccca

SEQ ID NO: 3384 - RNA, 20 nt, synthetic construct
  source 1..20: mol_type = other RNA
gcagaaaaacaaacaagaaa

SEQ ID NO: 3385 - RNA, 20 nt, synthetic construct
  source 1..20: mol_type = other RNA
gaaaaggttagacaactcga

SEQ ID NO: 3386 - RNA, 20 nt, synthetic construct
  source 1..20: mol_type = other RNA
caactcgatggtagaccttg

SEQ ID NO: 3387 - RNA, 20 nt, synthetic construct
  source 1..20: mol_type = other RNA
aactcgatggtagaccttga

SEQ ID NO: 3388 - RNA, 20 nt, synthetic construct
  source 1..20: mol_type = other RNA
aggctggctctaatccctca

SEQ ID NO: 3389 - RNA, 20 nt, synthetic construct
  source 1..20: mol_type = other RNA
gggattagagccagcctttc

SEQ ID NO: 3390 - RNA, 20 nt, synthetic construct
  source 1..20: mol_type = other RNA
ggattagagccagcctttca

SEQ ID NO: 3391 - RNA, 20 nt, synthetic construct
  source 1..20: mol_type = other RNA
ccagcctttcagggtttaat

SEQ ID NO: 3392 - RNA, 20 nt, synthetic construct
  source 1..20: mol_type = other RNA
cctattaaaccctgaaaggc

SEQ ID NO: 3393 - RNA, 20 nt, synthetic construct
  source 1..20: mol_type = other RNA
agaacctattaaaccctgaa

SEQ ID NO: 3394 - RNA, 20 nt, synthetic construct
  source 1..20: mol_type = other RNA
tgttcacaatagccccttga

SEQ ID NO: 3395 - RNA, 20 nt, synthetic construct
  source 1..20: mol_type = other RNA
tcacaatagccccttgaagg

SEQ ID NO: 3396 - RNA, 20 nt, synthetic construct
  source 1..20: mol_type = other RNA
gcgctaacacctccttcaag

SEQ ID NO: 3397 - RNA, 20 nt, synthetic construct
  source 1..20: mol_type = other RNA
tgcgctaacacctccttcaa

SEQ ID NO: 3398 - RNA, 20 nt, synthetic construct
  source 1..20: mol_type = other RNA
gtgcgctaacacctccttca

SEQ ID NO: 3399 - RNA, 20 nt, synthetic construct
  source 1..20: mol_type = other RNA
cgcacctatttttcagatgc

SEQ ID NO: 3400 - RNA, 20 nt, synthetic construct
  source 1..20: mol_type = other RNA
agttccggcatctgaaaaat

SEQ ID NO: 3401 - RNA, 20 nt, synthetic construct
  source 1..20: mol_type = other RNA
atcagttcgtttcttagttc

SEQ ID NO: 3402 - RNA, 20 nt, synthetic construct
  source 1..20: mol_type = other RNA
acgaactgatctgtaataga

SEQ ID NO: 3403 - RNA, 20 nt, synthetic construct
  source 1..20: mol_type = other RNA
caataatatttgcattggtt

SEQ ID NO: 3404 - RNA, 20 nt, synthetic construct
  source 1..20: mol_type = other RNA
gtcttcaataatatttgcat

SEQ ID NO: 3405 - RNA, 20 nt, synthetic construct
  source 1..20: mol_type = other RNA
atattattgaagacttttct

SEQ ID NO: 3406 - RNA, 20 nt, synthetic construct
  source 1..20: mol_type = other RNA
ttctaggccaaaaccgagct

SEQ ID NO: 3407 - RNA, 20 nt, synthetic construct
  source 1..20: mol_type = other RNA
gccaaaaccgagctaggcta

SEQ ID NO: 3408 - RNA, 20 nt, synthetic construct
  source 1..20: mol_type = other RNA
ccaaaaccgagctaggctat

SEQ ID NO: 3409 - RNA, 20 nt, synthetic construct
  source 1..20: mol_type = other RNA
cccatagcctagctcggttt

SEQ ID NO: 3410 - RNA, 20 nt, synthetic construct
  source 1..20: mol_type = other RNA
tcggttcccatagcctagct

SEQ ID NO: 3411 - RNA, 20 nt, synthetic construct
  source 1..20: mol_type = other RNA
gctgagttctgactggactt

SEQ ID NO: 3412 - RNA, 20 nt, synthetic construct
  source 1..20: mol_type = other RNA
gtcagaactcagcaccacag

SEQ ID NO: 3413 - RNA, 20 nt, synthetic construct
  source 1..20: mol_type = other RNA
ctgtggtgctgagttctgac

SEQ ID NO: 3414 - RNA, 20 nt, synthetic construct
  source 1..20: mol_type = other RNA
acagaggcctccttcttccc

SEQ ID NO: 3415 - RNA, 20 nt, synthetic construct
  source 1..20: mol_type = other RNA
agggaagaaggaggcctctg

SEQ ID NO: 3416 - RNA, 20 nt, synthetic construct
  source 1..20: mol_type = other RNA
atgcaaaccagggaagaagg

SEQ ID NO: 3417 - RNA, 20 nt, synthetic construct
  source 1..20: mol_type = other RNA
gggatgcaaaccagggaaga

SEQ ID NO: 3418 - RNA, 20 nt, synthetic construct
  source 1..20: mol_type = other RNA
tgagctggggatgcaaacca

SEQ ID NO: 3419 - RNA, 20 nt, synthetic construct
  source 1..20: mol_type = other RNA
atgagctggggatgcaaacc

SEQ ID NO: 3420 - RNA, 20 nt, synthetic construct
  source 1..20: mol_type = other RNA
cccagctcattctgcgcctc

SEQ ID NO: 3421 - RNA, 20 nt, synthetic construct
  source 1..20: mol_type = other RNA
cggaggcgcagaatgagctg

SEQ ID NO: 3422 - RNA, 20 nt, synthetic construct
  source 1..20: mol_type = other RNA
ccggaggcgcagaatgagct

SEQ ID NO: 3423 - RNA, 20 nt, synthetic construct
  source 1..20: mol_type = other RNA
tccggaggcgcagaatgagc

SEQ ID NO: 3424 - RNA, 20 nt, synthetic construct
  source 1..20: mol_type = other RNA
aaatctatgaaacgttccgg

SEQ ID NO: 3425 - RNA, 20 nt, synthetic construct
  source 1..20: mol_type = other RNA
caaaaatctatgaaacgttc

SEQ ID NO: 3426 - RNA, 20 nt, synthetic construct
  source 1..20: mol_type = other RNA
cgccaccgccgaaaaactcc

SEQ ID NO: 3427 - RNA, 20 nt, synthetic construct
  source 1..20: mol_type = other RNA
gccaccgccgaaaaactccc

SEQ ID NO: 3428 - RNA, 20 nt, synthetic construct
  source 1..20: mol_type = other RNA
ccaccgccgaaaaactcccg

SEQ ID NO: 3429 - RNA, 20 nt, synthetic construct
  source 1..20: mol_type = other RNA
cgggagtttttcggcggtgg

SEQ ID NO: 3430 - RNA, 20 nt, synthetic construct
  source 1..20: mol_type = other RNA
ccccgggagtttttcggcgg

SEQ ID NO: 3431 - RNA, 20 nt, synthetic construct
  source 1..20: mol_type = other RNA
gtgccccgggagtttttcgg

SEQ ID NO: 3432 - RNA, 20 nt, synthetic construct
  source 1..20: mol_type = other RNA
tctgtgccccgggagttttt

SEQ ID NO: 3433 - RNA, 20 nt, synthetic construct
  source 1..20: mol_type = other RNA
ggggcggagctctgtgcccc

SEQ ID NO: 3434 - RNA, 20 nt, synthetic construct
  source 1..20: mol_type = other RNA
gcacagagctccgcccccac

SEQ ID NO: 3435 - RNA, 20 nt, synthetic construct
  source 1..20: mol_type = other RNA
cacagagctccgcccccacc

SEQ ID NO: 3436 - RNA, 20 nt, synthetic construct
  source 1..20: mol_type = other RNA
agctccgcccccaccgggcc

SEQ ID NO: 3437 - RNA, 20 nt, synthetic construct
  source 1..20: mol_type = other RNA
ggggcctggcccggtggggg

SEQ ID NO: 3438 - RNA, 20 nt, synthetic construct
  source 1..20: mol_type = other RNA
ggtggggcctggcccggtgg

SEQ ID NO: 3439 - RNA, 20 nt, synthetic construct
  source 1..20: mol_type = other RNA
aggtggggcctggcccggtg

SEQ ID NO: 3440 - RNA, 20 nt, synthetic construct
  source 1..20: mol_type = other RNA
gaggtggggcctggcccggt

SEQ ID NO: 3441 - RNA, 20 nt, synthetic construct
  source 1..20: mol_type = other RNA
ggaggtggggcctggcccgg

SEQ ID NO: 3442 - RNA, 20 nt, synthetic construct
  source 1..20: mol_type = other RNA
agaggaggtggggcctggcc

SEQ ID NO: 3443 - RNA, 20 nt, synthetic construct
  source 1..20: mol_type = other RNA
ggccccacctcctctgcagt

SEQ ID NO: 3444 - RNA, 20 nt, synthetic construct
  source 1..20: mol_type = other RNA
actgcagaggaggtggggcc

SEQ ID NO: 3445 - RNA, 20 nt, synthetic construct
  source 1..20: mol_type = other RNA
taccgactgcagaggaggtg

SEQ ID NO: 3446 - RNA, 20 nt, synthetic construct
  source 1..20: mol_type = other RNA
ataccgactgcagaggaggt

SEQ ID NO: 3447 - RNA, 20 nt, synthetic construct
  source 1..20: mol_type = other RNA
aataccgactgcagaggagg

SEQ ID NO: 3448 - RNA, 20 nt, synthetic construct
  source 1..20: mol_type = other RNA
gacaataccgactgcagagg

SEQ ID NO: 3449 - RNA, 20 nt, synthetic construct
  source 1..20: mol_type = other RNA
ctgcagtcggtattgtccga

SEQ ID NO: 3450 - RNA, 20 nt, synthetic construct
  source 1..20: mol_type = other RNA
tcggacaataccgactgcag

SEQ ID NO: 3451 - RNA, 20 nt, synthetic construct
  source 1..20: mol_type = other RNA
cggtattgtccgatggttcc

SEQ ID NO: 3452 - RNA, 20 nt, synthetic construct
  source 1..20: mol_type = other RNA
cgatggttcccggcgtacct

SEQ ID NO: 3453 - RNA, 20 nt, synthetic construct
  source 1..20: mol_type = other RNA
cgaggtacgccgggaaccat

SEQ ID NO: 3454 - RNA, 20 nt, synthetic construct
  source 1..20: mol_type = other RNA
cggcgtacctcggcttccct

SEQ ID NO: 3455 - RNA, 20 nt, synthetic construct
  source 1..20: mol_type = other RNA
gagggaagccgaggtacgcc

SEQ ID NO: 3456 - RNA, 20 nt, synthetic construct
  source 1..20: mol_type = other RNA
cgagggaagccgaggtacgc

SEQ ID NO: 3457 - RNA, 20 nt, synthetic construct
  source 1..20: mol_type = other RNA
cggcttccctcggtagtttc

SEQ ID NO: 3458 - RNA, 20 nt, synthetic construct
  source 1..20: mol_type = other RNA
gaaactaccgagggaagccg

SEQ ID NO: 3459 - RNA, 20 nt, synthetic construct
  source 1..20: mol_type = other RNA
ccctcggtagtttccggcaa

SEQ ID NO: 3460 - RNA, 20 nt, synthetic construct
  source 1..20: mol_type = other RNA
ccattgccggaaactaccga

SEQ ID NO: 3461 - RNA, 20 nt, synthetic construct
  source 1..20: mol_type = other RNA
accattgccggaaactaccg

SEQ ID NO: 3462 - RNA, 20 nt, synthetic construct
  source 1..20: mol_type = other RNA
tagaaactctcgaccattgc

SEQ ID NO: 3463 - RNA, 20 nt, synthetic construct
  source 1..20: mol_type = other RNA
cgtgcccccttgttgtctct

SEQ ID NO: 3464 - RNA, 20 nt, synthetic construct
  source 1..20: mol_type = other RNA
gcggccgagagacaacaagg

SEQ ID NO: 3465 - RNA, 20 nt, synthetic construct
  source 1..20: mol_type = other RNA
ggcggccgagagacaacaag

SEQ ID NO: 3466 - RNA, 20 nt, synthetic construct
  source 1..20: mol_type = other RNA
cggcggccgagagacaacaa

SEQ ID NO: 3467 - RNA, 20 nt, synthetic construct
  source 1..20: mol_type = other RNA
acggcggccgagagacaaca

SEQ ID NO: 3468 - RNA, 20 nt, synthetic construct
  source 1..20: mol_type = other RNA
ggcggtggttgagaggacgg

SEQ ID NO: 3469 - RNA, 20 nt, synthetic construct
  source 1..20: mol_type = other RNA
gggggcggtggttgagagga

SEQ ID NO: 3470 - RNA, 20 nt, synthetic construct
  source 1..20: mol_type = other RNA
tcaaccaccgcccccctttt

SEQ ID NO: 3471 - RNA, 20 nt, synthetic construct
  source 1..20: mol_type = other RNA
aaaggggggcggtggttgag

SEQ ID NO: 3472 - RNA, 20 nt, synthetic construct
  source 1..20: mol_type = other RNA
ggagccgaaaaggggggcgg

SEQ ID NO: 3473 - RNA, 20 nt, synthetic construct
  source 1..20: mol_type = other RNA
gagggagccgaaaagggggg

SEQ ID NO: 3474 - RNA, 20 nt, synthetic construct
  source 1..20: mol_type = other RNA
ggagagggagccgaaaaggg

SEQ ID NO: 3475 - RNA, 20 nt, synthetic construct
  source 1..20: mol_type = other RNA
gggagagggagccgaaaagg

SEQ ID NO: 3476 - RNA, 20 nt, synthetic construct
  source 1..20: mol_type = other RNA
ggggagagggagccgaaaag

SEQ ID NO: 3477 - RNA, 20 nt, synthetic construct
  source 1..20: mol_type = other RNA
gggggagagggagccgaaaa

SEQ ID NO: 3478 - RNA, 20 nt, synthetic construct
  source 1..20: mol_type = other RNA
agggggagagggagccgaaa

SEQ ID NO: 3479 - RNA, 20 nt, synthetic construct
  source 1..20: mol_type = other RNA
ggggaacgggaagggggaga

SEQ ID NO: 3480 - RNA, 20 nt, synthetic construct
  source 1..20: mol_type = other RNA
gggggaacgggaagggggag

SEQ ID NO: 3481 - RNA, 20 nt, synthetic construct
  source 1..20: mol_type = other RNA
tgactgggggaacgggaagg

SEQ ID NO: 3482 - RNA, 20 nt, synthetic construct
  source 1..20: mol_type = other RNA
tcccgttcccccagtcagcc

SEQ ID NO: 3483 - RNA, 20 nt, synthetic construct
  source 1..20: mol_type = other RNA
gctgactgggggaacgggaa

SEQ ID NO: 3484 - RNA, 20 nt, synthetic construct
  source 1..20: mol_type = other RNA
ggctgactgggggaacggga

SEQ ID NO: 3485 - RNA, 20 nt, synthetic construct
  source 1..20: mol_type = other RNA
gccaggctgactgggggaac

SEQ ID NO: 3486 - RNA, 20 nt, synthetic construct
  source 1..20: mol_type = other RNA
ggccaggctgactgggggaa

SEQ ID NO: 3487 - RNA, 20 nt, synthetic construct
  source 1..20: mol_type = other RNA
cccagtcagcctggccctgc

SEQ ID NO: 3488 - RNA, 20 nt, synthetic construct
  source 1..20: mol_type = other RNA
agcagggccaggctgactgg

SEQ ID NO: 3489 - RNA, 20 nt, synthetic construct
  source 1..20: mol_type = other RNA
cagcagggccaggctgactg

SEQ ID NO: 3490 - RNA, 20 nt, synthetic construct
  source 1..20: mol_type = other RNA
ccagcagggccaggctgact

SEQ ID NO: 3491 - RNA, 20 nt, synthetic construct
  source 1..20: mol_type = other RNA
accagcagggccaggctgac

SEQ ID NO: 3492 - RNA, 20 nt, synthetic construct
  source 1..20: mol_type = other RNA
cctggccctgctggtgcctc

SEQ ID NO: 3493 - RNA, 20 nt, synthetic construct
  source 1..20: mol_type = other RNA
ccggaggcaccagcagggcc

SEQ ID NO: 3494 - RNA, 20 nt, synthetic construct
  source 1..20: mol_type = other RNA
tgctggtgcctccggcgcta

SEQ ID NO: 3495 - RNA, 20 nt, synthetic construct
  source 1..20: mol_type = other RNA
gctggtgcctccggcgctac

SEQ ID NO: 3496 - RNA, 20 nt, synthetic construct
  source 1..20: mol_type = other RNA
tagcgccggaggcaccagca

SEQ ID NO: 3497 - RNA, 20 nt, synthetic construct
  source 1..20: mol_type = other RNA
gtagcgccggaggcaccagc

SEQ ID NO: 3498 - RNA, 20 nt, synthetic construct
  source 1..20: mol_type = other RNA
gtgcctccggcgctacgggc

SEQ ID NO: 3499 - RNA, 20 nt, synthetic construct
  source 1..20: mol_type = other RNA
tgcctccggcgctacgggct

SEQ ID NO: 3500 - RNA, 20 nt, synthetic construct
  source 1..20: mol_type = other RNA
tgcccagcccgtagcgccgg

SEQ ID NO: 3501 - RNA, 20 nt, synthetic construct
  source 1..20: mol_type = other RNA
gcgctacgggctgggcaaga

SEQ ID NO: 3502 - RNA, 20 nt, synthetic construct
  source 1..20: mol_type = other RNA
tcttgcccagcccgtagcgc

SEQ ID NO: 3503 - RNA, 20 nt, synthetic construct
  source 1..20: mol_type = other RNA
ctacgggctgggcaagatgg

SEQ ID NO: 3504 - RNA, 20 nt, synthetic construct
  source 1..20: mol_type = other RNA
ctgggcaagatggcggcctt

SEQ ID NO: 3505 - RNA, 20 nt, synthetic construct
  source 1..20: mol_type = other RNA
tgggcaagatggcggccttc

SEQ ID NO: 3506 - RNA, 20 nt, synthetic construct
  source 1..20: mol_type = other RNA
ttcgtagctcaagatcccga

SEQ ID NO: 3507 - RNA, 20 nt, synthetic construct
  source 1..20: mol_type = other RNA
ggatcttgagctacgaacac

SEQ ID NO: 3508 - RNA, 20 nt, synthetic construct
  source 1..20: mol_type = other RNA
acgaacaccggcccctgaag

SEQ ID NO: 3509 - RNA, 20 nt, synthetic construct
  source 1..20: mol_type = other RNA
accggcccctgaagcggccg

SEQ ID NO: 3510 - RNA, 20 nt, synthetic construct
  source 1..20: mol_type = other RNA
gcccctgaagcggccgcggc

SEQ ID NO: 3511 - RNA, 20 nt, synthetic construct
  source 1..20: mol_type = other RNA
cccctgaagcggccgcggct

SEQ ID NO: 3512 - RNA, 20 nt, synthetic construct
  source 1..20: mol_type = other RNA
ccctgaagcggccgcggctg

SEQ ID NO: 3513 - RNA, 20 nt, synthetic construct
  source 1..20: mol_type = other RNA
cccagccgcggccgcttcag

SEQ ID NO: 3514 - RNA, 20 nt, synthetic construct
  source 1..20: mol_type = other RNA
ccccagccgcggccgcttca

SEQ ID NO: 3515 - RNA, 20 nt, synthetic construct
  source 1..20: mol_type = other RNA
gccccagccgcggccgcttc

SEQ ID NO: 3516 - RNA, 20 nt, synthetic construct
  source 1..20: mol_type = other RNA
acatcgggaggccccagccg

SEQ ID NO: 3517 - RNA, 20 nt, synthetic construct
  source 1..20: mol_type = other RNA
gcctcccgatgtttaccctc

SEQ ID NO: 3518 - RNA, 20 nt, synthetic construct
  source 1..20: mol_type = other RNA
tcctgagggtaaacatcggg

SEQ ID NO: 3519 - RNA, 20 nt, synthetic construct
  source 1..20: mol_type = other RNA
gggtcctgagggtaaacatc

SEQ ID NO: 3520 - RNA, 20 nt, synthetic construct
  source 1..20: mol_type = other RNA
ggggtcctgagggtaaacat

SEQ ID NO: 3521 - RNA, 20 nt, synthetic construct
  source 1..20: mol_type = other RNA
ccctcaggaccccaaacaga

SEQ ID NO: 3522 - RNA, 20 nt, synthetic construct
  source 1..20: mol_type = other RNA
tcaggaccccaaacagaagg

SEQ ID NO: 3523 - RNA, 20 nt, synthetic construct
  source 1..20: mol_type = other RNA
ccttctgtttggggtcctga

SEQ ID NO: 3524 - RNA, 20 nt, synthetic construct
  source 1..20: mol_type = other RNA
tccttctgtttggggtcctg

SEQ ID NO: 3525 - RNA, 20 nt, synthetic construct
  source 1..20: mol_type = other RNA
aacgcacctccttctgtttg

SEQ ID NO: 3526 - RNA, 20 nt, synthetic construct
  source 1..20: mol_type = other RNA
gaacgcacctccttctgttt

SEQ ID NO: 3527 - RNA, 20 nt, synthetic construct
  source 1..20: mol_type = other RNA
cgaacgcacctccttctgtt

SEQ ID NO: 3528 - RNA, 20 nt, synthetic construct
  source 1..20: mol_type = other RNA
aaggaggtgcgttcgaaaat

SEQ ID NO: 3529 - RNA, 20 nt, synthetic construct
  source 1..20: mol_type = other RNA
aggaggtgcgttcgaaaatc

SEQ ID NO: 3530 - RNA, 20 nt, synthetic construct
  source 1..20: mol_type = other RNA
ggaggtgcgttcgaaaatcg

SEQ ID NO: 3531 - RNA, 20 nt, synthetic construct
  source 1..20: mol_type = other RNA
gcgttcgaaaatcggggctc

SEQ ID NO: 3532 - RNA, 20 nt, synthetic construct
  source 1..20: mol_type = other RNA
aaacgccgctttcctgcctc

SEQ ID NO: 3533 - RNA, 20 nt, synthetic construct
  source 1..20: mol_type = other RNA
ttcatcctgaggcaggaaag

SEQ ID NO: 3534 - RNA, 20 nt, synthetic construct
  source 1..20: mol_type = other RNA
cctgcctcaggatgaactga

SEQ ID NO: 3535 - RNA, 20 nt, synthetic construct
  source 1..20: mol_type = other RNA
ccgtcagttcatcctgaggc

SEQ ID NO: 3536 - RNA, 20 nt, synthetic construct
  source 1..20: mol_type = other RNA
aaggccgtcagttcatcctg

SEQ ID NO: 3537 - RNA, 20 nt, synthetic construct
  source 1..20: mol_type = other RNA
acggccttgaatgtaaaaca

SEQ ID NO: 3538 - RNA, 20 nt, synthetic construct
  source 1..20: mol_type = other RNA
gaaaccttgttttacattca

SEQ ID NO: 3539 - RNA, 20 nt, synthetic construct
  source 1..20: mol_type = other RNA
aataaccagcctgctgtctc

SEQ ID NO: 3540 - RNA, 20 nt, synthetic construct
  source 1..20: mol_type = other RNA
ataaccagcctgctgtctct

SEQ ID NO: 3541 - RNA, 20 nt, synthetic construct
  source 1..20: mol_type = other RNA
taaccagcctgctgtctctg

SEQ ID NO: 3542 - RNA, 20 nt, synthetic construct
  source 1..20: mol_type = other RNA
catccccagagacagcaggc

SEQ ID NO: 3543 - RNA, 20 nt, synthetic construct
  source 1..20: mol_type = other RNA
gctgtctctggggatgagca

SEQ ID NO: 3544 - RNA, 20 nt, synthetic construct
  source 1..20: mol_type = other RNA
tgctcatccccagagacagc

SEQ ID NO: 3545 - RNA, 20 nt, synthetic construct
  source 1..20: mol_type = other RNA
aggattgaagctgacgttct

SEQ ID NO: 3546 - RNA, 20 nt, synthetic construct
  source 1..20: mol_type = other RNA
cgtcagcttcaatcctgcca

SEQ ID NO: 3547 - RNA, 20 nt, synthetic construct
  source 1..20: mol_type = other RNA
caaggtgagacaactctgcc

SEQ ID NO: 3548 - RNA, 20 nt, synthetic construct
  source 1..20: mol_type = other RNA
ctggcagagttgtctcacct

SEQ ID NO: 3549 - RNA, 20 nt, synthetic construct
  source 1..20: mol_type = other RNA
agacaactctgccaggctga

SEQ ID NO: 3550 - RNA, 20 nt, synthetic construct
  source 1..20: mol_type = other RNA
gggaagaaaagtgtacctca

SEQ ID NO: 3551 - RNA, 20 nt, synthetic construct
  source 1..20: mol_type = other RNA
agggaagaaaagtgtacctc

SEQ ID NO: 3552 - RNA, 20 nt, synthetic construct
  source 1..20: mol_type = other RNA
tgaagttggaactgatctga

SEQ ID NO: 3553 - RNA, 20 nt, synthetic construct
  source 1..20: mol_type = other RNA
ctgaagttggaactgatctg

SEQ ID NO: 3554 - RNA, 20 nt, synthetic construct
  source 1..20: mol_type = other RNA
tgcaataatgctgctgaagt

SEQ ID NO: 3555 - RNA, 20 nt, synthetic construct
  source 1..20: mol_type = other RNA
tgtaatacccttcctgacac

SEQ ID NO: 3556 - RNA, 20 nt, synthetic construct
  source 1..20: mol_type = other RNA
cccttcctgacactggtcgc

SEQ ID NO: 3557 - RNA, 20 nt, synthetic construct
  source 1..20: mol_type = other RNA
cctgcgaccagtgtcaggaa

SEQ ID NO: 3558 - RNA, 20 nt, synthetic construct
  source 1..20: mol_type = other RNA
tcctgcgaccagtgtcagga

SEQ ID NO: 3559 - RNA, 20 nt, synthetic construct
  source 1..20: mol_type = other RNA
ggcttcctgcgaccagtgtc

SEQ ID NO: 3560 - RNA, 20 nt, synthetic construct
  source 1..20: mol_type = other RNA
gaagccccaagtgaaccaga

SEQ ID NO: 3561 - RNA, 20 nt, synthetic construct
  source 1..20: mol_type = other RNA
ttatccttctggttcacttg

SEQ ID NO: 3562 - RNA, 20 nt, synthetic construct
  source 1..20: mol_type = other RNA
gttatccttctggttcactt

SEQ ID NO: 3563 - RNA, 20 nt, synthetic construct
  source 1..20: mol_type = other RNA
tgaaccagaaggataacttc

SEQ ID NO: 3564 - RNA, 20 nt, synthetic construct
  source 1..20: mol_type = other RNA
ccagaaggataacttctggc

SEQ ID NO: 3565 - RNA, 20 nt, synthetic construct
  source 1..20: mol_type = other RNA
ccagccagaagttatccttc

SEQ ID NO: 3566 - RNA, 20 nt, synthetic construct
  source 1..20: mol_type = other RNA
cccagagtgccattaacact

SEQ ID NO: 3567 - RNA, 20 nt, synthetic construct
  source 1..20: mol_type = other RNA
ccaagtgttaatggcactct

SEQ ID NO: 3568 - RNA, 20 nt, synthetic construct
  source 1..20: mol_type = other RNA
accaagtgttaatggcactc

SEQ ID NO: 3569 - RNA, 20 nt, synthetic construct
  source 1..20: mol_type = other RNA
taacacttggttcactgact

SEQ ID NO: 3570 - RNA, 20 nt, synthetic construct
  source 1..20: mol_type = other RNA
gtcagtgaaccaagtgttaa

SEQ ID NO: 3571 - RNA, 20 nt, synthetic construct
  source 1..20: mol_type = other RNA
acttggttcactgacttggc

SEQ ID NO: 3572 - RNA, 20 nt, synthetic construct
  source 1..20: mol_type = other RNA
ggctagttgcgtgagtggct

SEQ ID NO: 3573 - RNA, 20 nt, synthetic construct
  source 1..20: mol_type = other RNA
actcacgcaactagccaaaa

SEQ ID NO: 3574 - RNA, 20 nt, synthetic construct
  source 1..20: mol_type = other RNA
tttttggctagttgcgtgag

SEQ ID NO: 3575 - RNA, 20 nt, synthetic construct
  source 1..20: mol_type = other RNA
cgcaactagccaaaaaggta

SEQ ID NO: 3576 - RNA, 20 nt, synthetic construct
  source 1..20: mol_type = other RNA
gaaacagtaccttacctttt

SEQ ID NO: 3577 - RNA, 20 nt, synthetic construct
  source 1..20: mol_type = other RNA
ggtactgtttcctgtccttc

SEQ ID NO: 3578 - RNA, 20 nt, synthetic construct
  source 1..20: mol_type = other RNA
actatttgcaatgtccatcc

SEQ ID NO: 3579 - RNA, 20 nt, synthetic construct
  source 1..20: mol_type = other RNA
gatggacattgcaaatagtg

SEQ ID NO: 3580 - RNA, 20 nt, synthetic construct
  source 1..20: mol_type = other RNA
actgaaaatggggacctgga

SEQ ID NO: 3581 - RNA, 20 nt, synthetic construct
  source 1..20: mol_type = other RNA
ggtccccattttcagtaaga

SEQ ID NO: 3582 - RNA, 20 nt, synthetic construct
  source 1..20: mol_type = other RNA
tcttactgaaaatggggacc

SEQ ID NO: 3583 - RNA, 20 nt, synthetic construct
  source 1..20: mol_type = other RNA
cattttcagtaagaaggaag

SEQ ID NO: 3584 - RNA, 20 nt, synthetic construct
  source 1..20: mol_type = other RNA
cttccttcttactgaaaatg

SEQ ID NO: 3585 - RNA, 20 nt, synthetic construct
  source 1..20: mol_type = other RNA
tcttccttcttactgaaaat

SEQ ID NO: 3586 - RNA, 20 nt, synthetic construct
  source 1..20: mol_type = other RNA
ctcttccttcttactgaaaa

SEQ ID NO: 3587 - RNA, 20 nt, synthetic construct
  source 1..20: mol_type = other RNA
agtaagaaggaagaggtgtt

SEQ ID NO: 3588 - RNA, 20 nt, synthetic construct
  source 1..20: mol_type = other RNA
gtaagaaggaagaggtgttt

SEQ ID NO: 3589 - RNA, 20 nt, synthetic construct
  source 1..20: mol_type = other RNA
aatacacagtgcctgtgatg

SEQ ID NO: 3590 - RNA, 20 nt, synthetic construct
  source 1..20: mol_type = other RNA
atacacagtgcctgtgatgc

SEQ ID NO: 3591 - RNA, 20 nt, synthetic construct
  source 1..20: mol_type = other RNA
catcacaggcactgtgtatt

SEQ ID NO: 3592 - RNA, 20 nt, synthetic construct
  source 1..20: mol_type = other RNA
tgcctgtgatgcgggctgcc

SEQ ID NO: 3593 - RNA, 20 nt, synthetic construct
  source 1..20: mol_type = other RNA
agccaggcagcccgcatcac

SEQ ID NO: 3594 - RNA, 20 nt, synthetic construct
  source 1..20: mol_type = other RNA
acaggtcatcttaatgagcc

SEQ ID NO: 3595 - RNA, 20 nt, synthetic construct
  source 1..20: mol_type = other RNA
gattgctgcatagtaggcac

SEQ ID NO: 3596 - RNA, 20 nt, synthetic construct
  source 1..20: mol_type = other RNA
ctcagagattgctgcatagt

SEQ ID NO: 3597 - RNA, 20 nt, synthetic construct
  source 1..20: mol_type = other RNA
tgcagcaatctctgagacca

SEQ ID NO: 3598 - RNA, 20 nt, synthetic construct
  source 1..20: mol_type = other RNA
aacatgtctcttcttaacct

SEQ ID NO: 3599 - RNA, 20 nt, synthetic construct
  source 1..20: mol_type = other RNA
gagacatgttgaccctttca

SEQ ID NO: 3600 - RNA, 20 nt, synthetic construct
  source 1..20: mol_type = other RNA
agacatgttgaccctttcat

SEQ ID NO: 3601 - RNA, 20 nt, synthetic construct
  source 1..20: mol_type = other RNA
ggagttactcacccatgaaa

SEQ ID NO: 3602 - RNA, 20 nt, synthetic construct
  source 1..20: mol_type = other RNA
aggagttactcacccatgaa

SEQ ID NO: 3603 - RNA, 20 nt, synthetic construct
  source 1..20: mol_type = other RNA
ggtgagtaactcctaacacc

SEQ ID NO: 3604 - RNA, 20 nt, synthetic construct
  source 1..20: mol_type = other RNA
tttccctctttcctccagaa

SEQ ID NO: 3605 - RNA, 20 nt, synthetic construct
  source 1..20: mol_type = other RNA
tctggaggaaagagggaaaa

SEQ ID NO: 3606 - RNA, 20 nt, synthetic construct
  source 1..20: mol_type = other RNA
agtccattctggaggaaaga

SEQ ID NO: 3607 - RNA, 20 nt, synthetic construct
  source 1..20: mol_type = other RNA
gagtccattctggaggaaag

SEQ ID NO: 3608 - RNA, 20 nt, synthetic construct
  source 1..20: mol_type = other RNA
atgatctgagtccattctgg

SEQ ID NO: 3609 - RNA, 20 nt, synthetic construct
  source 1..20: mol_type = other RNA
gtgatgatctgagtccattc

SEQ ID NO: 3610 - RNA, 20 nt, synthetic construct
  source 1..20: mol_type = other RNA
agatcatcaccaagtactta

SEQ ID NO: 3611 - RNA, 20 nt, synthetic construct
  source 1..20: mol_type = other RNA
gatcatcaccaagtacttat

SEQ ID NO: 3612 - RNA, 20 nt, synthetic construct
  source 1..20: mol_type = other RNA
taactgctcccataagtact

SEQ ID NO: 3613 - RNA, 20 nt, synthetic construct
  source 1..20: mol_type = other RNA
atgggagcagttacagaaga

SEQ ID NO: 3614 - RNA, 20 nt, synthetic construct
  source 1..20: mol_type = other RNA
agaagatggctgaatactac

SEQ ID NO: 3615 - RNA, 20 nt, synthetic construct
  source 1..20: mol_type = other RNA
atggctgaatactaccggcc

SEQ ID NO: 3616 - RNA, 20 nt, synthetic construct
  source 1..20: mol_type = other RNA
tggctgaatactaccggcca

SEQ ID NO: 3617 - RNA, 20 nt, synthetic construct
  source 1..20: mol_type = other RNA
tactaccggccagggcctgc

SEQ ID NO: 3618 - RNA, 20 nt, synthetic construct
  source 1..20: mol_type = other RNA
cggccagggcctgcaggaag

SEQ ID NO: 3619 - RNA, 20 nt, synthetic construct
  source 1..20: mol_type = other RNA
ggccagggcctgcaggaagt

SEQ ID NO: 3620 - RNA, 20 nt, synthetic construct
  source 1..20: mol_type = other RNA
gccagggcctgcaggaagtg

SEQ ID NO: 3621 - RNA, 20 nt, synthetic construct
  source 1..20: mol_type = other RNA
ccagggcctgcaggaagtgg

SEQ ID NO: 3622 - RNA, 20 nt, synthetic construct
  source 1..20: mol_type = other RNA
cacttcctgcaggccctggc

SEQ ID NO: 3623 - RNA, 20 nt, synthetic construct
  source 1..20: mol_type = other RNA
cccccacttcctgcaggccc

SEQ ID NO: 3624 - RNA, 20 nt, synthetic construct
  source 1..20: mol_type = other RNA
cctgcaggaagtgggggctg

SEQ ID NO: 3625 - RNA, 20 nt, synthetic construct
  source 1..20: mol_type = other RNA
ccacagcccccacttcctgc

SEQ ID NO: 3626 - RNA, 20 nt, synthetic construct
  source 1..20: mol_type = other RNA
gggggctgtggttccacgat

SEQ ID NO: 3627 - RNA, 20 nt, synthetic construct
  source 1..20: mol_type = other RNA
ggggctgtggttccacgata

SEQ ID NO: 3628 - RNA, 20 nt, synthetic construct
  source 1..20: mol_type = other RNA
atggggcaagggccctatcg

SEQ ID NO: 3629 - RNA, 20 nt, synthetic construct
  source 1..20: mol_type = other RNA
gcccttgccccatgatgtag

SEQ ID NO: 3630 - RNA, 20 nt, synthetic construct
  source 1..20: mol_type = other RNA
cttgccccatgatgtagagg

SEQ ID NO: 3631 - RNA, 20 nt, synthetic construct
  source 1..20: mol_type = other RNA
acctctacatcatggggcaa

SEQ ID NO: 3632 - RNA, 20 nt, synthetic construct
  source 1..20: mol_type = other RNA
cacctctacatcatggggca

SEQ ID NO: 3633 - RNA, 20 nt, synthetic construct
  source 1..20: mol_type = other RNA
atgatgtagaggtggcaatc

SEQ ID NO: 3634 - RNA, 20 nt, synthetic construct
  source 1..20: mol_type = other RNA
attgccacctctacatcatg

SEQ ID NO: 3635 - RNA, 20 nt, synthetic construct
  source 1..20: mol_type = other RNA
gattgccacctctacatcat

SEQ ID NO: 3636 - RNA, 20 nt, synthetic construct
  source 1..20: mol_type = other RNA
ggattgccacctctacatca

SEQ ID NO: 3637 - RNA, 20 nt, synthetic construct
  source 1..20: mol_type = other RNA
tagaggtggcaatccggcag

SEQ ID NO: 3638 - RNA, 20 nt, synthetic construct
  source 1..20: mol_type = other RNA
agaggtggcaatccggcagt

SEQ ID NO: 3639 - RNA, 20 nt, synthetic construct
  source 1..20: mol_type = other RNA
tctcggtgtaatcccactgc

SEQ ID NO: 3640 - RNA, 20 nt, synthetic construct
  source 1..20: mol_type = other RNA
gtgggattacaccgagaagc

SEQ ID NO: 3641 - RNA, 20 nt, synthetic construct
  source 1..20: mol_type = other RNA
catgaacatggccagcttct

SEQ ID NO: 3642 - RNA, 20 nt, synthetic construct
  source 1..20: mol_type = other RNA
gctggccatgttcatgtttc

SEQ ID NO: 3643 - RNA, 20 nt, synthetic construct
  source 1..20: mol_type = other RNA
ctctacctgaaacatgaaca

SEQ ID NO: 3644 - RNA, 20 nt, synthetic construct
  source 1..20: mol_type = other RNA
tcatgtttcaggtagagagt

SEQ ID NO: 3645 - RNA, 20 nt, synthetic construct
  source 1..20: mol_type = other RNA
catgtttcaggtagagagta

SEQ ID NO: 3646 - RNA, 20 nt, synthetic construct
  source 1..20: mol_type = other RNA
agagagtagggcatgctgtg

SEQ ID NO: 3647 - RNA, 20 nt, synthetic construct
  source 1..20: mol_type = other RNA
gagagtagggcatgctgtgt

SEQ ID NO: 3648 - RNA, 20 nt, synthetic construct
  source 1..20: mol_type = other RNA
agagtagggcatgctgtgtg

SEQ ID NO: 3649 - RNA, 20 nt, synthetic construct
  source 1..20: mol_type = other RNA
ttccctcccctggtacccat

SEQ ID NO: 3650 - RNA, 20 nt, synthetic construct
  source 1..20: mol_type = other RNA
tgggtaccaggggagggaag

SEQ ID NO: 3651 - RNA, 20 nt, synthetic construct
  source 1..20: mol_type = other RNA
ctcccctggtacccatagga

SEQ ID NO: 3652 - RNA, 20 nt, synthetic construct
  source 1..20: mol_type = other RNA
atcctatgggtaccagggga

SEQ ID NO: 3653 - RNA, 20 nt, synthetic construct
  source 1..20: mol_type = other RNA
catcctatgggtaccagggg

SEQ ID NO: 3654 - RNA, 20 nt, synthetic construct
  source 1..20: mol_type = other RNA
ttccatcctatgggtaccag

SEQ ID NO: 3655 - RNA, 20 nt, synthetic construct
  source 1..20: mol_type = other RNA
gtacccataggatggaatgc

SEQ ID NO: 3656 - RNA, 20 nt, synthetic construct
  source 1..20: mol_type = other RNA
cattccatcctatgggtacc

SEQ ID NO: 3657 - RNA, 20 nt, synthetic construct
  source 1..20: mol_type = other RNA
tgtccagcattccatcctat

SEQ ID NO: 3658 - RNA, 20 nt, synthetic construct
  source 1..20: mol_type = other RNA
ctgtccagcattccatccta

SEQ ID NO: 3659 - RNA, 20 nt, synthetic construct
  source 1..20: mol_type = other RNA
acagacatgagttcctgacc

SEQ ID NO: 3660 - RNA, 20 nt, synthetic construct
  source 1..20: mol_type = other RNA
cagacatgagttcctgacct

SEQ ID NO: 3661 - RNA, 20 nt, synthetic construct
  source 1..20: mol_type = other RNA
aacactcaagcacccaggtc

SEQ ID NO: 3662 - RNA, 20 nt, synthetic construct
  source 1..20: mol_type = other RNA
ctcaaaacactcaagcaccc

SEQ ID NO: 3663 - RNA, 20 nt, synthetic construct
  source 1..20: mol_type = other RNA
tgttttgagaagatccgccc

SEQ ID NO: 3664 - RNA, 20 nt, synthetic construct
  source 1..20: mol_type = other RNA
tgagaagatccgccctggag

SEQ ID NO: 3665 - RNA, 20 nt, synthetic construct
  source 1..20: mol_type = other RNA
gcaattcatcctctccaggg

SEQ ID NO: 3666 - RNA, 20 nt, synthetic construct
  source 1..20: mol_type = other RNA
taagcaattcatcctctcca

SEQ ID NO: 3667 - RNA, 20 nt, synthetic construct
  source 1..20: mol_type = other RNA
ttaagcaattcatcctctcc

SEQ ID NO: 3668 - RNA, 20 nt, synthetic construct
  source 1..20: mol_type = other RNA
tgcctctgcttctccgagta

SEQ ID NO: 3669 - RNA, 20 nt, synthetic construct
  source 1..20: mol_type = other RNA
ctgcttctccgagtaaggct

SEQ ID NO: 3670 - RNA, 20 nt, synthetic construct
  source 1..20: mol_type = other RNA
agccttactcggagaagcag

SEQ ID NO: 3671 - RNA, 20 nt, synthetic construct
  source 1..20: mol_type = other RNA
ccgagtaaggcttggaattt

SEQ ID NO: 3672 - RNA, 20 nt, synthetic construct
  source 1..20: mol_type = other RNA
ccaaaattccaagccttact

SEQ ID NO: 3673 - RNA, 20 nt, synthetic construct
  source 1..20: mol_type = other RNA
aaggcttggaattttggtac

SEQ ID NO: 3674 - RNA, 20 nt, synthetic construct
  source 1..20: mol_type = other RNA
gtcgtgtcttcacagtactc

SEQ ID NO: 3675 - RNA, 20 nt, synthetic construct
  source 1..20: mol_type = other RNA
tcgtgtcttcacagtactct

SEQ ID NO: 3676 - RNA, 20 nt, synthetic construct
  source 1..20: mol_type = other RNA
cgtgtcttcacagtactctg

SEQ ID NO: 3677 - RNA, 20 nt, synthetic construct
  source 1..20: mol_type = other RNA
agtctgcatacctgtcccgc

SEQ ID NO: 3678 - RNA, 20 nt, synthetic construct
  source 1..20: mol_type = other RNA
agtaggcaagccggcgggac

SEQ ID NO: 3679 - RNA, 20 nt, synthetic construct
  source 1..20: mol_type = other RNA
acagaagtaggcaagccggc

SEQ ID NO: 3680 - RNA, 20 nt, synthetic construct
  source 1..20: mol_type = other RNA
ggcttgcctacttctgtaca

SEQ ID NO: 3681 - RNA, 20 nt, synthetic construct
  source 1..20: mol_type = other RNA
gtgtacagaagtaggcaagc

SEQ ID NO: 3682 - RNA, 20 nt, synthetic construct
  source 1..20: mol_type = other RNA
ctacttctgtacacggagac

SEQ ID NO: 3683 - RNA, 20 nt, synthetic construct
  source 1..20: mol_type = other RNA
cagtctccgtgtacagaagt

SEQ ID NO: 3684 - RNA, 20 nt, synthetic construct
  source 1..20: mol_type = other RNA
acggagactggccctgcagc

SEQ ID NO: 3685 - RNA, 20 nt, synthetic construct
  source 1..20: mol_type = other RNA
agactggccctgcagctgga

SEQ ID NO: 3686 - RNA, 20 nt, synthetic construct
  source 1..20: mol_type = other RNA
gctcacaccatccagctgca

SEQ ID NO: 3687 - RNA, 20 nt, synthetic construct
  source 1..20: mol_type = other RNA
tgctcacaccatccagctgc

SEQ ID NO: 3688 - RNA, 20 nt, synthetic construct
  source 1..20: mol_type = other RNA
ggctgaggagcaggggtggt

SEQ ID NO: 3689 - RNA, 20 nt, synthetic construct
  source 1..20: mol_type = other RNA
gggctgaggagcaggggtgg

SEQ ID NO: 3690 - RNA, 20 nt, synthetic construct
  source 1..20: mol_type = other RNA
tgggggctgaggagcagggg

SEQ ID NO: 3691 - RNA, 20 nt, synthetic construct
  source 1..20: mol_type = other RNA
agttgggggctgaggagcag

SEQ ID NO: 3692 - RNA, 20 nt, synthetic construct
  source 1..20: mol_type = other RNA
tagttgggggctgaggagca

SEQ ID NO: 3693 - RNA, 20 nt, synthetic construct
  source 1..20: mol_type = other RNA
ctagttgggggctgaggagc

SEQ ID NO: 3694 - RNA, 20 nt, synthetic construct
  source 1..20: mol_type = other RNA
gtgctgctagttgggggctg

SEQ ID NO: 3695 - RNA, 20 nt, synthetic construct
  source 1..20: mol_type = other RNA
gagggtgtgctgctagttgg

SEQ ID NO: 3696 - RNA, 20 nt, synthetic construct
  source 1..20: mol_type = other RNA
cgagggtgtgctgctagttg

SEQ ID NO: 3697 - RNA, 20 nt, synthetic construct
  source 1..20: mol_type = other RNA
tcgagggtgtgctgctagtt

SEQ ID NO: 3698 - RNA, 20 nt, synthetic construct
  source 1..20: mol_type = other RNA
gtcgagggtgtgctgctagt

SEQ ID NO: 3699 - RNA, 20 nt, synthetic construct
  source 1..20: mol_type = other RNA
aggtcactaaagggagtcga

SEQ ID NO: 3700 - RNA, 20 nt, synthetic construct
  source 1..20: mol_type = other RNA
caggtcactaaagggagtcg

SEQ ID NO: 3701 - RNA, 20 nt, synthetic construct
  source 1..20: mol_type = other RNA
cacataagcaggtcactaaa

SEQ ID NO: 3702 - RNA, 20 nt, synthetic construct
  source 1..20: mol_type = other RNA
gcacataagcaggtcactaa

SEQ ID NO: 3703 - RNA, 20 nt, synthetic construct
  source 1..20: mol_type = other RNA
tgcttatgtgccctcagcac

SEQ ID NO: 3704 - RNA, 20 nt, synthetic construct
  source 1..20: mol_type = other RNA
ggtgctgagggcacataagc

SEQ ID NO: 3705 - RNA, 20 nt, synthetic construct
  source 1..20: mol_type = other RNA
gtgccctcagcaccggcccc

SEQ ID NO: 3706 - RNA, 20 nt, synthetic construct
  source 1..20: mol_type = other RNA
cagcaccggcccctggtttt

SEQ ID NO: 3707 - RNA, 20 nt, synthetic construct
  source 1..20: mol_type = other RNA
aaaccaggggccggtgctga

SEQ ID NO: 3708 - RNA, 20 nt, synthetic construct
  source 1..20: mol_type = other RNA
aaaaccaggggccggtgctg

SEQ ID NO: 3709 - RNA, 20 nt, synthetic construct
  source 1..20: mol_type = other RNA
tgaggccaaaaaccaggggc

SEQ ID NO: 3710 - RNA, 20 nt, synthetic construct
  source 1..20: mol_type = other RNA
cagctgaggccaaaaaccag

SEQ ID NO: 3711 - RNA, 20 nt, synthetic construct
  source 1..20: mol_type = other RNA
acagctgaggccaaaaacca

SEQ ID NO: 3712 - RNA, 20 nt, synthetic construct
  source 1..20: mol_type = other RNA
tacagctgaggccaaaaacc

SEQ ID NO: 3713 - RNA, 20 nt, synthetic construct
  source 1..20: mol_type = other RNA
tggcctcagctgtatcctac

SEQ ID NO: 3714 - RNA, 20 nt, synthetic construct
  source 1..20: mol_type = other RNA
ctcagctgtatcctacaggt

SEQ ID NO: 3715 - RNA, 20 nt, synthetic construct
  source 1..20: mol_type = other RNA
ctacctgtaggatacagctg

SEQ ID NO: 3716 - RNA, 20 nt, synthetic construct
  source 1..20: mol_type = other RNA
gtatcctacaggtaggtact

SEQ ID NO: 3717 - RNA, 20 nt, synthetic construct
  source 1..20: mol_type = other RNA
tcctacaggtaggtactagg

SEQ ID NO: 3718 - RNA, 20 nt, synthetic construct
  source 1..20: mol_type = other RNA
cctacaggtaggtactaggc

SEQ ID NO: 3719 - RNA, 20 nt, synthetic construct
  source 1..20: mol_type = other RNA
cccgcctagtacctacctgt

SEQ ID NO: 3720 - RNA, 20 nt, synthetic construct
  source 1..20: mol_type = other RNA
gtaggtactaggcgggccca

SEQ ID NO: 3721 - RNA, 20 nt, synthetic construct
  source 1..20: mol_type = other RNA
actaggacagcacaggagga

SEQ ID NO: 3722 - RNA, 20 nt, synthetic construct
  source 1..20: mol_type = other RNA
cctgtgctgtcctagtgcct

SEQ ID NO: 3723 - RNA, 20 nt, synthetic construct
  source 1..20: mol_type = other RNA
aggcactaggacagcacagg

SEQ ID NO: 3724 - RNA, 20 nt, synthetic construct
  source 1..20: mol_type = other RNA
gctgtcctagtgccttggtt

SEQ ID NO: 3725 - RNA, 20 nt, synthetic construct
  source 1..20: mol_type = other RNA
tagtgccaaaccaaggcact

SEQ ID NO: 3726 - RNA, 20 nt, synthetic construct
  source 1..20: mol_type = other RNA
cagtgagtagtgccaaacca

SEQ ID NO: 3727 - RNA, 20 nt, synthetic construct
  source 1..20: mol_type = other RNA
actgatagcagaattaagac

SEQ ID NO: 3728 - RNA, 20 nt, synthetic construct
  source 1..20: mol_type = other RNA
caagtggtcaagtggtgagc

SEQ ID NO: 3729 - RNA, 20 nt, synthetic construct
  source 1..20: mol_type = other RNA
gcaataggcaagtggtcaag

SEQ ID NO: 3730 - RNA, 20 nt, synthetic construct
  source 1..20: mol_type = other RNA
tggacggggcaataggcaag

SEQ ID NO: 3731 - RNA, 20 nt, synthetic construct
  source 1..20: mol_type = other RNA
ggcaggttggacggggcaat

SEQ ID NO: 3732 - RNA, 20 nt, synthetic construct
  source 1..20: mol_type = other RNA
gtccaacctgcccatgccag

SEQ ID NO: 3733 - RNA, 20 nt, synthetic construct
  source 1..20: mol_type = other RNA
tccaacctgcccatgccaga

SEQ ID NO: 3734 - RNA, 20 nt, synthetic construct
  source 1..20: mol_type = other RNA
ctggcatgggcaggttggac

SEQ ID NO: 3735 - RNA, 20 nt, synthetic construct
  source 1..20: mol_type = other RNA
tctggcatgggcaggttgga

SEQ ID NO: 3736 - RNA, 20 nt, synthetic construct
  source 1..20: mol_type = other RNA
accctctggcatgggcaggt

SEQ ID NO: 3737 - RNA, 20 nt, synthetic construct
  source 1..20: mol_type = other RNA
tgttaccctctggcatgggc

SEQ ID NO: 3738 - RNA, 20 nt, synthetic construct
  source 1..20: mol_type = other RNA
gcactgttaccctctggcat

SEQ ID NO: 3739 - RNA, 20 nt, synthetic construct
  source 1..20: mol_type = other RNA
ggcactgttaccctctggca

SEQ ID NO: 3740 - RNA, 20 nt, synthetic construct
  source 1..20: mol_type = other RNA
gtgaaggcactgttaccctc

SEQ ID NO: 3741 - RNA, 20 nt, synthetic construct
  source 1..20: mol_type = other RNA
taacagtgccttcactcagc

SEQ ID NO: 3742 - RNA, 20 nt, synthetic construct
  source 1..20: mol_type = other RNA
cagacatacctgctgagtga

SEQ ID NO: 3743 - RNA, 20 nt, synthetic construct
  source 1..20: mol_type = other RNA
ggtatgtctgaccactagcc

SEQ ID NO: 3744 - RNA, 20 nt, synthetic construct
  source 1..20: mol_type = other RNA
gccttcctttttaacattgc

SEQ ID NO: 3745 - RNA, 20 nt, synthetic construct
  source 1..20: mol_type = other RNA
acctgcaatgttaaaaagga

SEQ ID NO: 3746 - RNA, 20 nt, synthetic construct
  source 1..20: mol_type = other RNA
acggacctgcaatgttaaaa

SEQ ID NO: 3747 - RNA, 20 nt, synthetic construct
  source 1..20: mol_type = other RNA
tgcaggtccgtgcaaagttg

SEQ ID NO: 3748 - RNA, 20 nt, synthetic construct
  source 1..20: mol_type = other RNA
gcaggtccgtgcaaagttgc

SEQ ID NO: 3749 - RNA, 20 nt, synthetic construct
  source 1..20: mol_type = other RNA
cgatctcccgcaactttgca

SEQ ID NO: 3750 - RNA, 20 nt, synthetic construct
  source 1..20: mol_type = other RNA
ggagatcgagcagcagatca

SEQ ID NO: 3751 - RNA, 20 nt, synthetic construct
  source 1..20: mol_type = other RNA
tcgagcagcagatcaaggag

SEQ ID NO: 3752 - RNA, 20 nt, synthetic construct
  source 1..20: mol_type = other RNA
cgagcagcagatcaaggagc

SEQ ID NO: 3753 - RNA, 20 nt, synthetic construct
  source 1..20: mol_type = other RNA
gagcagcagatcaaggagcg

SEQ ID NO: 3754 - RNA, 20 nt, synthetic construct
  source 1..20: mol_type = other RNA
gcagatcaaggagcggggac

SEQ ID NO: 3755 - RNA, 20 nt, synthetic construct
  source 1..20: mol_type = other RNA
gacaggcagttgaagttcgc

SEQ ID NO: 3756 - RNA, 20 nt, synthetic construct
  source 1..20: mol_type = other RNA
ctggtctttcgataaatgcc

SEQ ID NO: 3757 - RNA, 20 nt, synthetic construct
  source 1..20: mol_type = other RNA
aaatgccaggaagctactgc

SEQ ID NO: 3758 - RNA, 20 nt, synthetic construct
  source 1..20: mol_type = other RNA
acatacctgcagtagcttcc

SEQ ID NO: 3759 - RNA, 20 nt, synthetic construct
  source 1..20: mol_type = other RNA
tgtgtcagagaacagataat

SEQ ID NO: 3760 - RNA, 20 nt, synthetic construct
  source 1..20: mol_type = other RNA
ctttaccacttttcctcctt

SEQ ID NO: 3761 - RNA, 20 nt, synthetic construct
  source 1..20: mol_type = other RNA
aaggaggaaaagtggtaaag

SEQ ID NO: 3762 - RNA, 20 nt, synthetic construct
  source 1..20: mol_type = other RNA
taaggaggaaaagtggtaaa

SEQ ID NO: 3763 - RNA, 20 nt, synthetic construct
  source 1..20: mol_type = other RNA
ctaaggaggaaaagtggtaa

SEQ ID NO: 3764 - RNA, 20 nt, synthetic construct
  source 1..20: mol_type = other RNA
tgaagcctaaggaggaaaag

SEQ ID NO: 3765 - RNA, 20 nt, synthetic construct
  source 1..20: mol_type = other RNA
tcctccttaggcttcaccat

SEQ ID NO: 3766 - RNA, 20 nt, synthetic construct
  source 1..20: mol_type = other RNA
ccttaggcttcaccattgga

SEQ ID NO: 3767 - RNA, 20 nt, synthetic construct
  source 1..20: mol_type = other RNA
cttaggcttcaccattggac

SEQ ID NO: 3768 - RNA, 20 nt, synthetic construct
  source 1..20: mol_type = other RNA
tccaatggtgaagcctaagg

SEQ ID NO: 3769 - RNA, 20 nt, synthetic construct
  source 1..20: mol_type = other RNA
ccgtccaatggtgaagccta

SEQ ID NO: 3770 - RNA, 20 nt, synthetic construct
  source 1..20: mol_type = other RNA
tggacgggtacttcatactt

SEQ ID NO: 3771 - RNA, 20 nt, synthetic construct
  source 1..20: mol_type = other RNA
agtatgaagtacccgtccaa

SEQ ID NO: 3772 - RNA, 20 nt, synthetic construct
  source 1..20: mol_type = other RNA
acttcatactttggaagtgc

SEQ ID NO: 3773 - RNA, 20 nt, synthetic construct
  source 1..20: mol_type = other RNA
agtcagagcgttcaaaacta

SEQ ID NO: 3774 - RNA, 20 nt, synthetic construct
  source 1..20: mol_type = other RNA
tccctttgtaaccgaatctt

SEQ ID NO: 3775 - RNA, 20 nt, synthetic construct
  source 1..20: mol_type = other RNA
ttgtaaccgaatctttggat

SEQ ID NO: 3776 - RNA, 20 nt, synthetic construct
  source 1..20: mol_type = other RNA
tgtaaccgaatctttggatt

SEQ ID NO: 3777 - RNA, 20 nt, synthetic construct
  source 1..20: mol_type = other RNA
atccaaagattcggttacaa

SEQ ID NO: 3778 - RNA, 20 nt, synthetic construct
  source 1..20: mol_type = other RNA
taggtcccaatccaaagatt

SEQ ID NO: 3779 - RNA, 20 nt, synthetic construct
  source 1..20: mol_type = other RNA
ctttggattgggacctagca

SEQ ID NO: 3780 - RNA, 20 nt, synthetic construct
  source 1..20: mol_type = other RNA
ggattgggacctagcaagga

SEQ ID NO: 3781 - RNA, 20 nt, synthetic construct
  source 1..20: mol_type = other RNA
gattgggacctagcaaggat

SEQ ID NO: 3782 - RNA, 20 nt, synthetic construct
  source 1..20: mol_type = other RNA
acctagcaaggatgggcatg

SEQ ID NO: 3783 - RNA, 20 nt, synthetic construct
  source 1..20: mol_type = other RNA
acctcatgcccatccttgct

SEQ ID NO: 3784 - RNA, 20 nt, synthetic construct
  source 1..20: mol_type = other RNA
tgggcatgaggtaagcgaaa

SEQ ID NO: 3785 - RNA, 20 nt, synthetic construct
  source 1..20: mol_type = other RNA
gggcatgaggtaagcgaaaa

SEQ ID NO: 3786 - RNA, 20 nt, synthetic construct
  source 1..20: mol_type = other RNA
ggcatgaggtaagcgaaaag

SEQ ID NO: 3787 - RNA, 20 nt, synthetic construct
  source 1..20: mol_type = other RNA
taagcgaaaaggggaataga

SEQ ID NO: 3788 - RNA, 20 nt, synthetic construct
  source 1..20: mol_type = other RNA
gagaacaaaggaagagaagg

SEQ ID NO: 3789 - RNA, 20 nt, synthetic construct
  source 1..20: mol_type = other RNA
ctggagaacaaaggaagaga

SEQ ID NO: 3790 - RNA, 20 nt, synthetic construct
  source 1..20: mol_type = other RNA
tgaggagatctggagaacaa

SEQ ID NO: 3791 - RNA, 20 nt, synthetic construct
  source 1..20: mol_type = other RNA
catcatcatctgaggagatc

SEQ ID NO: 3792 - RNA, 20 nt, synthetic construct
  source 1..20: mol_type = other RNA
ctcctcagatgatgatgctg

SEQ ID NO: 3793 - RNA, 20 nt, synthetic construct
  source 1..20: mol_type = other RNA
caccacagcatcatcatctg

SEQ ID NO: 3794 - RNA, 20 nt, synthetic construct
  source 1..20: mol_type = other RNA
tggtgtcattgctatgtgaa

SEQ ID NO: 3795 - RNA, 20 nt, synthetic construct
  source 1..20: mol_type = other RNA
ggtgtcattgctatgtgaat

SEQ ID NO: 3796 - RNA, 20 nt, synthetic construct
  source 1..20: mol_type = other RNA
gctgtcagctgcaagcgttc

SEQ ID NO: 3797 - RNA, 20 nt, synthetic construct
  source 1..20: mol_type = other RNA
tcagctgcaagcgttctggt

SEQ ID NO: 3798 - RNA, 20 nt, synthetic construct
  source 1..20: mol_type = other RNA
ttctggtcggcatcgtgcta

SEQ ID NO: 3799 - RNA, 20 nt, synthetic construct
  source 1..20: mol_type = other RNA
tggtcggcatcgtgctatgg

SEQ ID NO: 3800 - RNA, 20 nt, synthetic construct
  source 1..20: mol_type = other RNA
tatggtggtagccaagctcc

SEQ ID NO: 3801 - RNA, 20 nt, synthetic construct
  source 1..20: mol_type = other RNA
caagctcctggagaagagac

SEQ ID NO: 3802 - RNA, 20 nt, synthetic construct
  source 1..20: mol_type = other RNA
gctcctggagaagagacagg

SEQ ID NO: 3803 - RNA, 20 nt, synthetic construct
  source 1..20: mol_type = other RNA
ctgtctcttctccaggagct

SEQ ID NO: 3804 - RNA, 20 nt, synthetic construct
  source 1..20: mol_type = other RNA
tctccgcctgtctcttctcc

SEQ ID NO: 3805 - RNA, 20 nt, synthetic construct
  source 1..20: mol_type = other RNA
gaagagacaggcggagattg

SEQ ID NO: 3806 - RNA, 20 nt, synthetic construct
  source 1..20: mol_type = other RNA
acaggcggagattgaggctg

SEQ ID NO: 3807 - RNA, 20 nt, synthetic construct
  source 1..20: mol_type = other RNA
gagattgaggctgaggttag

SEQ ID NO: 3808 - RNA, 20 nt, synthetic construct
  source 1..20: mol_type = other RNA
agattgaggctgaggttaga

SEQ ID NO: 3809 - RNA, 20 nt, synthetic construct
  source 1..20: mol_type = other RNA
tctgtcatcttgcagcgttg

SEQ ID NO: 3810 - RNA, 20 nt, synthetic construct
  source 1..20: mol_type = other RNA
atcagaagccgcagatgaga

SEQ ID NO: 3811 - RNA, 20 nt, synthetic construct
  source 1..20: mol_type = other RNA
tcagaagccgcagatgagaa

SEQ ID NO: 3812 - RNA, 20 nt, synthetic construct
  source 1..20: mol_type = other RNA
gatggaacccttctcatctg

SEQ ID NO: 3813 - RNA, 20 nt, synthetic construct
  source 1..20: mol_type = other RNA
gagaagggttccatcgcctc

SEQ ID NO: 3814 - RNA, 20 nt, synthetic construct
  source 1..20: mol_type = other RNA
agaaagggagccagaggcga

SEQ ID NO: 3815 - RNA, 20 nt, synthetic construct
  source 1..20: mol_type = other RNA
gggagcagaaagggagccag

SEQ ID NO: 3816 - RNA, 20 nt, synthetic construct
  source 1..20: mol_type = other RNA
gggagcactgggagcagaaa

SEQ ID NO: 3817 - RNA, 20 nt, synthetic construct
  source 1..20: mol_type = other RNA
tgggagcactgggagcagaa

SEQ ID NO: 3818 - RNA, 20 nt, synthetic construct
  source 1..20: mol_type = other RNA
tcccagtgctcccattttcc

SEQ ID NO: 3819 - RNA, 20 nt, synthetic construct
  source 1..20: mol_type = other RNA
tcctggaaaatgggagcact

SEQ ID NO: 3820 - RNA, 20 nt, synthetic construct
  source 1..20: mol_type = other RNA
atcctggaaaatgggagcac

SEQ ID NO: 3821 - RNA, 20 nt, synthetic construct
  source 1..20: mol_type = other RNA
aggaggacatcctggaaaat

SEQ ID NO: 3822 - RNA, 20 nt, synthetic construct
  source 1..20: mol_type = other RNA
caggaggacatcctggaaaa

SEQ ID NO: 3823 - RNA, 20 nt, synthetic construct
  source 1..20: mol_type = other RNA
ggatgtcctcctgcagtttc

SEQ ID NO: 3824 - RNA, 20 nt, synthetic construct
  source 1..20: mol_type = other RNA
gaaactgcaggaggacatcc

SEQ ID NO: 3825 - RNA, 20 nt, synthetic construct
  source 1..20: mol_type = other RNA
cctgcagtttctggatacac

SEQ ID NO: 3826 - RNA, 20 nt, synthetic construct
  source 1..20: mol_type = other RNA
gtgtatccagaaactgcagg

SEQ ID NO: 3827 - RNA, 20 nt, synthetic construct
  source 1..20: mol_type = other RNA
cctgtgtatccagaaactgc

SEQ ID NO: 3828 - RNA, 20 nt, synthetic construct
  source 1..20: mol_type = other RNA
acaggctcccatgctgagta

SEQ ID NO: 3829 - RNA, 20 nt, synthetic construct
  source 1..20: mol_type = other RNA
taggggtccgtactcagcat

SEQ ID NO: 3830 - RNA, 20 nt, synthetic construct
  source 1..20: mol_type = other RNA
gtaggggtccgtactcagca

SEQ ID NO: 3831 - RNA, 20 nt, synthetic construct
  source 1..20: mol_type = other RNA
tcctcattcccttcctccag

SEQ ID NO: 3832 - RNA, 20 nt, synthetic construct
  source 1..20: mol_type = other RNA
tccgctggaggaagggaatg

SEQ ID NO: 3833 - RNA, 20 nt, synthetic construct
  source 1..20: mol_type = other RNA
tcgagggtccgctggaggaa

SEQ ID NO: 3834 - RNA, 20 nt, synthetic construct
  source 1..20: mol_type = other RNA
ttcgagggtccgctggagga

SEQ ID NO: 3835 - RNA, 20 nt, synthetic construct
  source 1..20: mol_type = other RNA
tcacttcgagggtccgctgg

SEQ ID NO: 3836 - RNA, 20 nt, synthetic construct
  source 1..20: mol_type = other RNA
ctctcacttcgagggtccgc

SEQ ID NO: 3837 - RNA, 20 nt, synthetic construct
  source 1..20: mol_type = other RNA
accctcgaagtgagagtgag

SEQ ID NO: 3838 - RNA, 20 nt, synthetic construct
  source 1..20: mol_type = other RNA
ccctcgaagtgagagtgagc

SEQ ID NO: 3839 - RNA, 20 nt, synthetic construct
  source 1..20: mol_type = other RNA
tcgaagtgagagtgagcggg

SEQ ID NO: 3840 - RNA, 20 nt, synthetic construct
  source 1..20: mol_type = other RNA
cccgctcactctcacttcga

SEQ ID NO: 3841 - RNA, 20 nt, synthetic construct
  source 1..20: mol_type = other RNA
acccgctcactctcacttcg

SEQ ID NO: 3842 - RNA, 20 nt, synthetic construct
  source 1..20: mol_type = other RNA
agtgcaagtatacatgttgt

SEQ ID NO: 3843 - RNA, 20 nt, synthetic construct
  source 1..20: mol_type = other RNA
gagtgcaagtatacatgttg

SEQ ID NO: 3844 - RNA, 20 nt, synthetic construct
  source 1..20: mol_type = other RNA
acttgcactctcatctcccg

SEQ ID NO: 3845 - RNA, 20 nt, synthetic construct
  source 1..20: mol_type = other RNA
cttgcactctcatctcccga

SEQ ID NO: 3846 - RNA, 20 nt, synthetic construct
  source 1..20: mol_type = other RNA
ttgcactctcatctcccgag

SEQ ID NO: 3847 - RNA, 20 nt, synthetic construct
  source 1..20: mol_type = other RNA
tcccgaggggaccttgcctt

SEQ ID NO: 3848 - RNA, 20 nt, synthetic construct
  source 1..20: mol_type = other RNA
tccaaaggcaaggtcccctc

SEQ ID NO: 3849 - RNA, 20 nt, synthetic construct
  source 1..20: mol_type = other RNA
ctccaaaggcaaggtcccct

SEQ ID NO: 3850 - RNA, 20 nt, synthetic construct
  source 1..20: mol_type = other RNA
gaccttgcctttggagcccc

SEQ ID NO: 3851 - RNA, 20 nt, synthetic construct
  source 1..20: mol_type = other RNA
cctttggagcccctggtccc

SEQ ID NO: 3852 - RNA, 20 nt, synthetic construct
  source 1..20: mol_type = other RNA
ccggggaccaggggctccaa

SEQ ID NO: 3853 - RNA, 20 nt, synthetic construct
  source 1..20: mol_type = other RNA
agagggaggccggggaccag

SEQ ID NO: 3854 - RNA, 20 nt, synthetic construct
  source 1..20: mol_type = other RNA
gagagggaggccggggacca

SEQ ID NO: 3855 - RNA, 20 nt, synthetic construct
  source 1..20: mol_type = other RNA
ggagagggaggccggggacc

SEQ ID NO: 3856 - RNA, 20 nt, synthetic construct
  source 1..20: mol_type = other RNA
tcaaagggagagggaggccg

SEQ ID NO: 3857 - RNA, 20 nt, synthetic construct
  source 1..20: mol_type = other RNA
atcaaagggagagggaggcc

SEQ ID NO: 3858 - RNA, 20 nt, synthetic construct
  source 1..20: mol_type = other RNA
catcaaagggagagggaggc

SEQ ID NO: 3859 - RNA, 20 nt, synthetic construct
  source 1..20: mol_type = other RNA
ggatcatcaaagggagaggg

SEQ ID NO: 3860 - RNA, 20 nt, synthetic construct
  source 1..20: mol_type = other RNA
gcaggatcatcaaagggaga

SEQ ID NO: 3861 - RNA, 20 nt, synthetic construct
  source 1..20: mol_type = other RNA
ggcaggatcatcaaagggag

SEQ ID NO: 3862 - RNA, 20 nt, synthetic construct
  source 1..20: mol_type = other RNA
tcatcggcaggatcatcaaa

SEQ ID NO: 3863 - RNA, 20 nt, synthetic construct
  source 1..20: mol_type = other RNA
gtcatcggcaggatcatcaa

SEQ ID NO: 3864 - RNA, 20 nt, synthetic construct
  source 1..20: mol_type = other RNA
tgccgatgacccagagcaca

SEQ ID NO: 3865 - RNA, 20 nt, synthetic construct
  source 1..20: mol_type = other RNA
cgatgacccagagcacaagg

SEQ ID NO: 3866 - RNA, 20 nt, synthetic construct
  source 1..20: mol_type = other RNA
ctccttgtgctctgggtcat

SEQ ID NO: 3867 - RNA, 20 nt, synthetic construct
  source 1..20: mol_type = other RNA
ccagagcacaaggaggctga

SEQ ID NO: 3868 - RNA, 20 nt, synthetic construct
  source 1..20: mol_type = other RNA
cttcagcctccttgtgctct

SEQ ID NO: 3869 - RNA, 20 nt, synthetic construct
  source 1..20: mol_type = other RNA
ccttcagcctccttgtgctc

SEQ ID NO: 3870 - RNA, 20 nt, synthetic construct
  source 1..20: mol_type = other RNA
aggcagcagcagcagcaagc

SEQ ID NO: 3871 - RNA, 20 nt, synthetic construct
  source 1..20: mol_type = other RNA
agcagcaagctggaagtgag

SEQ ID NO: 3872 - RNA, 20 nt, synthetic construct
  source 1..20: mol_type = other RNA
gcagcaagctggaagtgagt

SEQ ID NO: 3873 - RNA, 20 nt, synthetic construct
  source 1..20: mol_type = other RNA
cgcttatgttctatgccctc

SEQ ID NO: 3874 - RNA, 20 nt, synthetic construct
  source 1..20: mol_type = other RNA
gttctatgccctcaggatcc

SEQ ID NO: 3875 - RNA, 20 nt, synthetic construct
  source 1..20: mol_type = other RNA
ttctatgccctcaggatcca

SEQ ID NO: 3876 - RNA, 20 nt, synthetic construct
  source 1..20: mol_type = other RNA
ctgagagccctggatcctga

SEQ ID NO: 3877 - RNA, 20 nt, synthetic construct
  source 1..20: mol_type = other RNA
tctgagagccctggatcctg

SEQ ID NO: 3878 - RNA, 20 nt, synthetic construct
  source 1..20: mol_type = other RNA
tccagggctctcagaatcta

SEQ ID NO: 3879 - RNA, 20 nt, synthetic construct
  source 1..20: mol_type = other RNA
tccatagattctgagagccc

SEQ ID NO: 3880 - RNA, 20 nt, synthetic construct
  source 1..20: mol_type = other RNA
tagttccagtgttctctttg

SEQ ID NO: 3881 - RNA, 20 nt, synthetic construct
  source 1..20: mol_type = other RNA
caaagagaacactggaacta

SEQ ID NO: 3882 - RNA, 20 nt, synthetic construct
  source 1..20: mol_type = other RNA
tcaaagagaacactggaact

SEQ ID NO: 3883 - RNA, 20 nt, synthetic construct
  source 1..20: mol_type = other RNA
cagtgttctctttgaggaca

SEQ ID NO: 3884 - RNA, 20 nt, synthetic construct
  source 1..20: mol_type = other RNA
catgtcctcaaagagaacac

SEQ ID NO: 3885 - RNA, 20 nt, synthetic construct
  source 1..20: mol_type = other RNA
attgaacttactgagaaatc

SEQ ID NO: 3886 - RNA, 20 nt, synthetic construct
  source 1..20: mol_type = other RNA
agtaagttcaatcctgagcg

SEQ ID NO: 3887 - RNA, 20 nt, synthetic construct
  source 1..20: mol_type = other RNA
ggggagaacaactgagagaa

SEQ ID NO: 3888 - RNA, 20 nt, synthetic construct
  source 1..20: mol_type = other RNA
ctcccctactatgccctgtg

SEQ ID NO: 3889 - RNA, 20 nt, synthetic construct
  source 1..20: mol_type = other RNA
tcccctactatgccctgtga

SEQ ID NO: 3890 - RNA, 20 nt, synthetic construct
  source 1..20: mol_type = other RNA
cccctactatgccctgtgag

SEQ ID NO: 3891 - RNA, 20 nt, synthetic construct
  source 1..20: mol_type = other RNA
tactatgccctgtgagggga

SEQ ID NO: 3892 - RNA, 20 nt, synthetic construct
  source 1..20: mol_type = other RNA
actatgccctgtgaggggaa

SEQ ID NO: 3893 - RNA, 20 nt, synthetic construct
  source 1..20: mol_type = other RNA
tcccctcacagggcatagta

SEQ ID NO: 3894 - RNA, 20 nt, synthetic construct
  source 1..20: mol_type = other RNA
ttcccctcacagggcatagt

SEQ ID NO: 3895 - RNA, 20 nt, synthetic construct
  source 1..20: mol_type = other RNA
ggactgcccttcccctcaca

SEQ ID NO: 3896 - RNA, 20 nt, synthetic construct
  source 1..20: mol_type = other RNA
tggactgcccttcccctcac

SEQ ID NO: 3897 - RNA, 20 nt, synthetic construct
  source 1..20: mol_type = other RNA
acatctggcttctcagggga

SEQ ID NO: 3898 - RNA, 20 nt, synthetic construct
  source 1..20: mol_type = other RNA
tgagaagccagatgtcgaga

SEQ ID NO: 3899 - RNA, 20 nt, synthetic construct
  source 1..20: mol_type = other RNA
ctcgacatctggcttctcag

SEQ ID NO: 3900 - RNA, 20 nt, synthetic construct
  source 1..20: mol_type = other RNA
tctcgacatctggcttctca

SEQ ID NO: 3901 - RNA, 20 nt, synthetic construct
  source 1..20: mol_type = other RNA
gaagccagatgtcgagaagg

SEQ ID NO: 3902 - RNA, 20 nt, synthetic construct
  source 1..20: mol_type = other RNA
ttcacctccttctcgacatc

SEQ ID NO: 3903 - RNA, 20 nt, synthetic construct
  source 1..20: mol_type = other RNA
ggaggtgaagcccccaccca

SEQ ID NO: 3904 - RNA, 20 nt, synthetic construct
  source 1..20: mol_type = other RNA
ccacccaaggagaagattga

SEQ ID NO: 3905 - RNA, 20 nt, synthetic construct
  source 1..20: mol_type = other RNA
cacccaaggagaagattgaa

SEQ ID NO: 3906 - RNA, 20 nt, synthetic construct
  source 1..20: mol_type = other RNA
tcaatcttctccttgggtgg

SEQ ID NO: 3907 - RNA, 20 nt, synthetic construct
  source 1..20: mol_type = other RNA
ttcaatcttctccttgggtg

SEQ ID NO: 3908 - RNA, 20 nt, synthetic construct
  source 1..20: mol_type = other RNA
cttcaatcttctccttgggt

SEQ ID NO: 3909 - RNA, 20 nt, synthetic construct
  source 1..20: mol_type = other RNA
ccttcaatcttctccttggg

SEQ ID NO: 3910 - RNA, 20 nt, synthetic construct
  source 1..20: mol_type = other RNA
gtcccttcaatcttctcctt

SEQ ID NO: 3911 - RNA, 20 nt, synthetic construct
  source 1..20: mol_type = other RNA
gagaagattgaagggaccct

SEQ ID NO: 3912 - RNA, 20 nt, synthetic construct
  source 1..20: mol_type = other RNA
agaagattgaagggaccctt

SEQ ID NO: 3913 - RNA, 20 nt, synthetic construct
  source 1..20: mol_type = other RNA
gaagattgaagggacccttg

SEQ ID NO: 3914 - RNA, 20 nt, synthetic construct
  source 1..20: mol_type = other RNA
ctggtcgtaaagaaccccaa

SEQ ID NO: 3915 - RNA, 20 nt, synthetic construct
  source 1..20: mol_type = other RNA
gctggtcgtaaagaacccca

SEQ ID NO: 3916 - RNA, 20 nt, synthetic construct
  source 1..20: mol_type = other RNA
cgtactgcacgtgtcgtggc

SEQ ID NO: 3917 - RNA, 20 nt, synthetic construct
  source 1..20: mol_type = other RNA
gtggcgtactgcacgtgtcg

SEQ ID NO: 3918 - RNA, 20 nt, synthetic construct
  source 1..20: mol_type = other RNA
cacccattttcccatccccc

SEQ ID NO: 3919 - RNA, 20 nt, synthetic construct
  source 1..20: mol_type = other RNA
ctgggggatgggaaaatggg

SEQ ID NO: 3920 - RNA, 20 nt, synthetic construct
  source 1..20: mol_type = other RNA
tacctgggggatgggaaaat

SEQ ID NO: 3921 - RNA, 20 nt, synthetic construct
  source 1..20: mol_type = other RNA
gtacctgggggatgggaaaa

SEQ ID NO: 3922 - RNA, 20 nt, synthetic construct
  source 1..20: mol_type = other RNA
gggaatagtacctgggggat

SEQ ID NO: 3923 - RNA, 20 nt, synthetic construct
  source 1..20: mol_type = other RNA
ggggaatagtacctggggga

SEQ ID NO: 3924 - RNA, 20 nt, synthetic construct
  source 1..20: mol_type = other RNA
tgctggggaatagtacctgg

SEQ ID NO: 3925 - RNA, 20 nt, synthetic construct
  source 1..20: mol_type = other RNA
gtgctggggaatagtacctg

SEQ ID NO: 3926 - RNA, 20 nt, synthetic construct
  source 1..20: mol_type = other RNA
ggtgctggggaatagtacct

SEQ ID NO: 3927 - RNA, 20 nt, synthetic construct
  source 1..20: mol_type = other RNA
aggtgctggggaatagtacc

SEQ ID NO: 3928 - RNA, 20 nt, synthetic construct
  source 1..20: mol_type = other RNA
tgatggtgctgctgggatgc

SEQ ID NO: 3929 - RNA, 20 nt, synthetic construct
  source 1..20: mol_type = other RNA
tggtgctgctgggatgcagg

SEQ ID NO: 3930 - RNA, 20 nt, synthetic construct
  source 1..20: mol_type = other RNA
gcagccatgagtgcaaccag

SEQ ID NO: 3931 - RNA, 20 nt, synthetic construct
  source 1..20: mol_type = other RNA
ccatgagtgcaaccagcggt

SEQ ID NO: 3932 - RNA, 20 nt, synthetic construct
  source 1..20: mol_type = other RNA
ccaaccgctggttgcactca

SEQ ID NO: 3933 - RNA, 20 nt, synthetic construct
  source 1..20: mol_type = other RNA
cagcggttggtcgtactgtt

SEQ ID NO: 3934 - RNA, 20 nt, synthetic construct
  source 1..20: mol_type = other RNA
agcggttggtcgtactgttt

SEQ ID NO: 3935 - RNA, 20 nt, synthetic construct
  source 1..20: mol_type = other RNA
gcggttggtcgtactgtttg

SEQ ID NO: 3936 - RNA, 20 nt, synthetic construct
  source 1..20: mol_type = other RNA
caaacagtacgaccaaccgc

SEQ ID NO: 3937 - RNA, 20 nt, synthetic construct
  source 1..20: mol_type = other RNA
gttggtcgtactgtttgggg

SEQ ID NO: 3938 - RNA, 20 nt, synthetic construct
  source 1..20: mol_type = other RNA
ttggtcgtactgtttggggt

SEQ ID NO: 3939 - RNA, 20 nt, synthetic construct
  source 1..20: mol_type = other RNA
gattttcttgatggcatggc

SEQ ID NO: 3940 - RNA, 20 nt, synthetic construct
  source 1..20: mol_type = other RNA
tgattttcttgatggcatgg

SEQ ID NO: 3941 - RNA, 20 nt, synthetic construct
  source 1..20: mol_type = other RNA
tgccatcaagaaaatcacca

SEQ ID NO: 3942 - RNA, 20 nt, synthetic construct
  source 1..20: mol_type = other RNA
tggtgattttcttgatggca

SEQ ID NO: 3943 - RNA, 20 nt, synthetic construct
  source 1..20: mol_type = other RNA
atccttggtgattttcttga

SEQ ID NO: 3944 - RNA, 20 nt, synthetic construct
  source 1..20: mol_type = other RNA
aatcaccaaggatatcttga

SEQ ID NO: 3945 - RNA, 20 nt, synthetic construct
  source 1..20: mol_type = other RNA
cagaaccttcaagatatcct

SEQ ID NO: 3946 - RNA, 20 nt, synthetic construct
  source 1..20: mol_type = other RNA
ttgaaggttctgaaccgcaa

SEQ ID NO: 3947 - RNA, 20 nt, synthetic construct
  source 1..20: mol_type = other RNA
tgaaggttctgaaccgcaaa

SEQ ID NO: 3948 - RNA, 20 nt, synthetic construct
  source 1..20: mol_type = other RNA
cgcaaagggacagcagaaac

SEQ ID NO: 3949 - RNA, 20 nt, synthetic construct
  source 1..20: mol_type = other RNA
aaagggacagcagaaactgg

SEQ ID NO: 3950 - RNA, 20 nt, synthetic construct
  source 1..20: mol_type = other RNA
aagggacagcagaaactggt

SEQ ID NO: 3951 - RNA, 20 nt, synthetic construct
  source 1..20: mol_type = other RNA
agcagaaactggtgggtttg

SEQ ID NO: 3952 - RNA, 20 nt, synthetic construct
  source 1..20: mol_type = other RNA
gtagagggggggaatgaggg

SEQ ID NO: 3953 - RNA, 20 nt, synthetic construct
  source 1..20: mol_type = other RNA
tgtagagggggggaatgagg

SEQ ID NO: 3954 - RNA, 20 nt, synthetic construct
  source 1..20: mol_type = other RNA
ctgtagagggggggaatgag

SEQ ID NO: 3955 - RNA, 20 nt, synthetic construct
  source 1..20: mol_type = other RNA
tctgtagagggggggaatga

SEQ ID NO: 3956 - RNA, 20 nt, synthetic construct
  source 1..20: mol_type = other RNA
gtctgtagagggggggaatg

SEQ ID NO: 3957 - RNA, 20 nt, synthetic construct
  source 1..20: mol_type = other RNA
caagctggtctgtagagggg

SEQ ID NO: 3958 - RNA, 20 nt, synthetic construct
  source 1..20: mol_type = other RNA
gcaagctggtctgtagaggg

SEQ ID NO: 3959 - RNA, 20 nt, synthetic construct
  source 1..20: mol_type = other RNA
agcaagctggtctgtagagg

SEQ ID NO: 3960 - RNA, 20 nt, synthetic construct
  source 1..20: mol_type = other RNA
gagcaagctggtctgtagag

SEQ ID NO: 3961 - RNA, 20 nt, synthetic construct
  source 1..20: mol_type = other RNA
ggagcaagctggtctgtaga

SEQ ID NO: 3962 - RNA, 20 nt, synthetic construct
  source 1..20: mol_type = other RNA
aggagcaagctggtctgtag

SEQ ID NO: 3963 - RNA, 20 nt, synthetic construct
  source 1..20: mol_type = other RNA
gaggcacaataggagcaagc

SEQ ID NO: 3964 - RNA, 20 nt, synthetic construct
  source 1..20: mol_type = other RNA
cctattgtgcctctgaatcc

SEQ ID NO: 3965 - RNA, 20 nt, synthetic construct
  source 1..20: mol_type = other RNA
ccaggattcagaggcacaat

SEQ ID NO: 3966 - RNA, 20 nt, synthetic construct
  source 1..20: mol_type = other RNA
gtcaggtctccaggattcag

SEQ ID NO: 3967 - RNA, 20 nt, synthetic construct
  source 1..20: mol_type = other RNA
cctggagacctgacattctt

SEQ ID NO: 3968 - RNA, 20 nt, synthetic construct
  source 1..20: mol_type = other RNA
cctaagaatgtcaggtctcc

SEQ ID NO: 3969 - RNA, 20 nt, synthetic construct
  source 1..20: mol_type = other RNA
gtgaggtacctaagaatgtc

SEQ ID NO: 3970 - RNA, 20 nt, synthetic construct
  source 1..20: mol_type = other RNA
tccctttcaactgtcccctc

SEQ ID NO: 3971 - RNA, 20 nt, synthetic construct
  source 1..20: mol_type = other RNA
ctttcaactgtcccctcagg

SEQ ID NO: 3972 - RNA, 20 nt, synthetic construct
  source 1..20: mol_type = other RNA
tttcaactgtcccctcaggt

SEQ ID NO: 3973 - RNA, 20 nt, synthetic construct
  source 1..20: mol_type = other RNA
ttcaactgtcccctcaggtg

SEQ ID NO: 3974 - RNA, 20 nt, synthetic construct
  source 1..20: mol_type = other RNA
acctgaggggacagttgaaa

SEQ ID NO: 3975 - RNA, 20 nt, synthetic construct
  source 1..20: mol_type = other RNA
cacctgaggggacagttgaa

SEQ ID NO: 3976 - RNA, 20 nt, synthetic construct
  source 1..20: mol_type = other RNA
aactgtcccctcaggtgggg

SEQ ID NO: 3977 - RNA, 20 nt, synthetic construct
  source 1..20: mol_type = other RNA
gtcccctcaggtggggagga

SEQ ID NO: 3978 - RNA, 20 nt, synthetic construct
  source 1..20: mol_type = other RNA
tcccctcaggtggggaggat

SEQ ID NO: 3979 - RNA, 20 nt, synthetic construct
  source 1..20: mol_type = other RNA
gcccatcctccccacctgag

SEQ ID NO: 3980 - RNA, 20 nt, synthetic construct
  source 1..20: mol_type = other RNA
tgcccatcctccccacctga

SEQ ID NO: 3981 - RNA, 20 nt, synthetic construct
  source 1..20: mol_type = other RNA
ctgcccatcctccccacctg

SEQ ID NO: 3982 - RNA, 20 nt, synthetic construct
  source 1..20: mol_type = other RNA
gtggggaggatgggcagaag

SEQ ID NO: 3983 - RNA, 20 nt, synthetic construct
  source 1..20: mol_type = other RNA
ggcagaagcggcgacgcaac

SEQ ID NO: 3984 - RNA, 20 nt, synthetic construct
  source 1..20: mol_type = other RNA
cagtggggaaggcttcaggc

SEQ ID NO: 3985 - RNA, 20 nt, synthetic construct
  source 1..20: mol_type = other RNA
tcagcagtggggaaggcttc

SEQ ID NO: 3986 - RNA, 20 nt, synthetic construct
  source 1..20: mol_type = other RNA
gatatcttcagcagtgggga

SEQ ID NO: 3987 - RNA, 20 nt, synthetic construct
  source 1..20: mol_type = other RNA
caaagatatcttcagcagtg

SEQ ID NO: 3988 - RNA, 20 nt, synthetic construct
  source 1..20: mol_type = other RNA
gcaaagatatcttcagcagt

SEQ ID NO: 3989 - RNA, 20 nt, synthetic construct
  source 1..20: mol_type = other RNA
agcaaagatatcttcagcag

SEQ ID NO: 3990 - RNA, 20 nt, synthetic construct
  source 1..20: mol_type = other RNA
ggtcataatgtgaaaggtgc

SEQ ID NO: 3991 - RNA, 20 nt, synthetic construct
  source 1..20: mol_type = other RNA
ttcacattatgaccaacacc

SEQ ID NO: 3992 - RNA, 20 nt, synthetic construct
  source 1..20: mol_type = other RNA
ggtgttggtcataatgtgaa

SEQ ID NO: 3993 - RNA, 20 nt, synthetic construct
  source 1..20: mol_type = other RNA
ttatgaccaacaccaggtca

SEQ ID NO: 3994 - RNA, 20 nt, synthetic construct
  source 1..20: mol_type = other RNA
ccaacaccaggtcacggctc

SEQ ID NO: 3995 - RNA, 20 nt, synthetic construct
  source 1..20: mol_type = other RNA
accaggtcacggctcaggtg

SEQ ID NO: 3996 - RNA, 20 nt, synthetic construct
  source 1..20: mol_type = other RNA
ccaggtcacggctcaggtgt

SEQ ID NO: 3997 - RNA, 20 nt, synthetic construct
  source 1..20: mol_type = other RNA
cccacacctgagccgtgacc

SEQ ID NO: 3998 - RNA, 20 nt, synthetic construct
  source 1..20: mol_type = other RNA
tcactcccactgcccttatc

SEQ ID NO: 3999 - RNA, 20 nt, synthetic construct
  source 1..20: mol_type = other RNA
actgcccttatcaggtctcc

SEQ ID NO: 4000 - RNA, 20 nt, synthetic construct
  source 1..20: mol_type = other RNA
ggagacctgataagggcagt

SEQ ID NO: 4001 - RNA, 20 nt, synthetic construct
  source 1..20: mol_type = other RNA
gggagacctgataagggcag

SEQ ID NO: 4002 - RNA, 20 nt, synthetic construct
  source 1..20: mol_type = other RNA
cattccgggagacctgataa

SEQ ID NO: 4003 - RNA, 20 nt, synthetic construct
  source 1..20: mol_type = other RNA
tcaggtctcccggaatgttc

SEQ ID NO: 4004 - RNA, 20 nt, synthetic construct
  source 1..20: mol_type = other RNA
gatctgctccagaacattcc

SEQ ID NO: 4005 - RNA, 20 nt, synthetic construct
  source 1..20: mol_type = other RNA
tgatctgctccagaacattc

SEQ ID NO: 4006 - RNA, 20 nt, synthetic construct
  source 1..20: mol_type = other RNA
cagatcacgagctttgccct

SEQ ID NO: 4007 - RNA, 20 nt, synthetic construct
  source 1..20: mol_type = other RNA
caagtggtatgacatgccaa

SEQ ID NO: 4008 - RNA, 20 nt, synthetic construct
  source 1..20: mol_type = other RNA
gcaagtggtatgacatgcca

SEQ ID NO: 4009 - RNA, 20 nt, synthetic construct
  source 1..20: mol_type = other RNA
catgtcataccacttgcctc

SEQ ID NO: 4010 - RNA, 20 nt, synthetic construct
  source 1..20: mol_type = other RNA
catgctgcaccagaggcaag

SEQ ID NO: 4011 - RNA, 20 nt, synthetic construct
  source 1..20: mol_type = other RNA
aactgcacatgctgcaccag

SEQ ID NO: 4012 - RNA, 20 nt, synthetic construct
  source 1..20: mol_type = other RNA
gcagttcatcttcgacctca

SEQ ID NO: 4013 - RNA, 20 nt, synthetic construct
  source 1..20: mol_type = other RNA
tgctgagtgaatattccatg

SEQ ID NO: 4014 - RNA, 20 nt, synthetic construct
  source 1..20: mol_type = other RNA
gaatattcactcagcatcag

SEQ ID NO: 4015 - RNA, 20 nt, synthetic construct
  source 1..20: mol_type = other RNA
cctcatcgactttgccattc

SEQ ID NO: 4016 - RNA, 20 nt, synthetic construct
  source 1..20: mol_type = other RNA
catcgactttgccattcagg

SEQ ID NO: 4017 - RNA, 20 nt, synthetic construct
  source 1..20: mol_type = other RNA
atcgactttgccattcaggt

SEQ ID NO: 4018 - RNA, 20 nt, synthetic construct
  source 1..20: mol_type = other RNA
tcgactttgccattcaggtg

SEQ ID NO: 4019 - RNA, 20 nt, synthetic construct
  source 1..20: mol_type = other RNA
tgccattcaggtggggaagt

SEQ ID NO: 4020 - RNA, 20 nt, synthetic construct
  source 1..20: mol_type = other RNA
gccattcaggtggggaagtt

SEQ ID NO: 4021 - RNA, 20 nt, synthetic construct
  source 1..20: mol_type = other RNA
ccattcaggtggggaagttg

SEQ ID NO: 4022 - RNA, 20 nt, synthetic construct
  source 1..20: mol_type = other RNA
ccccaacttccccacctgaa

SEQ ID NO: 4023 - RNA, 20 nt, synthetic construct
  source 1..20: mol_type = other RNA
gtggggaagttggggagatg

SEQ ID NO: 4024 - RNA, 20 nt, synthetic construct
  source 1..20: mol_type = other RNA
tggggaagttggggagatga

SEQ ID NO: 4025 - RNA, 20 nt, synthetic construct
  source 1..20: mol_type = other RNA
ggaagttggggagatgaggg

SEQ ID NO: 4026 - RNA, 20 nt, synthetic construct
  source 1..20: mol_type = other RNA
gcagctagcagagtaaacgg

SEQ ID NO: 4027 - RNA, 20 nt, synthetic construct
  source 1..20: mol_type = other RNA
agcagctagcagagtaaacg

SEQ ID NO: 4028 - RNA, 20 nt, synthetic construct
  source 1..20: mol_type = other RNA
cagcagctagcagagtaaac

SEQ ID NO: 4029 - RNA, 20 nt, synthetic construct
  source 1..20: mol_type = other RNA
tcagcagctagcagagtaaa

SEQ ID NO: 4030 - RNA, 20 nt, synthetic construct
  source 1..20: mol_type = other RNA
gaatgaactgagtgtagttg

SEQ ID NO: 4031 - RNA, 20 nt, synthetic construct
  source 1..20: mol_type = other RNA
tgagctgcttctcaaatcct

SEQ ID NO: 4032 - RNA, 20 nt, synthetic construct
  source 1..20: mol_type = other RNA
gcttctcaaatcctcggatc

SEQ ID NO: 4033 - RNA, 20 nt, synthetic construct
  source 1..20: mol_type = other RNA
tctcaaatcctcggatctgg

SEQ ID NO: 4034 - RNA, 20 nt, synthetic construct
  source 1..20: mol_type = other RNA
ctcaaatcctcggatctggt

SEQ ID NO: 4035 - RNA, 20 nt, synthetic construct
  source 1..20: mol_type = other RNA
gtagctgcccaccagatccg

SEQ ID NO: 4036 - RNA, 20 nt, synthetic construct
  source 1..20: mol_type = other RNA
tagcctgtgcctgtgcatcg

SEQ ID NO: 4037 - RNA, 20 nt, synthetic construct
  source 1..20: mol_type = other RNA
cagccacgatgcacaggcac

SEQ ID NO: 4038 - RNA, 20 nt, synthetic construct
  source 1..20: mol_type = other RNA
tgtgcatcgtggctgtcctg

SEQ ID NO: 4039 - RNA, 20 nt, synthetic construct
  source 1..20: mol_type = other RNA
gcaggacagccacgatgcac

SEQ ID NO: 4040 - RNA, 20 nt, synthetic construct
  source 1..20: mol_type = other RNA
ggcaggcatgatagtgccgc

SEQ ID NO: 4041 - RNA, 20 nt, synthetic construct
  source 1..20: mol_type = other RNA
tgcctgcctcatcctcaacc

SEQ ID NO: 4042 - RNA, 20 nt, synthetic construct
  source 1..20: mol_type = other RNA
gtcctggttgaggatgaggc

SEQ ID NO: 4043 - RNA, 20 nt, synthetic construct
  source 1..20: mol_type = other RNA
catcctcaaccaggaccaga

SEQ ID NO: 4044 - RNA, 20 nt, synthetic construct
  source 1..20: mol_type = other RNA
tctggtcctggttgaggatg

SEQ ID NO: 4045 - RNA, 20 nt, synthetic construct
  source 1..20: mol_type = other RNA
caaccaggaccagatggcac

SEQ ID NO: 4046 - RNA, 20 nt, synthetic construct
  source 1..20: mol_type = other RNA
gtgccatctggtcctggttg

SEQ ID NO: 4047 - RNA, 20 nt, synthetic construct
  source 1..20: mol_type = other RNA
agacctgtgccatctggtcc

SEQ ID NO: 4048 - RNA, 20 nt, synthetic construct
  source 1..20: mol_type = other RNA
ccagatggcacaggtctttg

SEQ ID NO: 4049 - RNA, 20 nt, synthetic construct
  source 1..20: mol_type = other RNA
cagatggcacaggtctttga

SEQ ID NO: 4050 - RNA, 20 nt, synthetic construct
  source 1..20: mol_type = other RNA
agatggcacaggtctttgag

SEQ ID NO: 4051 - RNA, 20 nt, synthetic construct
  source 1..20: mol_type = other RNA
cctcaaagacctgtgccatc

SEQ ID NO: 4052 - RNA, 20 nt, synthetic construct
  source 1..20: mol_type = other RNA
ttgaggggtaagcagagctt

SEQ ID NO: 4053 - RNA, 20 nt, synthetic construct
  source 1..20: mol_type = other RNA
ccaaccttgcttcttcatgc

SEQ ID NO: 4054 - RNA, 20 nt, synthetic construct
  source 1..20: mol_type = other RNA
catgaagaagcaaggttggg

SEQ ID NO: 4055 - RNA, 20 nt, synthetic construct
  source 1..20: mol_type = other RNA
ctgcatgaagaagcaaggtt

SEQ ID NO: 4056 - RNA, 20 nt, synthetic construct
  source 1..20: mol_type = other RNA
cctgcatgaagaagcaaggt

SEQ ID NO: 4057 - RNA, 20 nt, synthetic construct
  source 1..20: mol_type = other RNA
gcttcttcatgcaggctgtg

SEQ ID NO: 4058 - RNA, 20 nt, synthetic construct
  source 1..20: mol_type = other RNA
acagcctgcatgaagaagca

SEQ ID NO: 4059 - RNA, 20 nt, synthetic construct
  source 1..20: mol_type = other RNA
ctgtgtggcgtcgtgaagca

SEQ ID NO: 4060 - RNA, 20 nt, synthetic construct
  source 1..20: mol_type = other RNA
tgtgtggcgtcgtgaagcat

SEQ ID NO: 4061 - RNA, 20 nt, synthetic construct
  source 1..20: mol_type = other RNA
tcgtgaagcatgggatgaac

SEQ ID NO: 4062 - RNA, 20 nt, synthetic construct
  source 1..20: mol_type = other RNA
catgggatgaaccggtccga

SEQ ID NO: 4063 - RNA, 20 nt, synthetic construct
  source 1..20: mol_type = other RNA
ctgcagaggagccatcggac

SEQ ID NO: 4064 - RNA, 20 nt, synthetic construct
  source 1..20: mol_type = other RNA
gcgctctgcagaggagccat

SEQ ID NO: 4065 - RNA, 20 nt, synthetic construct
  source 1..20: mol_type = other RNA
aaggatacagcgctctgcag

SEQ ID NO: 4066 - RNA, 20 nt, synthetic construct
  source 1..20: mol_type = other RNA
acagatcatagagataagca

SEQ ID NO: 4067 - RNA, 20 nt, synthetic construct
  source 1..20: mol_type = other RNA
gttctttaaatggctacagg

SEQ ID NO: 4068 - RNA, 20 nt, synthetic construct
  source 1..20: mol_type = other RNA
agccatttaaagaacaaatt

SEQ ID NO: 4069 - RNA, 20 nt, synthetic construct
  source 1..20: mol_type = other RNA
gccatttaaagaacaaattt

SEQ ID NO: 4070 - RNA, 20 nt, synthetic construct
  source 1..20: mol_type = other RNA
ccatttaaagaacaaatttg

SEQ ID NO: 4071 - RNA, 20 nt, synthetic construct
  source 1..20: mol_type = other RNA
ccccaaatttgttctttaaa

SEQ ID NO: 4072 - RNA, 20 nt, synthetic construct
  source 1..20: mol_type = other RNA
acaaatttggggagctcttc

SEQ ID NO: 4073 - RNA, 20 nt, synthetic construct
  source 1..20: mol_type = other RNA
gggagctcttcaggtaagag

SEQ ID NO: 4074 - RNA, 20 nt, synthetic construct
  source 1..20: mol_type = other RNA
agctcttcaggtaagagagg

SEQ ID NO: 4075 - RNA, 20 nt, synthetic construct
  source 1..20: mol_type = other RNA
cttcaggtaagagaggtgga

SEQ ID NO: 4076 - RNA, 20 nt, synthetic construct
  source 1..20: mol_type = other RNA
ggtaagagaggtggaaggta

SEQ ID NO: 4077 - RNA, 20 nt, synthetic construct
  source 1..20: mol_type = other RNA
gtaagagaggtggaaggtaa

SEQ ID NO: 4078 - RNA, 20 nt, synthetic construct
  source 1..20: mol_type = other RNA
taagagaggtggaaggtaag

SEQ ID NO: 4079 - RNA, 20 nt, synthetic construct
  source 1..20: mol_type = other RNA
tcgctgcagggatggaggaa

SEQ ID NO: 4080 - RNA, 20 nt, synthetic construct
  source 1..20: mol_type = other RNA
aaaagtcgctgcagggatgg

SEQ ID NO: 4081 - RNA, 20 nt, synthetic construct
  source 1..20: mol_type = other RNA
agcaaaagtcgctgcaggga

SEQ ID NO: 4082 - RNA, 20 nt, synthetic construct
  source 1..20: mol_type = other RNA
ctgcagcgacttttgctcaa

SEQ ID NO: 4083 - RNA, 20 nt, synthetic construct
  source 1..20: mol_type = other RNA
tttgagcaaaagtcgctgca

SEQ ID NO: 4084 - RNA, 20 nt, synthetic construct
  source 1..20: mol_type = other RNA
ctttgagcaaaagtcgctgc

SEQ ID NO: 4085 - RNA, 20 nt, synthetic construct
  source 1..20: mol_type = other RNA
gaacaccatctactgcaacg

SEQ ID NO: 4086 - RNA, 20 nt, synthetic construct
  source 1..20: mol_type = other RNA
ctactgcaacgtggagccat

SEQ ID NO: 4087 - RNA, 20 nt, synthetic construct
  source 1..20: mol_type = other RNA
tggctccacgttgcagtaga

SEQ ID NO: 4088 - RNA, 20 nt, synthetic construct
  source 1..20: mol_type = other RNA
catcggaatcaaatatgcgc

SEQ ID NO: 4089 - RNA, 20 nt, synthetic construct
  source 1..20: mol_type = other RNA
atcggaatcaaatatgcgct

SEQ ID NO: 4090 - RNA, 20 nt, synthetic construct
  source 1..20: mol_type = other RNA
cagcgcatatttgattccga

SEQ ID NO: 4091 - RNA, 20 nt, synthetic construct
  source 1..20: mol_type = other RNA
agagtgtcgatcatgaactc

SEQ ID NO: 4092 - RNA, 20 nt, synthetic construct
  source 1..20: mol_type = other RNA
aggtgaaggtgtgagctgca

SEQ ID NO: 4093 - RNA, 20 nt, synthetic construct
  source 1..20: mol_type = other RNA
agctcacaccttcacctaca

SEQ ID NO: 4094 - RNA, 20 nt, synthetic construct
  source 1..20: mol_type = other RNA
gctcacaccttcacctacac

SEQ ID NO: 4095 - RNA, 20 nt, synthetic construct
  source 1..20: mol_type = other RNA
ctcacaccttcacctacacg

SEQ ID NO: 4096 - RNA, 20 nt, synthetic construct
  source 1..20: mol_type = other RNA
accttcacctacacggggct

SEQ ID NO: 4097 - RNA, 20 nt, synthetic construct
  source 1..20: mol_type = other RNA
gcctagccccgtgtaggtga

SEQ ID NO: 4098 - RNA, 20 nt, synthetic construct
  source 1..20: mol_type = other RNA
actcttgcctagccccgtgt

SEQ ID NO: 4099 - RNA, 20 nt, synthetic construct
  source 1..20: mol_type = other RNA
caaagctgtagcggttagca

SEQ ID NO: 4100 - RNA, 20 nt, synthetic construct
  source 1..20: mol_type = other RNA
acaaagctgtagcggttagc

SEQ ID NO: 4101 - RNA, 20 nt, synthetic construct
  source 1..20: mol_type = other RNA
cattgcagacaaagctgtag

SEQ ID NO: 4102 - RNA, 20 nt, synthetic construct
  source 1..20: mol_type = other RNA
tgcccttatgcacgtctgtg

SEQ ID NO: 4103 - RNA, 20 nt, synthetic construct
  source 1..20: mol_type = other RNA
gcccttatgcacgtctgtgt

SEQ ID NO: 4104 - RNA, 20 nt, synthetic construct
  source 1..20: mol_type = other RNA
cccttatgcacgtctgtgtg

SEQ ID NO: 4105 - RNA, 20 nt, synthetic construct
  source 1..20: mol_type = other RNA
ccccacacagacgtgcataa

SEQ ID NO: 4106 - RNA, 20 nt, synthetic construct
  source 1..20: mol_type = other RNA
gccccacacagacgtgcata

SEQ ID NO: 4107 - RNA, 20 nt, synthetic construct
  source 1..20: mol_type = other RNA
tggggcaccatgatcccgat

SEQ ID NO: 4108 - RNA, 20 nt, synthetic construct
  source 1..20: mol_type = other RNA
caccatgatcccgataggta

SEQ ID NO: 4109 - RNA, 20 nt, synthetic construct
  source 1..20: mol_type = other RNA
accatgatcccgataggtat

SEQ ID NO: 4110 - RNA, 20 nt, synthetic construct
  source 1..20: mol_type = other RNA
ccatgatcccgataggtatg

SEQ ID NO: 4111 - RNA, 20 nt, synthetic construct
  source 1..20: mol_type = other RNA
ccccatacctatcgggatca

SEQ ID NO: 4112 - RNA, 20 nt, synthetic construct
  source 1..20: mol_type = other RNA
cagtacaccccatacctatc

SEQ ID NO: 4113 - RNA, 20 nt, synthetic construct
  source 1..20: mol_type = other RNA
tcagtacaccccatacctat

SEQ ID NO: 4114 - RNA, 20 nt, synthetic construct
  source 1..20: mol_type = other RNA
ggtatggggtgtactgagtg

SEQ ID NO: 4115 - RNA, 20 nt, synthetic construct
  source 1..20: mol_type = other RNA
tggggtgtactgagtgagga

SEQ ID NO: 4116 - RNA, 20 nt, synthetic construct
  source 1..20: mol_type = other RNA
ggggtgtactgagtgaggaa

SEQ ID NO: 4117 - RNA, 20 nt, synthetic construct
  source 1..20: mol_type = other RNA
gggcatttgtacttttccct

SEQ ID NO: 4118 - RNA, 20 nt, synthetic construct
  source 1..20: mol_type = other RNA
ggcatttgtacttttcccta

SEQ ID NO: 4119 - RNA, 20 nt, synthetic construct
  source 1..20: mol_type = other RNA
ttgcgatgtcattcacccta

SEQ ID NO: 4120 - RNA, 20 nt, synthetic construct
  source 1..20: mol_type = other RNA
attgcgatgtcattcaccct

SEQ ID NO: 4121 - RNA, 20 nt, synthetic construct
  source 1..20: mol_type = other RNA
atcctgtgtgcagagctgac

SEQ ID NO: 4122 - RNA, 20 nt, synthetic construct
  source 1..20: mol_type = other RNA
agccggtcagctctgcacac

SEQ ID NO: 4123 - RNA, 20 nt, synthetic construct
  source 1..20: mol_type = other RNA
actcagtgacttgcaatagc

SEQ ID NO: 4124 - RNA, 20 nt, synthetic construct
  source 1..20: mol_type = other RNA
gcaagtcactgagtgcagaa

SEQ ID NO: 4125 - RNA, 20 nt, synthetic construct
  source 1..20: mol_type = other RNA
tcactgagtgcagaatggct

SEQ ID NO: 4126 - RNA, 20 nt, synthetic construct
  source 1..20: mol_type = other RNA
agaatggctaggagtgctta

SEQ ID NO: 4127 - RNA, 20 nt, synthetic construct
  source 1..20: mol_type = other RNA
ttgtgctgctcctctaacaa

SEQ ID NO: 4128 - RNA, 20 nt, synthetic construct
  source 1..20: mol_type = other RNA
attgttagaggagcagcaca

SEQ ID NO: 4129 - RNA, 20 nt, synthetic construct
  source 1..20: mol_type = other RNA
tcctctaacaatggcacttg

SEQ ID NO: 4130 - RNA, 20 nt, synthetic construct
  source 1..20: mol_type = other RNA
accacaagtgccattgttag

SEQ ID NO: 4131 - RNA, 20 nt, synthetic construct
  source 1..20: mol_type = other RNA
tgcaatgttgatgtgagact

SEQ ID NO: 4132 - RNA, 20 nt, synthetic construct
  source 1..20: mol_type = other RNA
gcaatgttgatgtgagactt

SEQ ID NO: 4133 - RNA, 20 nt, synthetic construct
  source 1..20: mol_type = other RNA
caatgttgatgtgagacttg

SEQ ID NO: 4134 - RNA, 20 nt, synthetic construct
  source 1..20: mol_type = other RNA
tgttgatgtgagacttgggg

SEQ ID NO: 4135 - RNA, 20 nt, synthetic construct
  source 1..20: mol_type = other RNA
gttgatgtgagacttggggt

SEQ ID NO: 4136 - RNA, 20 nt, synthetic construct
  source 1..20: mol_type = other RNA
ttgatgtgagacttggggtg

SEQ ID NO: 4137 - RNA, 20 nt, synthetic construct
  source 1..20: mol_type = other RNA
gtctgtctgttttttcctcc

SEQ ID NO: 4138 - RNA, 20 nt, synthetic construct
  source 1..20: mol_type = other RNA
aagataggtcactgacctgg

SEQ ID NO: 4139 - RNA, 20 nt, synthetic construct
  source 1..20: mol_type = other RNA
gaaaagataggtcactgacc

SEQ ID NO: 4140 - RNA, 20 nt, synthetic construct
  source 1..20: mol_type = other RNA
cctatcttttcatgactcgc

SEQ ID NO: 4141 - RNA, 20 nt, synthetic construct
  source 1..20: mol_type = other RNA
ccagcgagtcatgaaaagat

SEQ ID NO: 4142 - RNA, 20 nt, synthetic construct
  source 1..20: mol_type = other RNA
ttgttgccatcctcatcgct

SEQ ID NO: 4143 - RNA, 20 nt, synthetic construct
  source 1..20: mol_type = other RNA
acactgccgagcgatgagga

SEQ ID NO: 4144 - RNA, 20 nt, synthetic construct
  source 1..20: mol_type = other RNA
gcaaacactgccgagcgatg

SEQ ID NO: 4145 - RNA, 20 nt, synthetic construct
  source 1..20: mol_type = other RNA
cgctcggcagtgtttgctcc

SEQ ID NO: 4146 - RNA, 20 nt, synthetic construct
  source 1..20: mol_type = other RNA
cacagcgaatcagatcttcc

SEQ ID NO: 4147 - RNA, 20 nt, synthetic construct
  source 1..20: mol_type = other RNA
atcccttcactccttaatgc

SEQ ID NO: 4148 - RNA, 20 nt, synthetic construct
  source 1..20: mol_type = other RNA
agcattaaggagtgaaggga

SEQ ID NO: 4149 - RNA, 20 nt, synthetic construct
  source 1..20: mol_type = other RNA
caccagcattaaggagtgaa

SEQ ID NO: 4150 - RNA, 20 nt, synthetic construct
  source 1..20: mol_type = other RNA
tcaccagcattaaggagtga

SEQ ID NO: 4151 - RNA, 20 nt, synthetic construct
  source 1..20: mol_type = other RNA
ttggtagttcaccagcatta

SEQ ID NO: 4152 - RNA, 20 nt, synthetic construct
  source 1..20: mol_type = other RNA
aaaggaagacaaaacagatc

SEQ ID NO: 4153 - RNA, 20 nt, synthetic construct
  source 1..20: mol_type = other RNA
ccttttagcttgtagtgaac

SEQ ID NO: 4154 - RNA, 20 nt, synthetic construct
  source 1..20: mol_type = other RNA
cctgttcactacaagctaaa

SEQ ID NO: 4155 - RNA, 20 nt, synthetic construct
  source 1..20: mol_type = other RNA
agtgaacaggactctgagcc

SEQ ID NO: 4156 - RNA, 20 nt, synthetic construct
  source 1..20: mol_type = other RNA
gtgaacaggactctgagcca

SEQ ID NO: 4157 - RNA, 20 nt, synthetic construct
  source 1..20: mol_type = other RNA
tgaacaggactctgagccag

SEQ ID NO: 4158 - RNA, 20 nt, synthetic construct
  source 1..20: mol_type = other RNA
aggactctgagccaggggcc

SEQ ID NO: 4159 - RNA, 20 nt, synthetic construct
  source 1..20: mol_type = other RNA
cggcaggtaagccgggcccc

SEQ ID NO: 4160 - RNA, 20 nt, synthetic construct
  source 1..20: mol_type = other RNA
gaggatgcggcaggtaagcc

SEQ ID NO: 4161 - RNA, 20 nt, synthetic construct
  source 1..20: mol_type = other RNA
ggaggatgcggcaggtaagc

SEQ ID NO: 4162 - RNA, 20 nt, synthetic construct
  source 1..20: mol_type = other RNA
aaggtgaaggaggatgcggc

SEQ ID NO: 4163 - RNA, 20 nt, synthetic construct
  source 1..20: mol_type = other RNA
tgaaaaggtgaaggaggatg

SEQ ID NO: 4164 - RNA, 20 nt, synthetic construct
  source 1..20: mol_type = other RNA
gtgtcttgaaaaggtgaagg

SEQ ID NO: 4165 - RNA, 20 nt, synthetic construct
  source 1..20: mol_type = other RNA
gcggtgtcttgaaaaggtga

SEQ ID NO: 4166 - RNA, 20 nt, synthetic construct
  source 1..20: mol_type = other RNA
tgagctgcggtgtcttgaaa

SEQ ID NO: 4167 - RNA, 20 nt, synthetic construct
  source 1..20: mol_type = other RNA
gactggcaaggattgagctg

SEQ ID NO: 4168 - RNA, 20 nt, synthetic construct
  source 1..20: mol_type = other RNA
ctcaatccttgccagtctga

SEQ ID NO: 4169 - RNA, 20 nt, synthetic construct
  source 1..20: mol_type = other RNA
ttacttccatcagactggca

SEQ ID NO: 4170 - RNA, 20 nt, synthetic construct
  source 1..20: mol_type = other RNA
gtcacttacttccatcagac

SEQ ID NO: 4171 - RNA, 20 nt, synthetic construct
  source 1..20: mol_type = other RNA
ggggaaggcgatgaagtcag

SEQ ID NO: 4172 - RNA, 20 nt, synthetic construct
  source 1..20: mol_type = other RNA
tggggaaggcgatgaagtca

SEQ ID NO: 4173 - RNA, 20 nt, synthetic construct
  source 1..20: mol_type = other RNA
ctggggaaggcgatgaagtc

SEQ ID NO: 4174 - RNA, 20 nt, synthetic construct
  source 1..20: mol_type = other RNA
tccccagacaagcctacagt

SEQ ID NO: 4175 - RNA, 20 nt, synthetic construct
  source 1..20: mol_type = other RNA
actgtaggcttgtctgggga

SEQ ID NO: 4176 - RNA, 20 nt, synthetic construct
  source 1..20: mol_type = other RNA
tcctactgtaggcttgtctg

SEQ ID NO: 4177 - RNA, 20 nt, synthetic construct
  source 1..20: mol_type = other RNA
ttcctactgtaggcttgtct

SEQ ID NO: 4178 - RNA, 20 nt, synthetic construct
  source 1..20: mol_type = other RNA
attcctactgtaggcttgtc

SEQ ID NO: 4179 - RNA, 20 nt, synthetic construct
  source 1..20: mol_type = other RNA
gaggagcggattcctactgt

SEQ ID NO: 4180 - RNA, 20 nt, synthetic construct
  source 1..20: mol_type = other RNA
ggtggcggtcgcaggaggag

SEQ ID NO: 4181 - RNA, 20 nt, synthetic construct
  source 1..20: mol_type = other RNA
ctcctgcgaccgccacctgc

SEQ ID NO: 4182 - RNA, 20 nt, synthetic construct
  source 1..20: mol_type = other RNA
cagcaggtggcggtcgcagg

SEQ ID NO: 4183 - RNA, 20 nt, synthetic construct
  source 1..20: mol_type = other RNA
agccagcaggtggcggtcgc

SEQ ID NO: 4184 - RNA, 20 nt, synthetic construct
  source 1..20: mol_type = other RNA
gggaggcagccagcaggtgg

SEQ ID NO: 4185 - RNA, 20 nt, synthetic construct
  source 1..20: mol_type = other RNA
tctgggaggcagccagcagg

SEQ ID NO: 4186 - RNA, 20 nt, synthetic construct
  source 1..20: mol_type = other RNA
ggttctgggaggcagccagc

SEQ ID NO: 4187 - RNA, 20 nt, synthetic construct
  source 1..20: mol_type = other RNA
tgcctcccagaaccgcatcg

SEQ ID NO: 4188 - RNA, 20 nt, synthetic construct
  source 1..20: mol_type = other RNA
tcccagaaccgcatcgtgga

SEQ ID NO: 4189 - RNA, 20 nt, synthetic construct
  source 1..20: mol_type = other RNA
atccacgatgcggttctggg

SEQ ID NO: 4190 - RNA, 20 nt, synthetic construct
  source 1..20: mol_type = other RNA
tccatccacgatgcggttct

SEQ ID NO: 4191 - RNA, 20 nt, synthetic construct
  source 1..20: mol_type = other RNA
ctccatccacgatgcggttc

SEQ ID NO: 4192 - RNA, 20 nt, synthetic construct
  source 1..20: mol_type = other RNA
acacggctccatccacgatg

SEQ ID NO: 4193 - RNA, 20 nt, synthetic construct
  source 1..20: mol_type = other RNA
agccgtgtttgctgttctca

SEQ ID NO: 4194 - RNA, 20 nt, synthetic construct
  source 1..20: mol_type = other RNA
agccttgagaacagcaaaca

SEQ ID NO: 4195 - RNA, 20 nt, synthetic construct
  source 1..20: mol_type = other RNA
ctcaaggctgtgtttgtact

SEQ ID NO: 4196 - RNA, 20 nt, synthetic construct
  source 1..20: mol_type = other RNA
ggctgtgtttgtacttggta

SEQ ID NO: 4197 - RNA, 20 nt, synthetic construct
  source 1..20: mol_type = other RNA
gctgtgtttgtacttggtac

SEQ ID NO: 4198 - RNA, 20 nt, synthetic construct
  source 1..20: mol_type = other RNA
ctgtgtttgtacttggtacg

SEQ ID NO: 4199 - RNA, 20 nt, synthetic construct
  source 1..20: mol_type = other RNA
tgtgtttgtacttggtacgg

SEQ ID NO: 4200 - RNA, 20 nt, synthetic construct
  source 1..20: mol_type = other RNA
tttgtacttggtacgggggt

SEQ ID NO: 4201 - RNA, 20 nt, synthetic construct
  source 1..20: mol_type = other RNA
tacttggtacgggggtagga

SEQ ID NO: 4202 - RNA, 20 nt, synthetic construct
  source 1..20: mol_type = other RNA
acttggtacgggggtaggaa

SEQ ID NO: 4203 - RNA, 20 nt, synthetic construct
  source 1..20: mol_type = other RNA
gtacgggggtaggaagggag

SEQ ID NO: 4204 - RNA, 20 nt, synthetic construct
  source 1..20: mol_type = other RNA
atctcccacccgtgaaccac

SEQ ID NO: 4205 - RNA, 20 nt, synthetic construct
  source 1..20: mol_type = other RNA
tctcccacccgtgaaccaca

SEQ ID NO: 4206 - RNA, 20 nt, synthetic construct
  source 1..20: mol_type = other RNA
ctcccacccgtgaaccacag

SEQ ID NO: 4207 - RNA, 20 nt, synthetic construct
  source 1..20: mol_type = other RNA
cccgtgaaccacaggggatg

SEQ ID NO: 4208 - RNA, 20 nt, synthetic construct
  source 1..20: mol_type = other RNA
atcccctgtggttcacgggt

SEQ ID NO: 4209 - RNA, 20 nt, synthetic construct
  source 1..20: mol_type = other RNA
catcccctgtggttcacggg

SEQ ID NO: 4210 - RNA, 20 nt, synthetic construct
  source 1..20: mol_type = other RNA
ccgcatcccctgtggttcac

SEQ ID NO: 4211 - RNA, 20 nt, synthetic construct
  source 1..20: mol_type = other RNA
tccgcatcccctgtggttca

SEQ ID NO: 4212 - RNA, 20 nt, synthetic construct
  source 1..20: mol_type = other RNA
acaggggatgcggaactgaa

SEQ ID NO: 4213 - RNA, 20 nt, synthetic construct
  source 1..20: mol_type = other RNA
tttcagttccgcatcccctg

SEQ ID NO: 4214 - RNA, 20 nt, synthetic construct
  source 1..20: mol_type = other RNA
gatgcggaactgaaaggttc

SEQ ID NO: 4215 - RNA, 20 nt, synthetic construct
  source 1..20: mol_type = other RNA
ggttcaggcttcactgtgac

SEQ ID NO: 4216 - RNA, 20 nt, synthetic construct
  source 1..20: mol_type = other RNA
tcaggcttcactgtgacagg

SEQ ID NO: 4217 - RNA, 20 nt, synthetic construct
  source 1..20: mol_type = other RNA
aggaacagaagaacttccag

SEQ ID NO: 4218 - RNA, 20 nt, synthetic construct
  source 1..20: mol_type = other RNA
aacagaagaacttccagagg

SEQ ID NO: 4219 - RNA, 20 nt, synthetic construct
  source 1..20: mol_type = other RNA
agaagaacttccagaggagg

SEQ ID NO: 4220 - RNA, 20 nt, synthetic construct
  source 1..20: mol_type = other RNA
gaagaacttccagaggagga

SEQ ID NO: 4221 - RNA, 20 nt, synthetic construct
  source 1..20: mol_type = other RNA
gaacttccagaggaggaggg

SEQ ID NO: 4222 - RNA, 20 nt, synthetic construct
  source 1..20: mol_type = other RNA
cttccagaggaggagggagg

SEQ ID NO: 4223 - RNA, 20 nt, synthetic construct
  source 1..20: mol_type = other RNA
ccagaggaggagggaggagg

SEQ ID NO: 4224 - RNA, 20 nt, synthetic construct
  source 1..20: mol_type = other RNA
ccacctcctccctcctcctc

SEQ ID NO: 4225 - RNA, 20 nt, synthetic construct
  source 1..20: mol_type = other RNA
gaggagggaggaggtggcag

SEQ ID NO: 4226 - RNA, 20 nt, synthetic construct
  source 1..20: mol_type = other RNA
gagggaggaggtggcagtgg

SEQ ID NO: 4227 - RNA, 20 nt, synthetic construct
  source 1..20: mol_type = other RNA
gaggaggtggcagtggtggt

SEQ ID NO: 4228 - RNA, 20 nt, synthetic construct
  source 1..20: mol_type = other RNA
gaggtggcagtggtggtcgg

SEQ ID NO: 4229 - RNA, 20 nt, synthetic construct
  source 1..20: mol_type = other RNA
tggcagtggtggtcggaggc

SEQ ID NO: 4230 - RNA, 20 nt, synthetic construct
  source 1..20: mol_type = other RNA
ggcagtggtggtcggaggca

SEQ ID NO: 4231 - RNA, 20 nt, synthetic construct
  source 1..20: mol_type = other RNA
agtggtggtcggaggcaggg

SEQ ID NO: 4232 - RNA, 20 nt, synthetic construct
  source 1..20: mol_type = other RNA
gggtggccgcaacatctctg

SEQ ID NO: 4233 - RNA, 20 nt, synthetic construct
  source 1..20: mol_type = other RNA
ctgtctccacagagatgttg

SEQ ID NO: 4234 - RNA, 20 nt, synthetic construct
  source 1..20: mol_type = other RNA
ctctgtggagacagccagtc

SEQ ID NO: 4235 - RNA, 20 nt, synthetic construct
  source 1..20: mol_type = other RNA
cttggcatagacatccagac

SEQ ID NO: 4236 - RNA, 20 nt, synthetic construct
  source 1..20: mol_type = other RNA
gatgctgcgcagcacgtact

SEQ ID NO: 4237 - RNA, 20 nt, synthetic construct
  source 1..20: mol_type = other RNA
gctgcgcagcatctgccaac

SEQ ID NO: 4238 - RNA, 20 nt, synthetic construct
  source 1..20: mol_type = other RNA
ggaaggtgaaactgacctgt

SEQ ID NO: 4239 - RNA, 20 nt, synthetic construct
  source 1..20: mol_type = other RNA
ccctgattgtcagcttcctc

SEQ ID NO: 4240 - RNA, 20 nt, synthetic construct
  source 1..20: mol_type = other RNA
attgtcagcttcctcaggaa

SEQ ID NO: 4241 - RNA, 20 nt, synthetic construct
  source 1..20: mol_type = other RNA
ttgtcagcttcctcaggaat

SEQ ID NO: 4242 - RNA, 20 nt, synthetic construct
  source 1..20: mol_type = other RNA
cagcttcctcaggaatgggt

SEQ ID NO: 4243 - RNA, 20 nt, synthetic construct
  source 1..20: mol_type = other RNA
cgttctcctacccattcctg

SEQ ID NO: 4244 - RNA, 20 nt, synthetic construct
  source 1..20: mol_type = other RNA
ttgccttaagtctctgtgtg

SEQ ID NO: 4245 - RNA, 20 nt, synthetic construct
  source 1..20: mol_type = other RNA
tgtcctcacacagagactta

SEQ ID NO: 4246 - RNA, 20 nt, synthetic construct
  source 1..20: mol_type = other RNA
tactcaacactgggtcttgc

SEQ ID NO: 4247 - RNA, 20 nt, synthetic construct
  source 1..20: mol_type = other RNA
cccagtgttgagtagtgccc

SEQ ID NO: 4248 - RNA, 20 nt, synthetic construct
  source 1..20: mol_type = other RNA
cctgggcactactcaacact

SEQ ID NO: 4249 - RNA, 20 nt, synthetic construct
  source 1..20: mol_type = other RNA
gcctgggcactactcaacac

SEQ ID NO: 4250 - RNA, 20 nt, synthetic construct
  source 1..20: mol_type = other RNA
ctgcatgaggcgctgcgcct

SEQ ID NO: 4251 - RNA, 20 nt, synthetic construct
  source 1..20: mol_type = other RNA
gctgcatgaggcgctgcgcc

SEQ ID NO: 4252 - RNA, 20 nt, synthetic construct
  source 1..20: mol_type = other RNA
gatagcaaatgagctgcatg

SEQ ID NO: 4253 - RNA, 20 nt, synthetic construct
  source 1..20: mol_type = other RNA
ttgctatccacatcgactgc

SEQ ID NO: 4254 - RNA, 20 nt, synthetic construct
  source 1..20: mol_type = other RNA
acatcgactgctggacaatg

SEQ ID NO: 4255 - RNA, 20 nt, synthetic construct
  source 1..20: mol_type = other RNA
tcattgtccagcagtcgatg

SEQ ID NO: 4256 - RNA, 20 nt, synthetic construct
  source 1..20: mol_type = other RNA
cgactgctggacaatgagga

SEQ ID NO: 4257 - RNA, 20 nt, synthetic construct
  source 1..20: mol_type = other RNA
gactgctggacaatgaggat

SEQ ID NO: 4258 - RNA, 20 nt, synthetic construct
  source 1..20: mol_type = other RNA
actgctggacaatgaggatg

SEQ ID NO: 4259 - RNA, 20 nt, synthetic construct
  source 1..20: mol_type = other RNA
aggatggggaaaacccccag

SEQ ID NO: 4260 - RNA, 20 nt, synthetic construct
  source 1..20: mol_type = other RNA
gctttatgcgctgccgctgg

SEQ ID NO: 4261 - RNA, 20 nt, synthetic construct
  source 1..20: mol_type = other RNA
cgctttatgcgctgccgctg

SEQ ID NO: 4262 - RNA, 20 nt, synthetic construct
  source 1..20: mol_type = other RNA
gcgctttatgcgctgccgct

SEQ ID NO: 4263 - RNA, 20 nt, synthetic construct
  source 1..20: mol_type = other RNA
tgcgctttatgcgctgccgc

SEQ ID NO: 4264 - RNA, 20 nt, synthetic construct
  source 1..20: mol_type = other RNA
gcgcataaagcgcattctcc

SEQ ID NO: 4265 - RNA, 20 nt, synthetic construct
  source 1..20: mol_type = other RNA
ataaagcgcattctccaggt

SEQ ID NO: 4266 - RNA, 20 nt, synthetic construct
  source 1..20: mol_type = other RNA
cgcattctccaggtaggcca

SEQ ID NO: 4267 - RNA, 20 nt, synthetic construct
  source 1..20: mol_type = other RNA
ctccaggtaggccaaggccg

SEQ ID NO: 4268 - RNA, 20 nt, synthetic construct
  source 1..20: mol_type = other RNA
tccaggtaggccaaggccgt

SEQ ID NO: 4269 - RNA, 20 nt, synthetic construct
  source 1..20: mol_type = other RNA
ccaggtaggccaaggccgtg

SEQ ID NO: 4270 - RNA, 20 nt, synthetic construct
  source 1..20: mol_type = other RNA
caggtaggccaaggccgtgg

SEQ ID NO: 4271 - RNA, 20 nt, synthetic construct
  source 1..20: mol_type = other RNA
ccccacggccttggcctacc

SEQ ID NO: 4272 - RNA, 20 nt, synthetic construct
  source 1..20: mol_type = other RNA
ggccaaggccgtgggggctg

SEQ ID NO: 4273 - RNA, 20 nt, synthetic construct
  source 1..20: mol_type = other RNA
gtgatagaggccccacaccc

SEQ ID NO: 4274 - RNA, 20 nt, synthetic construct
  source 1..20: mol_type = other RNA
ggggcctctatcacagaact

SEQ ID NO: 4275 - RNA, 20 nt, synthetic construct
  source 1..20: mol_type = other RNA
tatcacagaacttggaccag

SEQ ID NO: 4276 - RNA, 20 nt, synthetic construct
  source 1..20: mol_type = other RNA
tggtccaagttctgtgatag

SEQ ID NO: 4277 - RNA, 20 nt, synthetic construct
  source 1..20: mol_type = other RNA
aagactggcgcatggtccac

SEQ ID NO: 4278 - RNA, 20 nt, synthetic construct
  source 1..20: mol_type = other RNA
gaccatgcgccagtcttcct

SEQ ID NO: 4279 - RNA, 20 nt, synthetic construct
  source 1..20: mol_type = other RNA
ctccaaggaagactggcgca

SEQ ID NO: 4280 - RNA, 20 nt, synthetic construct
  source 1..20: mol_type = other RNA
gctgcagctccaaggaagac

SEQ ID NO: 4281 - RNA, 20 nt, synthetic construct
  source 1..20: mol_type = other RNA
gatcatgagctgcagctcca

SEQ ID NO: 4282 - RNA, 20 nt, synthetic construct
  source 1..20: mol_type = other RNA
ctaacaatgtgagtagtgcc

SEQ ID NO: 4283 - RNA, 20 nt, synthetic construct
  source 1..20: mol_type = other RNA
ggcactactcacattgttag

SEQ ID NO: 4284 - RNA, 20 nt, synthetic construct
  source 1..20: mol_type = other RNA
aggcactactcacattgtta

SEQ ID NO: 4285 - RNA, 20 nt, synthetic construct
  source 1..20: mol_type = other RNA
caggcactactcacattgtt

SEQ ID NO: 4286 - RNA, 20 nt, synthetic construct
  source 1..20: mol_type = other RNA
ctgtgcctttcatcctcccc

SEQ ID NO: 4287 - RNA, 20 nt, synthetic construct
  source 1..20: mol_type = other RNA
catctcctggggaggatgaa

SEQ ID NO: 4288 - RNA, 20 nt, synthetic construct
  source 1..20: mol_type = other RNA
ccaggagatgaactccctct

SEQ ID NO: 4289 - RNA, 20 nt, synthetic construct
  source 1..20: mol_type = other RNA
aagagggagttcatctcctg

SEQ ID NO: 4290 - RNA, 20 nt, synthetic construct
  source 1..20: mol_type = other RNA
caagagggagttcatctcct

SEQ ID NO: 4291 - RNA, 20 nt, synthetic construct
  source 1..20: mol_type = other RNA
ccaagagggagttcatctcc

SEQ ID NO: 4292 - RNA, 20 nt, synthetic construct
  source 1..20: mol_type = other RNA
cctcttggagaacatcgcca

SEQ ID NO: 4293 - RNA, 20 nt, synthetic construct
  source 1..20: mol_type = other RNA
cttggcgatgttctccaaga

SEQ ID NO: 4294 - RNA, 20 nt, synthetic construct
  source 1..20: mol_type = other RNA
ccttggcgatgttctccaag

SEQ ID NO: 4295 - RNA, 20 nt, synthetic construct
  source 1..20: mol_type = other RNA
catcgccaaggccacaatcg

SEQ ID NO: 4296 - RNA, 20 nt, synthetic construct
  source 1..20: mol_type = other RNA
gaaaacctcgattgtggcct

SEQ ID NO: 4297 - RNA, 20 nt, synthetic construct
  source 1..20: mol_type = other RNA
ctgttggaaaacctcgattg

SEQ ID NO: 4298 - RNA, 20 nt, synthetic construct
  source 1..20: mol_type = other RNA
ttccaacagtcagcagagac

SEQ ID NO: 4299 - RNA, 20 nt, synthetic construct
  source 1..20: mol_type = other RNA
tccaacagtcagcagagaca

SEQ ID NO: 4300 - RNA, 20 nt, synthetic construct
  source 1..20: mol_type = other RNA
accctgtctctgctgactgt

SEQ ID NO: 4301 - RNA, 20 nt, synthetic construct
  source 1..20: mol_type = other RNA
gcagagacagggtcatcttc

SEQ ID NO: 4302 - RNA, 20 nt, synthetic construct
  source 1..20: mol_type = other RNA
ggcttggtcttgctgctgct

SEQ ID NO: 4303 - RNA, 20 nt, synthetic construct
  source 1..20: mol_type = other RNA
aggcttggtcttgctgctgc

SEQ ID NO: 4304 - RNA, 20 nt, synthetic construct
  source 1..20: mol_type = other RNA
gcaagaccaagcctgtgctc

SEQ ID NO: 4305 - RNA, 20 nt, synthetic construct
  source 1..20: mol_type = other RNA
gaccaagcctgtgctcaggt

SEQ ID NO: 4306 - RNA, 20 nt, synthetic construct
  source 1..20: mol_type = other RNA
atccgacctgagcacaggct

SEQ ID NO: 4307 - RNA, 20 nt, synthetic construct
  source 1..20: mol_type = other RNA
tttctatccgacctgagcac

SEQ ID NO: 4308 - RNA, 20 nt, synthetic construct
  source 1..20: mol_type = other RNA
aggtcggatagaaacatgtt

SEQ ID NO: 4309 - RNA, 20 nt, synthetic construct
  source 1..20: mol_type = other RNA
gagaacagacagaggacaca

SEQ ID NO: 4310 - RNA, 20 nt, synthetic construct
  source 1..20: mol_type = other RNA
ggagaacagacagaggacac

SEQ ID NO: 4311 - RNA, 20 nt, synthetic construct
  source 1..20: mol_type = other RNA
gagagctggagaacagacag

SEQ ID NO: 4312 - RNA, 20 nt, synthetic construct
  source 1..20: mol_type = other RNA
tccagctctctagagcgctc

SEQ ID NO: 4313 - RNA, 20 nt, synthetic construct
  source 1..20: mol_type = other RNA
accagagcgctctagagagc

SEQ ID NO: 4314 - RNA, 20 nt, synthetic construct
  source 1..20: mol_type = other RNA
ctctagagcgctctggtgta

SEQ ID NO: 4315 - RNA, 20 nt, synthetic construct
  source 1..20: mol_type = other RNA
agagcgctctggtgtatggc

SEQ ID NO: 4316 - RNA, 20 nt, synthetic construct
  source 1..20: mol_type = other RNA
gcgctctggtgtatggctgg

SEQ ID NO: 4317 - RNA, 20 nt, synthetic construct
  source 1..20: mol_type = other RNA
gggcagtttagcaatgaggg

SEQ ID NO: 4318 - RNA, 20 nt, synthetic construct
  source 1..20: mol_type = other RNA
tgggcagtttagcaatgagg

SEQ ID NO: 4319 - RNA, 20 nt, synthetic construct
  source 1..20: mol_type = other RNA
gtgggcagtttagcaatgag

SEQ ID NO: 4320 - RNA, 20 nt, synthetic construct
  source 1..20: mol_type = other RNA
ggtgggcagtttagcaatga

SEQ ID NO: 4321 - RNA, 20 nt, synthetic construct
  source 1..20: mol_type = other RNA
aggtgggcagtttagcaatg

SEQ ID NO: 4322 - RNA, 20 nt, synthetic construct
  source 1..20: mol_type = other RNA
taaactgcccacctcagtcc

SEQ ID NO: 4323 - RNA, 20 nt, synthetic construct
  source 1..20: mol_type = other RNA
aaactgcccacctcagtcca

SEQ ID NO: 4324 - RNA, 20 nt, synthetic construct
  source 1..20: mol_type = other RNA
acatgtccctggactgaggt

SEQ ID NO: 4325 - RNA, 20 nt, synthetic construct
  source 1..20: mol_type = other RNA
cacatgtccctggactgagg

SEQ ID NO: 4326 - RNA, 20 nt, synthetic construct
  source 1..20: mol_type = other RNA
agtccagggacatgtgttaa

SEQ ID NO: 4327 - RNA, 20 nt, synthetic construct
  source 1..20: mol_type = other RNA
taacacatgtccctggactg

SEQ ID NO: 4328 - RNA, 20 nt, synthetic construct
  source 1..20: mol_type = other RNA
ggacatgtgttaaaggctgc

SEQ ID NO: 4329 - RNA, 20 nt, synthetic construct
  source 1..20: mol_type = other RNA
gacatgtgttaaaggctgct

SEQ ID NO: 4330 - RNA, 20 nt, synthetic construct
  source 1..20: mol_type = other RNA
acatgtgttaaaggctgctg

SEQ ID NO: 4331 - RNA, 20 nt, synthetic construct
  source 1..20: mol_type = other RNA
aaaggctgctggggaagaat

SEQ ID NO: 4332 - RNA, 20 nt, synthetic construct
  source 1..20: mol_type = other RNA
tgctggggaagaattggaga

SEQ ID NO: 4333 - RNA, 20 nt, synthetic construct
  source 1..20: mol_type = other RNA
gctggggaagaattggagaa

SEQ ID NO: 4334 - RNA, 20 nt, synthetic construct
  source 1..20: mol_type = other RNA
attggagaagggtcagcacc

SEQ ID NO: 4335 - RNA, 20 nt, synthetic construct
  source 1..20: mol_type = other RNA
ttggagaagggtcagcacct

SEQ ID NO: 4336 - RNA, 20 nt, synthetic construct
  source 1..20: mol_type = other RNA
ctttgcgtgaagaggaaccc

SEQ ID NO: 4337 - RNA, 20 nt, synthetic construct
  source 1..20: mol_type = other RNA
atcacgttctttgcgtgaag

SEQ ID NO: 4338 - RNA, 20 nt, synthetic construct
  source 1..20: mol_type = other RNA
gtgatcgacaaaagcagaag

SEQ ID NO: 4339 - RNA, 20 nt, synthetic construct
  source 1..20: mol_type = other RNA
gacaaaagcagaagaggtaa

SEQ ID NO: 4340 - RNA, 20 nt, synthetic construct
  source 1..20: mol_type = other RNA
acaaaagcagaagaggtaaa

SEQ ID NO: 4341 - RNA, 20 nt, synthetic construct
  source 1..20: mol_type = other RNA
caaaagcagaagaggtaaag

SEQ ID NO: 4342 - RNA, 20 nt, synthetic construct
  source 1..20: mol_type = other RNA
cagaagaggtaaaggggctt

SEQ ID NO: 4343 - RNA, 20 nt, synthetic construct
  source 1..20: mol_type = other RNA
agaagaggtaaaggggctta

SEQ ID NO: 4344 - RNA, 20 nt, synthetic construct
  source 1..20: mol_type = other RNA
aggtaaaggggcttagggag

SEQ ID NO: 4345 - RNA, 20 nt, synthetic construct
  source 1..20: mol_type = other RNA
gaagggctgctggctcaata

SEQ ID NO: 4346 - RNA, 20 nt, synthetic construct
  source 1..20: mol_type = other RNA
agaagggctgctggctcaat

SEQ ID NO: 4347 - RNA, 20 nt, synthetic construct
  source 1..20: mol_type = other RNA
ccagcagcccttcttatcgc

SEQ ID NO: 4348 - RNA, 20 nt, synthetic construct
  source 1..20: mol_type = other RNA
ccagcgataagaagggctgc

SEQ ID NO: 4349 - RNA, 20 nt, synthetic construct
  source 1..20: mol_type = other RNA
gttagcaccagcgataagaa

SEQ ID NO: 4350 - RNA, 20 nt, synthetic construct
  source 1..20: mol_type = other RNA
tgttagcaccagcgataaga

SEQ ID NO: 4351 - RNA, 20 nt, synthetic construct
  source 1..20: mol_type = other RNA
ctggtgctaacatgtctgaa

SEQ ID NO: 4352 - RNA, 20 nt, synthetic construct
  source 1..20: mol_type = other RNA
tggtgctaacatgtctgaaa

SEQ ID NO: 4353 - RNA, 20 nt, synthetic construct
  source 1..20: mol_type = other RNA
gctaacatgtctgaaagggc

SEQ ID NO: 4354 - RNA, 20 nt, synthetic construct
  source 1..20: mol_type = other RNA
agggcaggatgaacaacgcg

SEQ ID NO: 4355 - RNA, 20 nt, synthetic construct
  source 1..20: mol_type = other RNA
gggcaggatgaacaacgcga

SEQ ID NO: 4356 - RNA, 20 nt, synthetic construct
  source 1..20: mol_type = other RNA
ccttacctccctctacagcc

SEQ ID NO: 4357 - RNA, 20 nt, synthetic construct
  source 1..20: mol_type = other RNA
cctggctgtagagggaggta

SEQ ID NO: 4358 - RNA, 20 nt, synthetic construct
  source 1..20: mol_type = other RNA
cctctacagccaggtgcacc

SEQ ID NO: 4359 - RNA, 20 nt, synthetic construct
  source 1..20: mol_type = other RNA
gtgcacctggctgtagaggg

SEQ ID NO: 4360 - RNA, 20 nt, synthetic construct
  source 1..20: mol_type = other RNA
ctggtgcacctggctgtaga

SEQ ID NO: 4361 - RNA, 20 nt, synthetic construct
  source 1..20: mol_type = other RNA
cctggtgcacctggctgtag

SEQ ID NO: 4362 - RNA, 20 nt, synthetic construct
  source 1..20: mol_type = other RNA
gtgcaccaggtacagatctc

SEQ ID NO: 4363 - RNA, 20 nt, synthetic construct
  source 1..20: mol_type = other RNA
tgcaccaggtacagatctct

SEQ ID NO: 4364 - RNA, 20 nt, synthetic construct
  source 1..20: mol_type = other RNA
aggtacagatctctgggcca

SEQ ID NO: 4365 - RNA, 20 nt, synthetic construct
  source 1..20: mol_type = other RNA
tacagatctctgggccatgg

SEQ ID NO: 4366 - RNA, 20 nt, synthetic construct
  source 1..20: mol_type = other RNA
agatctctgggccatggagg

SEQ ID NO: 4367 - RNA, 20 nt, synthetic construct
  source 1..20: mol_type = other RNA
tattctagattgtgaataat

SEQ ID NO: 4368 - RNA, 20 nt, synthetic construct
  source 1..20: mol_type = other RNA
gtttgcaatcatctaagtac

SEQ ID NO: 4369 - RNA, 20 nt, synthetic construct
  source 1..20: mol_type = other RNA
accaaagcagcttatgcatg

SEQ ID NO: 4370 - RNA, 20 nt, synthetic construct
  source 1..20: mol_type = other RNA
gcctcatgcataagctgctt

SEQ ID NO: 4371 - RNA, 20 nt, synthetic construct
  source 1..20: mol_type = other RNA
tgcatgaggcactcaaactg

SEQ ID NO: 4372 - RNA, 20 nt, synthetic construct
  source 1..20: mol_type = other RNA
actcaaactgcggctcaacc

SEQ ID NO: 4373 - RNA, 20 nt, synthetic construct
  source 1..20: mol_type = other RNA
tgcggctcaacctggtgaga

SEQ ID NO: 4374 - RNA, 20 nt, synthetic construct
  source 1..20: mol_type = other RNA
aacctggtgagaaggccagc

SEQ ID NO: 4375 - RNA, 20 nt, synthetic construct
  source 1..20: mol_type = other RNA
acctggtgagaaggccagct

SEQ ID NO: 4376 - RNA, 20 nt, synthetic construct
  source 1..20: mol_type = other RNA
cctggtgagaaggccagctg

SEQ ID NO: 4377 - RNA, 20 nt, synthetic construct
  source 1..20: mol_type = other RNA
ccccagctggccttctcacc

SEQ ID NO: 4378 - RNA, 20 nt, synthetic construct
  source 1..20: mol_type = other RNA
tgacttgttgtggccctggc

SEQ ID NO: 4379 - RNA, 20 nt, synthetic construct
  source 1..20: mol_type = other RNA
cttgttgtggccctggcagg

SEQ ID NO: 4380 - RNA, 20 nt, synthetic construct
  source 1..20: mol_type = other RNA
ttgttgtggccctggcaggt

SEQ ID NO: 4381 - RNA, 20 nt, synthetic construct
  source 1..20: mol_type = other RNA
tgttgtggccctggcaggtg

SEQ ID NO: 4382 - RNA, 20 nt, synthetic construct
  source 1..20: mol_type = other RNA
gttgtggccctggcaggtgg

SEQ ID NO: 4383 - RNA, 20 nt, synthetic construct
  source 1..20: mol_type = other RNA
ttgtggccctggcaggtggg

SEQ ID NO: 4384 - RNA, 20 nt, synthetic construct
  source 1..20: mol_type = other RNA
aacatgccccccacctgcca

SEQ ID NO: 4385 - RNA, 20 nt, synthetic construct
  source 1..20: mol_type = other RNA
aaacatgccccccacctgcc

SEQ ID NO: 4386 - RNA, 20 nt, synthetic construct
  source 1..20: mol_type = other RNA
ggtggggggcatgtttgaca

SEQ ID NO: 4387 - RNA, 20 nt, synthetic construct
  source 1..20: mol_type = other RNA
gcgcagcacccagcagacca

SEQ ID NO: 4388 - RNA, 20 nt, synthetic construct
  source 1..20: mol_type = other RNA
gcacccagcagaccacggag

SEQ ID NO: 4389 - RNA, 20 nt, synthetic construct
  source 1..20: mol_type = other RNA
cacccagcagaccacggagt

SEQ ID NO: 4390 - RNA, 20 nt, synthetic construct
  source 1..20: mol_type = other RNA
ggcccactccgtggtctgct

SEQ ID NO: 4391 - RNA, 20 nt, synthetic construct
  source 1..20: mol_type = other RNA
tggcccactccgtggtctgc

SEQ ID NO: 4392 - RNA, 20 nt, synthetic construct
  source 1..20: mol_type = other RNA
ggagtgggccatgctcctcc

SEQ ID NO: 4393 - RNA, 20 nt, synthetic construct
  source 1..20: mol_type = other RNA
gaggagcatggcccactccg

SEQ ID NO: 4394 - RNA, 20 nt, synthetic construct
  source 1..20: mol_type = other RNA
gatgatctccaggaggagca

SEQ ID NO: 4395 - RNA, 20 nt, synthetic construct
  source 1..20: mol_type = other RNA
ctcctggagatcatcatcag

SEQ ID NO: 4396 - RNA, 20 nt, synthetic construct
  source 1..20: mol_type = other RNA
cgctgatgatgatctccagg

SEQ ID NO: 4397 - RNA, 20 nt, synthetic construct
  source 1..20: mol_type = other RNA
tgccgctgatgatgatctcc

SEQ ID NO: 4398 - RNA, 20 nt, synthetic construct
  source 1..20: mol_type = other RNA
ggtggggatgctttacttgt

SEQ ID NO: 4399 - RNA, 20 nt, synthetic construct
  source 1..20: mol_type = other RNA
agtgaagagctcactgagac

SEQ ID NO: 4400 - RNA, 20 nt, synthetic construct
  source 1..20: mol_type = other RNA
tgagctcttcactactgtgt

SEQ ID NO: 4401 - RNA, 20 nt, synthetic construct
  source 1..20: mol_type = other RNA
atgctgagcgtgctcatcaa

SEQ ID NO: 4402 - RNA, 20 nt, synthetic construct
  source 1..20: mol_type = other RNA
tgctgagcgtgctcatcaat

SEQ ID NO: 4403 - RNA, 20 nt, synthetic construct
  source 1..20: mol_type = other RNA
cgtgctcatcaatgggacat

SEQ ID NO: 4404 - RNA, 20 nt, synthetic construct
  source 1..20: mol_type = other RNA
gacatgtctagcatctcgca

SEQ ID NO: 4405 - RNA, 20 nt, synthetic construct
  source 1..20: mol_type = other RNA
tagcatctcgcaaggtagca

SEQ ID NO: 4406 - RNA, 20 nt, synthetic construct
  source 1..20: mol_type = other RNA
catctcgcaaggtagcatgg

SEQ ID NO: 4407 - RNA, 20 nt, synthetic construct
  source 1..20: mol_type = other RNA
caagcgtgcatacatgaacc

SEQ ID NO: 4408 - RNA, 20 nt, synthetic construct
  source 1..20: mol_type = other RNA
gaacctggcgaagaagttgc

SEQ ID NO: 4409 - RNA, 20 nt, synthetic construct
  source 1..20: mol_type = other RNA
ttacctgcaacttcttcgcc

SEQ ID NO: 4410 - RNA, 20 nt, synthetic construct
  source 1..20: mol_type = other RNA
aagaagttgcaggtaagcag

SEQ ID NO: 4411 - RNA, 20 nt, synthetic construct
  source 1..20: mol_type = other RNA
ttgcaggtaagcagaggaag

SEQ ID NO: 4412 - RNA, 20 nt, synthetic construct
  source 1..20: mol_type = other RNA
tgcaggtaagcagaggaagc

SEQ ID NO: 4413 - RNA, 20 nt, synthetic construct
  source 1..20: mol_type = other RNA
gcaggtaagcagaggaagcg

SEQ ID NO: 4414 - RNA, 20 nt, synthetic construct
  source 1..20: mol_type = other RNA
caggtaagcagaggaagcgg

SEQ ID NO: 4415 - RNA, 20 nt, synthetic construct
  source 1..20: mol_type = other RNA
aagcagaggaagcgggggca

SEQ ID NO: 4416 - RNA, 20 nt, synthetic construct
  source 1..20: mol_type = other RNA
catcttcctgtgcctgcaga

SEQ ID NO: 4417 - RNA, 20 nt, synthetic construct
  source 1..20: mol_type = other RNA
ttctgcaggcacaggaagat

SEQ ID NO: 4418 - RNA, 20 nt, synthetic construct
  source 1..20: mol_type = other RNA
cttctgcaggcacaggaaga

SEQ ID NO: 4419 - RNA, 20 nt, synthetic construct
  source 1..20: mol_type = other RNA
cctgtgcctgcagaaggagt

SEQ ID NO: 4420 - RNA, 20 nt, synthetic construct
  source 1..20: mol_type = other RNA
ctgtgcctgcagaaggagtt

SEQ ID NO: 4421 - RNA, 20 nt, synthetic construct
  source 1..20: mol_type = other RNA
tgtgcctgcagaaggagttg

SEQ ID NO: 4422 - RNA, 20 nt, synthetic construct
  source 1..20: mol_type = other RNA
gtgcctgcagaaggagttgg

SEQ ID NO: 4423 - RNA, 20 nt, synthetic construct
  source 1..20: mol_type = other RNA
ccaactccttctgcaggcac

SEQ ID NO: 4424 - RNA, 20 nt, synthetic construct
  source 1..20: mol_type = other RNA
gctcccccaactccttctgc

SEQ ID NO: 4425 - RNA, 20 nt, synthetic construct
  source 1..20: mol_type = other RNA
ggagcgccagtcagacagtc

SEQ ID NO: 4426 - RNA, 20 nt, synthetic construct
  source 1..20: mol_type = other RNA
ccagtcagacagtctggaaa

SEQ ID NO: 4427 - RNA, 20 nt, synthetic construct
  source 1..20: mol_type = other RNA
ccttttccagactgtctgac

SEQ ID NO: 4428 - RNA, 20 nt, synthetic construct
  source 1..20: mol_type = other RNA
gcttgggcagtggcagcagc

SEQ ID NO: 4429 - RNA, 20 nt, synthetic construct
  source 1..20: mol_type = other RNA
tctcgggtctgcttgggcag

SEQ ID NO: 4430 - RNA, 20 nt, synthetic construct
  source 1..20: mol_type = other RNA
atgacatctcgggtctgctt

SEQ ID NO: 4431 - RNA, 20 nt, synthetic construct
  source 1..20: mol_type = other RNA
gatgacatctcgggtctgct

SEQ ID NO: 4432 - RNA, 20 nt, synthetic construct
  source 1..20: mol_type = other RNA
ctcacacgtgatgacatctc

SEQ ID NO: 4433 - RNA, 20 nt, synthetic construct
  source 1..20: mol_type = other RNA
gctcacacgtgatgacatct

SEQ ID NO: 4434 - RNA, 20 nt, synthetic construct
  source 1..20: mol_type = other RNA
tgtcatcacgtgtgagccac

SEQ ID NO: 4435 - RNA, 20 nt, synthetic construct
  source 1..20: mol_type = other RNA
gtcatcacgtgtgagccaca

SEQ ID NO: 4436 - RNA, 20 nt, synthetic construct
  source 1..20: mol_type = other RNA
gggctcccttatcgatacca

SEQ ID NO: 4437 - RNA, 20 nt, synthetic construct
  source 1..20: mol_type = other RNA
ggctcccttatcgataccaa

SEQ ID NO: 4438 - RNA, 20 nt, synthetic construct
  source 1..20: mol_type = other RNA
gttgcccttggtatcgataa

SEQ ID NO: 4439 - RNA, 20 nt, synthetic construct
  source 1..20: mol_type = other RNA
tgttgcccttggtatcgata

SEQ ID NO: 4440 - RNA, 20 nt, synthetic construct
  source 1..20: mol_type = other RNA
accaagggcaacaagattgc

SEQ ID NO: 4441 - RNA, 20 nt, synthetic construct
  source 1..20: mol_type = other RNA
gccagcaatcttgttgccct

SEQ ID NO: 4442 - RNA, 20 nt, synthetic construct
  source 1..20: mol_type = other RNA
cttcgattccatcttcaaga

SEQ ID NO: 4443 - RNA, 20 nt, synthetic construct
  source 1..20: mol_type = other RNA
cgattccatcttcaagaagg

SEQ ID NO: 4444 - RNA, 20 nt, synthetic construct
  source 1..20: mol_type = other RNA
acatgcctccttcttgaaga

SEQ ID NO: 4445 - RNA, 20 nt, synthetic construct
  source 1..20: mol_type = other RNA
tgtttttcattttctggagc

SEQ ID NO: 4446 - RNA, 20 nt, synthetic construct
  source 1..20: mol_type = other RNA
gtttttcattttctggagca

SEQ ID NO: 4447 - RNA, 20 nt, synthetic construct
  source 1..20: mol_type = other RNA
ttttctggagcagggtctac

SEQ ID NO: 4448 - RNA, 20 nt, synthetic construct
  source 1..20: mol_type = other RNA
ccaaacagaagatctcgccc

SEQ ID NO: 4449 - RNA, 20 nt, synthetic construct
  source 1..20: mol_type = other RNA
caaacagaagatctcgccct

SEQ ID NO: 4450 - RNA, 20 nt, synthetic construct
  source 1..20: mol_type = other RNA
gggcgagatcttctgtttgg

SEQ ID NO: 4451 - RNA, 20 nt, synthetic construct
  source 1..20: mol_type = other RNA
ccagggcgagatcttctgtt

SEQ ID NO: 4452 - RNA, 20 nt, synthetic construct
  source 1..20: mol_type = other RNA
ctcgccctgggatctttttg

SEQ ID NO: 4453 - RNA, 20 nt, synthetic construct
  source 1..20: mol_type = other RNA
tcgccctgggatctttttga

SEQ ID NO: 4454 - RNA, 20 nt, synthetic construct
  source 1..20: mol_type = other RNA
cgccctgggatctttttgag

SEQ ID NO: 4455 - RNA, 20 nt, synthetic construct
  source 1..20: mol_type = other RNA
aacccctcaaaaagatccca

SEQ ID NO: 4456 - RNA, 20 nt, synthetic construct
  source 1..20: mol_type = other RNA
caacccctcaaaaagatccc

SEQ ID NO: 4457 - RNA, 20 nt, synthetic construct
  source 1..20: mol_type = other RNA
agccgtcagcaccactctct

SEQ ID NO: 4458 - RNA, 20 nt, synthetic construct
  source 1..20: mol_type = other RNA
gccgtcagcaccactctctt

SEQ ID NO: 4459 - RNA, 20 nt, synthetic construct
  source 1..20: mol_type = other RNA
ccgtcagcaccactctcttg

SEQ ID NO: 4460 - RNA, 20 nt, synthetic construct
  source 1..20: mol_type = other RNA
cagcaccactctcttggggc

SEQ ID NO: 4461 - RNA, 20 nt, synthetic construct
  source 1..20: mol_type = other RNA
ccccaagagagtggtgctga

SEQ ID NO: 4462 - RNA, 20 nt, synthetic construct
  source 1..20: mol_type = other RNA
ccactctcttggggctggtt

SEQ ID NO: 4463 - RNA, 20 nt, synthetic construct
  source 1..20: mol_type = other RNA
ccaaaccagccccaagagag

SEQ ID NO: 4464 - RNA, 20 nt, synthetic construct
  source 1..20: mol_type = other RNA
ctggtttggaacagtccgag

SEQ ID NO: 4465 - RNA, 20 nt, synthetic construct
  source 1..20: mol_type = other RNA
ttggaacagtccgagtggac

SEQ ID NO: 4466 - RNA, 20 nt, synthetic construct
  source 1..20: mol_type = other RNA
agtccgagtggaccggcgag

SEQ ID NO: 4467 - RNA, 20 nt, synthetic construct
  source 1..20: mol_type = other RNA
gtggaccggcgagtggctcg

SEQ ID NO: 4468 - RNA, 20 nt, synthetic construct
  source 1..20: mol_type = other RNA
gagccactcgccggtccact

SEQ ID NO: 4469 - RNA, 20 nt, synthetic construct
  source 1..20: mol_type = other RNA
ccggcgagtggctcgaggag

SEQ ID NO: 4470 - RNA, 20 nt, synthetic construct
  source 1..20: mol_type = other RNA
cctctcctcgagccactcgc

SEQ ID NO: 4471 - RNA, 20 nt, synthetic construct
  source 1..20: mol_type = other RNA
ctcgaggagaggagcagcag

SEQ ID NO: 4472 - RNA, 20 nt, synthetic construct
  source 1..20: mol_type = other RNA
tgctctaccacacacacctg

SEQ ID NO: 4473 - RNA, 20 nt, synthetic construct
  source 1..20: mol_type = other RNA
accacacacacctgaggccc

SEQ ID NO: 4474 - RNA, 20 nt, synthetic construct
  source 1..20: mol_type = other RNA
gccggggcctcaggtgtgtg

SEQ ID NO: 4475 - RNA, 20 nt, synthetic construct
  source 1..20: mol_type = other RNA
aggcgcggggccggggcctc

SEQ ID NO: 4476 - RNA, 20 nt, synthetic construct
  source 1..20: mol_type = other RNA
ccggccccgcgcctattacc

SEQ ID NO: 4477 - RNA, 20 nt, synthetic construct
  source 1..20: mol_type = other RNA
aggtaataggcgcggggccg

SEQ ID NO: 4478 - RNA, 20 nt, synthetic construct
  source 1..20: mol_type = other RNA
caggtaataggcgcggggcc

SEQ ID NO: 4479 - RNA, 20 nt, synthetic construct
  source 1..20: mol_type = other RNA
ccaggtaataggcgcggggc

SEQ ID NO: 4480 - RNA, 20 nt, synthetic construct
  source 1..20: mol_type = other RNA
ggctccaggtaataggcgcg

SEQ ID NO: 4481 - RNA, 20 nt, synthetic construct
  source 1..20: mol_type = other RNA
tggctccaggtaataggcgc

SEQ ID NO: 4482 - RNA, 20 nt, synthetic construct
  source 1..20: mol_type = other RNA
gtggctccaggtaataggcg

SEQ ID NO: 4483 - RNA, 20 nt, synthetic construct
  source 1..20: mol_type = other RNA
tggcagtggctccaggtaat

SEQ ID NO: 4484 - RNA, 20 nt, synthetic construct
  source 1..20: mol_type = other RNA
ggggcagtggcagtggctcc

SEQ ID NO: 4485 - RNA, 20 nt, synthetic construct
  source 1..20: mol_type = other RNA
gccactgcccccagaagatg

SEQ ID NO: 4486 - RNA, 20 nt, synthetic construct
  source 1..20: mol_type = other RNA
tcctcatcttctgggggcag

SEQ ID NO: 4487 - RNA, 20 nt, synthetic construct
  source 1..20: mol_type = other RNA
ggcggctcctcatcttctgg

SEQ ID NO: 4488 - RNA, 20 nt, synthetic construct
  source 1..20: mol_type = other RNA
aggcggctcctcatcttctg

SEQ ID NO: 4489 - RNA, 20 nt, synthetic construct
  source 1..20: mol_type = other RNA
caggcggctcctcatcttct

SEQ ID NO: 4490 - RNA, 20 nt, synthetic construct
  source 1..20: mol_type = other RNA
gcaggcggctcctcatcttc

SEQ ID NO: 4491 - RNA, 20 nt, synthetic construct
  source 1..20: mol_type = other RNA
tctagcagggtaggagcagg

SEQ ID NO: 4492 - RNA, 20 nt, synthetic construct
  source 1..20: mol_type = other RNA
ggctctagcagggtaggagc

SEQ ID NO: 4493 - RNA, 20 nt, synthetic construct
  source 1..20: mol_type = other RNA
cctgctagagcctgagaaaa

SEQ ID NO: 4494 - RNA, 20 nt, synthetic construct
  source 1..20: mol_type = other RNA
ctttttctcaggctctagca

SEQ ID NO: 4495 - RNA, 20 nt, synthetic construct
  source 1..20: mol_type = other RNA
cctttttctcaggctctagc

SEQ ID NO: 4496 - RNA, 20 nt, synthetic construct
  source 1..20: mol_type = other RNA
ggctctggagcctttttctc

SEQ ID NO: 4497 - RNA, 20 nt, synthetic construct
  source 1..20: mol_type = other RNA
gccccccaaaactgacaaac

SEQ ID NO: 4498 - RNA, 20 nt, synthetic construct
  source 1..20: mol_type = other RNA
ccccccaaaactgacaaacc

SEQ ID NO: 4499 - RNA, 20 nt, synthetic construct
  source 1..20: mol_type = other RNA
cccccaaaactgacaaaccg

SEQ ID NO: 4500 - RNA, 20 nt, synthetic construct
  source 1..20: mol_type = other RNA
ccccaaaactgacaaaccgg

SEQ ID NO: 4501 - RNA, 20 nt, synthetic construct
  source 1..20: mol_type = other RNA
cccggtttgtcagttttggg

SEQ ID NO: 4502 - RNA, 20 nt, synthetic construct
  source 1..20: mol_type = other RNA
ccccggtttgtcagttttgg

SEQ ID NO: 4503 - RNA, 20 nt, synthetic construct
  source 1..20: mol_type = other RNA
cccccggtttgtcagttttg

SEQ ID NO: 4504 - RNA, 20 nt, synthetic construct
  source 1..20: mol_type = other RNA
gcccccggtttgtcagtttt

SEQ ID NO: 4505 - RNA, 20 nt, synthetic construct
  source 1..20: mol_type = other RNA
agcccccggtttgtcagttt

SEQ ID NO: 4506 - RNA, 20 nt, synthetic construct
  source 1..20: mol_type = other RNA
ggctgctccacccagtactg

SEQ ID NO: 4507 - RNA, 20 nt, synthetic construct
  source 1..20: mol_type = other RNA
ttgcgttcctcagtactggg

SEQ ID NO: 4508 - RNA, 20 nt, synthetic construct
  source 1..20: mol_type = other RNA
ttcttgcgttcctcagtact

SEQ ID NO: 4509 - RNA, 20 nt, synthetic construct
  source 1..20: mol_type = other RNA
cttcttgcgttcctcagtac

SEQ ID NO: 4510 - RNA, 20 nt, synthetic construct
  source 1..20: mol_type = other RNA
acgcaagaagaagtccacca

SEQ ID NO: 4511 - RNA, 20 nt, synthetic construct
  source 1..20: mol_type = other RNA
cgcaagaagaagtccaccaa

SEQ ID NO: 4512 - RNA, 20 nt, synthetic construct
  source 1..20: mol_type = other RNA
gctgcgtttcttgcccttgg

SEQ ID NO: 4513 - RNA, 20 nt, synthetic construct
  source 1..20: mol_type = other RNA
ctggctgcgtttcttgccct

SEQ ID NO: 4514 - RNA, 20 nt, synthetic construct
  source 1..20: mol_type = other RNA
ccagccagctaccaagacag

SEQ ID NO: 4515 - RNA, 20 nt, synthetic construct
  source 1..20: mol_type = other RNA
cctctgtcttggtagctggc

SEQ ID NO: 4516 - RNA, 20 nt, synthetic construct
  source 1..20: mol_type = other RNA
ctcacctctgtcttggtagc

SEQ ID NO: 4517 - RNA, 20 nt, synthetic construct
  source 1..20: mol_type = other RNA
ggaggcgctcacctctgtct

SEQ ID NO: 4518 - RNA, 20 nt, synthetic construct
  source 1..20: mol_type = other RNA
tcttcctctgccactcacac

SEQ ID NO: 4519 - RNA, 20 nt, synthetic construct
  source 1..20: mol_type = other RNA
gtgtgagtggcagaggaaga

SEQ ID NO: 4520 - RNA, 20 nt, synthetic construct
  source 1..20: mol_type = other RNA
tgtgtgagtggcagaggaag

SEQ ID NO: 4521 - RNA, 20 nt, synthetic construct
  source 1..20: mol_type = other RNA
ctgccactcacacaggacta

SEQ ID NO: 4522 - RNA, 20 nt, synthetic construct
  source 1..20: mol_type = other RNA
tagtcctgtgtgagtggcag

SEQ ID NO: 4523 - RNA, 20 nt, synthetic construct
  source 1..20: mol_type = other RNA
actcacacaggactatggaa

SEQ ID NO: 4524 - RNA, 20 nt, synthetic construct
  source 1..20: mol_type = other RNA
ctcacacaggactatggaat

SEQ ID NO: 4525 - RNA, 20 nt, synthetic construct
  source 1..20: mol_type = other RNA
attccatagtcctgtgtgag

SEQ ID NO: 4526 - RNA, 20 nt, synthetic construct
  source 1..20: mol_type = other RNA
acaggactatggaatgggcc

SEQ ID NO: 4527 - RNA, 20 nt, synthetic construct
  source 1..20: mol_type = other RNA
caggactatggaatgggccc

SEQ ID NO: 4528 - RNA, 20 nt, synthetic construct
  source 1..20: mol_type = other RNA
actatggaatgggcccgggt

SEQ ID NO: 4529 - RNA, 20 nt, synthetic construct
  source 1..20: mol_type = other RNA
ggaatgggcccgggtcggag

SEQ ID NO: 4530 - RNA, 20 nt, synthetic construct
  source 1..20: mol_type = other RNA
ccgggtcggagcggccctta

SEQ ID NO: 4531 - RNA, 20 nt, synthetic construct
  source 1..20: mol_type = other RNA
cataagggccgctccgaccc

SEQ ID NO: 4532 - RNA, 20 nt, synthetic construct
  source 1..20: mol_type = other RNA
ccataagggccgctccgacc

SEQ ID NO: 4533 - RNA, 20 nt, synthetic construct
  source 1..20: mol_type = other RNA
ttatggtgtgacagtgcctc

SEQ ID NO: 4534 - RNA, 20 nt, synthetic construct
  source 1..20: mol_type = other RNA
gaggcactgtcacaccataa

SEQ ID NO: 4535 - RNA, 20 nt, synthetic construct
  source 1..20: mol_type = other RNA
ggaggcactgtcacaccata

SEQ ID NO: 4536 - RNA, 20 nt, synthetic construct
  source 1..20: mol_type = other RNA
gggtggtgcaggaggtccgg

SEQ ID NO: 4537 - RNA, 20 nt, synthetic construct
  source 1..20: mol_type = other RNA
tttgggtggtgcaggaggtc

SEQ ID NO: 4538 - RNA, 20 nt, synthetic construct
  source 1..20: mol_type = other RNA
ctcctgcaccacccaaaccc

SEQ ID NO: 4539 - RNA, 20 nt, synthetic construct
  source 1..20: mol_type = other RNA
cagggtttgggtggtgcagg

SEQ ID NO: 4540 - RNA, 20 nt, synthetic construct
  source 1..20: mol_type = other RNA
aaccagggtttgggtggtgc

SEQ ID NO: 4541 - RNA, 20 nt, synthetic construct
  source 1..20: mol_type = other RNA
ttatagaaccagggtttggg

SEQ ID NO: 4542 - RNA, 20 nt, synthetic construct
  source 1..20: mol_type = other RNA
gtgttatagaaccagggttt

SEQ ID NO: 4543 - RNA, 20 nt, synthetic construct
  source 1..20: mol_type = other RNA
tgtgttatagaaccagggtt

SEQ ID NO: 4544 - RNA, 20 nt, synthetic construct
  source 1..20: mol_type = other RNA
taaggtgtgttatagaacca

SEQ ID NO: 4545 - RNA, 20 nt, synthetic construct
  source 1..20: mol_type = other RNA
ttaaggtgtgttatagaacc

SEQ ID NO: 4546 - RNA, 20 nt, synthetic construct
  source 1..20: mol_type = other RNA
ctataacacaccttaactac

SEQ ID NO: 4547 - RNA, 20 nt, synthetic construct
  source 1..20: mol_type = other RNA
acacaccttaactacaggca

SEQ ID NO: 4548 - RNA, 20 nt, synthetic construct
  source 1..20: mol_type = other RNA
aactacaggcaaggctccat

SEQ ID NO: 4549 - RNA, 20 nt, synthetic construct
  source 1..20: mol_type = other RNA
tggagccttgcctgtagtta

SEQ ID NO: 4550 - RNA, 20 nt, synthetic construct
  source 1..20: mol_type = other RNA
gttctgggtgtacaggccta

SEQ ID NO: 4551 - RNA, 20 nt, synthetic construct
  source 1..20: mol_type = other RNA
gtggctggttctgggtgtac

SEQ ID NO: 4552 - RNA, 20 nt, synthetic construct
  source 1..20: mol_type = other RNA
cagaaccagccactacctgc

SEQ ID NO: 4553 - RNA, 20 nt, synthetic construct
  source 1..20: mol_type = other RNA
tgcaggtagtggctggttct

SEQ ID NO: 4554 - RNA, 20 nt, synthetic construct
  source 1..20: mol_type = other RNA
ctgcaggtagtggctggttc

SEQ ID NO: 4555 - RNA, 20 nt, synthetic construct
  source 1..20: mol_type = other RNA
actcacctgcaggtagtggc

SEQ ID NO: 4556 - RNA, 20 nt, synthetic construct
  source 1..20: mol_type = other RNA
tggcactcacctgcaggtag

SEQ ID NO: 4557 - RNA, 20 nt, synthetic construct
  source 1..20: mol_type = other RNA
gcaggtgagtgccagccact

SEQ ID NO: 4558 - RNA, 20 nt, synthetic construct
  source 1..20: mol_type = other RNA
agtggctggcactcacctgc

SEQ ID NO: 4559 - RNA, 20 nt, synthetic construct
  source 1..20: mol_type = other RNA
gtgccagccactaggaatgc

SEQ ID NO: 4560 - RNA, 20 nt, synthetic construct
  source 1..20: mol_type = other RNA
gtcagcccactctccttttc

SEQ ID NO: 4561 - RNA, 20 nt, synthetic construct
  source 1..20: mol_type = other RNA
agcccactctccttttcagg

SEQ ID NO: 4562 - RNA, 20 nt, synthetic construct
  source 1..20: mol_type = other RNA
ggccacctgaaaaggagagt

SEQ ID NO: 4563 - RNA, 20 nt, synthetic construct
  source 1..20: mol_type = other RNA
gggccacctgaaaaggagag

SEQ ID NO: 4564 - RNA, 20 nt, synthetic construct
  source 1..20: mol_type = other RNA
cttttcaggtggccctcgtg

SEQ ID NO: 4565 - RNA, 20 nt, synthetic construct
  source 1..20: mol_type = other RNA
cacacgagggccacctgaaa

SEQ ID NO: 4566 - RNA, 20 nt, synthetic construct
  source 1..20: mol_type = other RNA
gacggtatgggtccacacga

SEQ ID NO: 4567 - RNA, 20 nt, synthetic construct
  source 1..20: mol_type = other RNA
ggacggtatgggtccacacg

SEQ ID NO: 4568 - RNA, 20 nt, synthetic construct
  source 1..20: mol_type = other RNA
gtaagcgcacaggacggtat

SEQ ID NO: 4569 - RNA, 20 nt, synthetic construct
  source 1..20: mol_type = other RNA
ggtaagcgcacaggacggta

SEQ ID NO: 4570 - RNA, 20 nt, synthetic construct
  source 1..20: mol_type = other RNA
gcattggtaagcgcacagga

SEQ ID NO: 4571 - RNA, 20 nt, synthetic construct
  source 1..20: mol_type = other RNA
ttctgcattggtaagcgcac

SEQ ID NO: 4572 - RNA, 20 nt, synthetic construct
  source 1..20: mol_type = other RNA
cgggtgggcagcttctgcat

SEQ ID NO: 4573 - RNA, 20 nt, synthetic construct
  source 1..20: mol_type = other RNA
cccacccgaccaacttaccc

SEQ ID NO: 4574 - RNA, 20 nt, synthetic construct
  source 1..20: mol_type = other RNA
ccagggtaagttggtcgggt

SEQ ID NO: 4575 - RNA, 20 nt, synthetic construct
  source 1..20: mol_type = other RNA
tccagggtaagttggtcggg

SEQ ID NO: 4576 - RNA, 20 nt, synthetic construct
  source 1..20: mol_type = other RNA
cactccagggtaagttggtc

SEQ ID NO: 4577 - RNA, 20 nt, synthetic construct
  source 1..20: mol_type = other RNA
gcactccagggtaagttggt

SEQ ID NO: 4578 - RNA, 20 nt, synthetic construct
  source 1..20: mol_type = other RNA
ggcagcactccagggtaagt

SEQ ID NO: 4579 - RNA, 20 nt, synthetic construct
  source 1..20: mol_type = other RNA
tggttgtgggcagcactcca

SEQ ID NO: 4580 - RNA, 20 nt, synthetic construct
  source 1..20: mol_type = other RNA
atggttgtgggcagcactcc

SEQ ID NO: 4581 - RNA, 20 nt, synthetic construct
  source 1..20: mol_type = other RNA
gtgctgcccacaaccatgac

SEQ ID NO: 4582 - RNA, 20 nt, synthetic construct
  source 1..20: mol_type = other RNA
cacaaccatgactggcgtca

SEQ ID NO: 4583 - RNA, 20 nt, synthetic construct
  source 1..20: mol_type = other RNA
acaaccatgactggcgtcat

SEQ ID NO: 4584 - RNA, 20 nt, synthetic construct
  source 1..20: mol_type = other RNA
atgacgccagtcatggttgt

SEQ ID NO: 4585 - RNA, 20 nt, synthetic construct
  source 1..20: mol_type = other RNA
catgacgccagtcatggttg

SEQ ID NO: 4586 - RNA, 20 nt, synthetic construct
  source 1..20: mol_type = other RNA
taaacccatgacgccagtca

SEQ ID NO: 4587 - RNA, 20 nt, synthetic construct
  source 1..20: mol_type = other RNA
acagaggtcttataagagga

SEQ ID NO: 4588 - RNA, 20 nt, synthetic construct
  source 1..20: mol_type = other RNA
cacagaggtcttataagagg

SEQ ID NO: 4589 - RNA, 20 nt, synthetic construct
  source 1..20: mol_type = other RNA
cttataagacctctgtgtac

SEQ ID NO: 4590 - RNA, 20 nt, synthetic construct
  source 1..20: mol_type = other RNA
gtacacagaggtcttataag

SEQ ID NO: 4591 - RNA, 20 nt, synthetic construct
  source 1..20: mol_type = other RNA
ttgctgctgccggtacacag

SEQ ID NO: 4592 - RNA, 20 nt, synthetic construct
  source 1..20: mol_type = other RNA
gtaccggcagcagcaacctg

SEQ ID NO: 4593 - RNA, 20 nt, synthetic construct
  source 1..20: mol_type = other RNA
gcaccgcaggttgctgctgc

SEQ ID NO: 4594 - RNA, 20 nt, synthetic construct
  source 1..20: mol_type = other RNA
cagcaacctgcggtgcccca

SEQ ID NO: 4595 - RNA, 20 nt, synthetic construct
  source 1..20: mol_type = other RNA
cgctgtccttggggcaccgc

SEQ ID NO: 4596 - RNA, 20 nt, synthetic construct
  source 1..20: mol_type = other RNA
tggcgaaggcgctgtccttg

SEQ ID NO: 4597 - RNA, 20 nt, synthetic construct
  source 1..20: mol_type = other RNA
ttggcgaaggcgctgtcctt

SEQ ID NO: 4598 - RNA, 20 nt, synthetic construct
  source 1..20: mol_type = other RNA
gttggcgaaggcgctgtcct

SEQ ID NO: 4599 - RNA, 20 nt, synthetic construct
  source 1..20: mol_type = other RNA
gcgccttcgccaacagctcc

SEQ ID NO: 4600 - RNA, 20 nt, synthetic construct
  source 1..20: mol_type = other RNA
ttgcctggagctgttggcga

SEQ ID NO: 4601 - RNA, 20 nt, synthetic construct
  source 1..20: mol_type = other RNA
ctatctttgcctggagctgt

SEQ ID NO: 4602 - RNA, 20 nt, synthetic construct
  source 1..20: mol_type = other RNA
ctccaggcaaagatagtgag

SEQ ID NO: 4603 - RNA, 20 nt, synthetic construct
  source 1..20: mol_type = other RNA
tccaggcaaagatagtgaga

SEQ ID NO: 4604 - RNA, 20 nt, synthetic construct
  source 1..20: mol_type = other RNA
ccaggcaaagatagtgagag

SEQ ID NO: 4605 - RNA, 20 nt, synthetic construct
  source 1..20: mol_type = other RNA
cccctctcactatctttgcc

SEQ ID NO: 4606 - RNA, 20 nt, synthetic construct
  source 1..20: mol_type = other RNA
aagatagtgagaggggcagt

SEQ ID NO: 4607 - RNA, 20 nt, synthetic construct
  source 1..20: mol_type = other RNA
agatagtgagaggggcagta

SEQ ID NO: 4608 - RNA, 20 nt, synthetic construct
  source 1..20: mol_type = other RNA
tagtgagaggggcagtaggg

SEQ ID NO: 4609 - RNA, 20 nt, synthetic construct
  source 1..20: mol_type = other RNA
agtgagaggggcagtaggga

SEQ ID NO: 4610 - RNA, 20 nt, synthetic construct
  source 1..20: mol_type = other RNA
tttctccctttagcagagtc

SEQ ID NO: 4611 - RNA, 20 nt, synthetic construct
  source 1..20: mol_type = other RNA
ttctccctttagcagagtca

SEQ ID NO: 4612 - RNA, 20 nt, synthetic construct
  source 1..20: mol_type = other RNA
ttagcagagtcagggcatgt

SEQ ID NO: 4613 - RNA, 20 nt, synthetic construct
  source 1..20: mol_type = other RNA
tagcagagtcagggcatgtt

SEQ ID NO: 4614 - RNA, 20 nt, synthetic construct
  source 1..20: mol_type = other RNA
acatgccctgactctgctaa

SEQ ID NO: 4615 - RNA, 20 nt, synthetic construct
  source 1..20: mol_type = other RNA
aagagctgggagtcatctga

SEQ ID NO: 4616 - RNA, 20 nt, synthetic construct
  source 1..20: mol_type = other RNA
atgactcccagctcttccta

SEQ ID NO: 4617 - RNA, 20 nt, synthetic construct
  source 1..20: mol_type = other RNA
tgcaaaccgtaggaagagct

SEQ ID NO: 4618 - RNA, 20 nt, synthetic construct
  source 1..20: mol_type = other RNA
ctgcaaaccgtaggaagagc

SEQ ID NO: 4619 - RNA, 20 nt, synthetic construct
  source 1..20: mol_type = other RNA
ctacggtttgcagacttccc

SEQ ID NO: 4620 - RNA, 20 nt, synthetic construct
  source 1..20: mol_type = other RNA
ctgggaagtctgcaaaccgt

SEQ ID NO: 4621 - RNA, 20 nt, synthetic construct
  source 1..20: mol_type = other RNA
agacttcccaggtaagagcc

SEQ ID NO: 4622 - RNA, 20 nt, synthetic construct
  source 1..20: mol_type = other RNA
gacttcccaggtaagagcct

SEQ ID NO: 4623 - RNA, 20 nt, synthetic construct
  source 1..20: mol_type = other RNA
acaatcccaggctcttacct

SEQ ID NO: 4624 - RNA, 20 nt, synthetic construct
  source 1..20: mol_type = other RNA
cacaatcccaggctcttacc

SEQ ID NO: 4625 - RNA, 20 nt, synthetic construct
  source 1..20: mol_type = other RNA
gagcctgggattgtgagact

SEQ ID NO: 4626 - RNA, 20 nt, synthetic construct
  source 1..20: mol_type = other RNA
agcctgggattgtgagacta

SEQ ID NO: 4627 - RNA, 20 nt, synthetic construct
  source 1..20: mol_type = other RNA
gcctgggattgtgagactag

SEQ ID NO: 4628 - RNA, 20 nt, synthetic construct
  source 1..20: mol_type = other RNA
cctgggattgtgagactagg

SEQ ID NO: 4629 - RNA, 20 nt, synthetic construct
  source 1..20: mol_type = other RNA
ccccctagtctcacaatccc

SEQ ID NO: 4630 - RNA, 20 nt, synthetic construct
  source 1..20: mol_type = other RNA
attgtgagactagggggatg

SEQ ID NO: 4631 - RNA, 20 nt, synthetic construct
  source 1..20: mol_type = other RNA
caagctgctctgcatactct

SEQ ID NO: 4632 - RNA, 20 nt, synthetic construct
  source 1..20: mol_type = other RNA
aagaaggagagagggaatca

SEQ ID NO: 4633 - RNA, 20 nt, synthetic construct
  source 1..20: mol_type = other RNA
gaagaaggagagagggaatc

SEQ ID NO: 4634 - RNA, 20 nt, synthetic construct
  source 1..20: mol_type = other RNA
cctctctccttcttccctcc

SEQ ID NO: 4635 - RNA, 20 nt, synthetic construct
  source 1..20: mol_type = other RNA
ctctctccttcttccctcca

SEQ ID NO: 4636 - RNA, 20 nt, synthetic construct
  source 1..20: mol_type = other RNA
ctggagggaagaaggagaga

SEQ ID NO: 4637 - RNA, 20 nt, synthetic construct
  source 1..20: mol_type = other RNA
cctggagggaagaaggagag

SEQ ID NO: 4638 - RNA, 20 nt, synthetic construct
  source 1..20: mol_type = other RNA
gtatagccctggagggaaga

SEQ ID NO: 4639 - RNA, 20 nt, synthetic construct
  source 1..20: mol_type = other RNA
ataaggagtatagccctgga

SEQ ID NO: 4640 - RNA, 20 nt, synthetic construct
  source 1..20: mol_type = other RNA
cataaggagtatagccctgg

SEQ ID NO: 4641 - RNA, 20 nt, synthetic construct
  source 1..20: mol_type = other RNA
aaacataaggagtatagccc

SEQ ID NO: 4642 - RNA, 20 nt, synthetic construct
  source 1..20: mol_type = other RNA
tactccttatgtttctcatg

SEQ ID NO: 4643 - RNA, 20 nt, synthetic construct
  source 1..20: mol_type = other RNA
actccttatgtttctcatgt

SEQ ID NO: 4644 - RNA, 20 nt, synthetic construct
  source 1..20: mol_type = other RNA
aatcccacatgagaaacata

SEQ ID NO: 4645 - RNA, 20 nt, synthetic construct
  source 1..20: mol_type = other RNA
gtgggattgcagcaacacac

SEQ ID NO: 4646 - RNA, 20 nt, synthetic construct
  source 1..20: mol_type = other RNA
cagcaacacacaggccctgc

SEQ ID NO: 4647 - RNA, 20 nt, synthetic construct
  source 1..20: mol_type = other RNA
cacaggccctgcaggtacca

SEQ ID NO: 4648 - RNA, 20 nt, synthetic construct
  source 1..20: mol_type = other RNA
ggggcaccatggtacctgca

SEQ ID NO: 4649 - RNA, 20 nt, synthetic construct
  source 1..20: mol_type = other RNA
gggggcaccatggtacctgc

SEQ ID NO: 4650 - RNA, 20 nt, synthetic construct
  source 1..20: mol_type = other RNA
ggagtagctggggggcacca

SEQ ID NO: 4651 - RNA, 20 nt, synthetic construct
  source 1..20: mol_type = other RNA
ggctggctggagtagctggg

SEQ ID NO: 4652 - RNA, 20 nt, synthetic construct
  source 1..20: mol_type = other RNA
aggctggctggagtagctgg

SEQ ID NO: 4653 - RNA, 20 nt, synthetic construct
  source 1..20: mol_type = other RNA
aaggctggctggagtagctg

SEQ ID NO: 4654 - RNA, 20 nt, synthetic construct
  source 1..20: mol_type = other RNA
taaggctggctggagtagct

SEQ ID NO: 4655 - RNA, 20 nt, synthetic construct
  source 1..20: mol_type = other RNA
gtaaggctggctggagtagc

SEQ ID NO: 4656 - RNA, 20 nt, synthetic construct
  source 1..20: mol_type = other RNA
ggtgctctggtaaggctggc

SEQ ID NO: 4657 - RNA, 20 nt, synthetic construct
  source 1..20: mol_type = other RNA
ggtgggtgctctggtaaggc

SEQ ID NO: 4658 - RNA, 20 nt, synthetic construct
  source 1..20: mol_type = other RNA
gaagggtgggtgctctggta

SEQ ID NO: 4659 - RNA, 20 nt, synthetic construct
  source 1..20: mol_type = other RNA
tggtagaagggtgggtgctc

SEQ ID NO: 4660 - RNA, 20 nt, synthetic construct
  source 1..20: mol_type = other RNA
agtaggattggtagaagggt

SEQ ID NO: 4661 - RNA, 20 nt, synthetic construct
  source 1..20: mol_type = other RNA
gagtaggattggtagaaggg

SEQ ID NO: 4662 - RNA, 20 nt, synthetic construct
  source 1..20: mol_type = other RNA
caagagtaggattggtagaa

SEQ ID NO: 4663 - RNA, 20 nt, synthetic construct
  source 1..20: mol_type = other RNA
acaagagtaggattggtaga

SEQ ID NO: 4664 - RNA, 20 nt, synthetic construct
  source 1..20: mol_type = other RNA
aggatctacaagagtaggat

SEQ ID NO: 4665 - RNA, 20 nt, synthetic construct
  source 1..20: mol_type = other RNA
cgggtaggatctacaagagt

SEQ ID NO: 4666 - RNA, 20 nt, synthetic construct
  source 1..20: mol_type = other RNA
ctacccgccacctgcaacag

SEQ ID NO: 4667 - RNA, 20 nt, synthetic construct
  source 1..20: mol_type = other RNA
cgctgttgcaggtggcgggt

SEQ ID NO: 4668 - RNA, 20 nt, synthetic construct
  source 1..20: mol_type = other RNA
cacctgcaacagcggcccag

SEQ ID NO: 4669 - RNA, 20 nt, synthetic construct
  source 1..20: mol_type = other RNA
tgggccgctgttgcaggtgg

SEQ ID NO: 4670 - RNA, 20 nt, synthetic construct
  source 1..20: mol_type = other RNA
cactgggccgctgttgcagg

SEQ ID NO: 4671 - RNA, 20 nt, synthetic construct
  source 1..20: mol_type = other RNA
agccactgggccgctgttgc

SEQ ID NO: 4672 - RNA, 20 nt, synthetic construct
  source 1..20: mol_type = other RNA
cagtggctatgtgcaccagc

SEQ ID NO: 4673 - RNA, 20 nt, synthetic construct
  source 1..20: mol_type = other RNA
tgctggtgcacatagccact

SEQ ID NO: 4674 - RNA, 20 nt, synthetic construct
  source 1..20: mol_type = other RNA
ctgctggtgcacatagccac

SEQ ID NO: 4675 - RNA, 20 nt, synthetic construct
  source 1..20: mol_type = other RNA
caccagcaggcccccaccta

SEQ ID NO: 4676 - RNA, 20 nt, synthetic construct
  source 1..20: mol_type = other RNA
caggcccccacctatggaca

SEQ ID NO: 4677 - RNA, 20 nt, synthetic construct
  source 1..20: mol_type = other RNA
gtccataggtgggggcctgc

SEQ ID NO: 4678 - RNA, 20 nt, synthetic construct
  source 1..20: mol_type = other RNA
cagtccatgtccataggtgg

SEQ ID NO: 4679 - RNA, 20 nt, synthetic construct
  source 1..20: mol_type = other RNA
tcagtccatgtccataggtg

SEQ ID NO: 4680 - RNA, 20 nt, synthetic construct
  source 1..20: mol_type = other RNA
gtcagtccatgtccataggt

SEQ ID NO: 4681 - RNA, 20 nt, synthetic construct
  source 1..20: mol_type = other RNA
ggtcagtccatgtccatagg

SEQ ID NO: 4682 - RNA, 20 nt, synthetic construct
  source 1..20: mol_type = other RNA
ggaggtcagtccatgtccat

SEQ ID NO: 4683 - RNA, 20 nt, synthetic construct
  source 1..20: mol_type = other RNA
atggactgacctccactcaa

SEQ ID NO: 4684 - RNA, 20 nt, synthetic construct
  source 1..20: mol_type = other RNA
ctttgggtacctttgagtgg

SEQ ID NO: 4685 - RNA, 20 nt, synthetic construct
  source 1..20: mol_type = other RNA
ctcaaaggtacccaaagtag

SEQ ID NO: 4686 - RNA, 20 nt, synthetic construct
  source 1..20: mol_type = other RNA
ctactttgggtacctttgag

SEQ ID NO: 4687 - RNA, 20 nt, synthetic construct
  source 1..20: mol_type = other RNA
acccaaagtagtggtgagct

SEQ ID NO: 4688 - RNA, 20 nt, synthetic construct
  source 1..20: mol_type = other RNA
tctgaccctcttatctttgg

SEQ ID NO: 4689 - RNA, 20 nt, synthetic construct
  source 1..20: mol_type = other RNA
tccaaagataagagggtcag

SEQ ID NO: 4690 - RNA, 20 nt, synthetic construct
  source 1..20: mol_type = other RNA
gaaaacctccaaagataaga

SEQ ID NO: 4691 - RNA, 20 nt, synthetic construct
  source 1..20: mol_type = other RNA
tgaaaacctccaaagataag

SEQ ID NO: 4692 - RNA, 20 nt, synthetic construct
  source 1..20: mol_type = other RNA
tgggtgtctgctgcagtgtc

SEQ ID NO: 4693 - RNA, 20 nt, synthetic construct
  source 1..20: mol_type = other RNA
ggagtcatggtacttatcat

SEQ ID NO: 4694 - RNA, 20 nt, synthetic construct
  source 1..20: mol_type = other RNA
tggagtcatggtacttatca

SEQ ID NO: 4695 - RNA, 20 nt, synthetic construct
  source 1..20: mol_type = other RNA
catgactccaatgagtgccc

SEQ ID NO: 4696 - RNA, 20 nt, synthetic construct
  source 1..20: mol_type = other RNA
atgactccaatgagtgccca

SEQ ID NO: 4697 - RNA, 20 nt, synthetic construct
  source 1..20: mol_type = other RNA
ctgggcactcattggagtca

SEQ ID NO: 4698 - RNA, 20 nt, synthetic construct
  source 1..20: mol_type = other RNA
aatgagtgcccagggcgtcc

SEQ ID NO: 4699 - RNA, 20 nt, synthetic construct
  source 1..20: mol_type = other RNA
tggacgccctgggcactcat

SEQ ID NO: 4700 - RNA, 20 nt, synthetic construct
  source 1..20: mol_type = other RNA
agtgcccagggcgtccaggc

SEQ ID NO: 4701 - RNA, 20 nt, synthetic construct
  source 1..20: mol_type = other RNA
gacgcctgcctggacgccct

SEQ ID NO: 4702 - RNA, 20 nt, synthetic construct
  source 1..20: mol_type = other RNA
ggacgcctgcctggacgccc

SEQ ID NO: 4703 - RNA, 20 nt, synthetic construct
  source 1..20: mol_type = other RNA
ctgttgaacggacgcctgcc

SEQ ID NO: 4704 - RNA, 20 nt, synthetic construct
  source 1..20: mol_type = other RNA
caggtaggatggctgttgaa

SEQ ID NO: 4705 - RNA, 20 nt, synthetic construct
  source 1..20: mol_type = other RNA
ctgctgctgctcaggtagga

SEQ ID NO: 4706 - RNA, 20 nt, synthetic construct
  source 1..20: mol_type = other RNA
gctgctgctgctgctcaggt

SEQ ID NO: 4707 - RNA, 20 nt, synthetic construct
  source 1..20: mol_type = other RNA
tgctgctgctgctgctgctc

SEQ ID NO: 4708 - RNA, 20 nt, synthetic construct
  source 1..20: mol_type = other RNA
agcagcagcagtaccacatc

SEQ ID NO: 4709 - RNA, 20 nt, synthetic construct
  source 1..20: mol_type = other RNA
gctgctgctgctgccggatg

SEQ ID NO: 4710 - RNA, 20 nt, synthetic construct
  source 1..20: mol_type = other RNA
tctgctgctgctgctgctgc

SEQ ID NO: 4711 - RNA, 20 nt, synthetic construct
  source 1..20: mol_type = other RNA
agcagcagcagcagatcctg

SEQ ID NO: 4712 - RNA, 20 nt, synthetic construct
  source 1..20: mol_type = other RNA
gcagcagcagcagatcctgc

SEQ ID NO: 4713 - RNA, 20 nt, synthetic construct
  source 1..20: mol_type = other RNA
agcagcagatcctgcgggta

SEQ ID NO: 4714 - RNA, 20 nt, synthetic construct
  source 1..20: mol_type = other RNA
agatcctgcgggtaaggcac

SEQ ID NO: 4715 - RNA, 20 nt, synthetic construct
  source 1..20: mol_type = other RNA
gatcctgcgggtaaggcact

SEQ ID NO: 4716 - RNA, 20 nt, synthetic construct
  source 1..20: mol_type = other RNA
aatcccagtgccttacccgc

SEQ ID NO: 4717 - RNA, 20 nt, synthetic construct
  source 1..20: mol_type = other RNA
taaggcactgggatttcatc

SEQ ID NO: 4718 - RNA, 20 nt, synthetic construct
  source 1..20: mol_type = other RNA
aaggcactgggatttcatct

SEQ ID NO: 4719 - RNA, 20 nt, synthetic construct
  source 1..20: mol_type = other RNA
ctgggatttcatctgggacc

SEQ ID NO: 4720 - RNA, 20 nt, synthetic construct
  source 1..20: mol_type = other RNA
tgggatttcatctgggacct

SEQ ID NO: 4721 - RNA, 20 nt, synthetic construct
  source 1..20: mol_type = other RNA
catctgggacctgggagccc

SEQ ID NO: 4722 - RNA, 20 nt, synthetic construct
  source 1..20: mol_type = other RNA
atctgggacctgggagccca

SEQ ID NO: 4723 - RNA, 20 nt, synthetic construct
  source 1..20: mol_type = other RNA
tgggacctgggagcccaggg

SEQ ID NO: 4724 - RNA, 20 nt, synthetic construct
  source 1..20: mol_type = other RNA
gggagcccagggaggaagag

SEQ ID NO: 4725 - RNA, 20 nt, synthetic construct
  source 1..20: mol_type = other RNA
ctcttcctccctgggctccc

SEQ ID NO: 4726 - RNA, 20 nt, synthetic construct
  source 1..20: mol_type = other RNA
ttgtgcctctcttcctccct

SEQ ID NO: 4727 - RNA, 20 nt, synthetic construct
  source 1..20: mol_type = other RNA
cttgtgcctctcttcctccc

SEQ ID NO: 4728 - RNA, 20 nt, synthetic construct
  source 1..20: mol_type = other RNA
acagttaccgagactaaaca

SEQ ID NO: 4729 - RNA, 20 nt, synthetic construct
  source 1..20: mol_type = other RNA
gtttagtctcggtaactgtg

SEQ ID NO: 4730 - RNA, 20 nt, synthetic construct
  source 1..20: mol_type = other RNA
tacactgccttgtttagtct

SEQ ID NO: 4731 - RNA, 20 nt, synthetic construct
  source 1..20: mol_type = other RNA
taccaaaacacctagcagag

SEQ ID NO: 4732 - RNA, 20 nt, synthetic construct
  source 1..20: mol_type = other RNA
aaaacacctagcagagcggc

SEQ ID NO: 4733 - RNA, 20 nt, synthetic construct
  source 1..20: mol_type = other RNA
agccgctctgctaggtgttt

SEQ ID NO: 4734 - RNA, 20 nt, synthetic construct
  source 1..20: mol_type = other RNA
gcagagcggctggcctctag

SEQ ID NO: 4735 - RNA, 20 nt, synthetic construct
  source 1..20: mol_type = other RNA
tagaggccagccgctctgct

SEQ ID NO: 4736 - RNA, 20 nt, synthetic construct
  source 1..20: mol_type = other RNA
cggctggcctctagtggtgc

SEQ ID NO: 4737 - RNA, 20 nt, synthetic construct
  source 1..20: mol_type = other RNA
aacttctccagcaccactag

SEQ ID NO: 4738 - RNA, 20 nt, synthetic construct
  source 1..20: mol_type = other RNA
ccctccccctttttgttttc

SEQ ID NO: 4739 - RNA, 20 nt, synthetic construct
  source 1..20: mol_type = other RNA
cctccccctttttgttttct

SEQ ID NO: 4740 - RNA, 20 nt, synthetic construct
  source 1..20: mol_type = other RNA
ctccccctttttgttttctg

SEQ ID NO: 4741 - RNA, 20 nt, synthetic construct
  source 1..20: mol_type = other RNA
ccagaaaacaaaaaggggga

SEQ ID NO: 4742 - RNA, 20 nt, synthetic construct
  source 1..20: mol_type = other RNA
cccagaaaacaaaaaggggg

SEQ ID NO: 4743 - RNA, 20 nt, synthetic construct
  source 1..20: mol_type = other RNA
atccccagaaaacaaaaagg

SEQ ID NO: 4744 - RNA, 20 nt, synthetic construct
  source 1..20: mol_type = other RNA
gatccccagaaaacaaaaag

SEQ ID NO: 4745 - RNA, 20 nt, synthetic construct
  source 1..20: mol_type = other RNA
tgatccccagaaaacaaaaa

SEQ ID NO: 4746 - RNA, 20 nt, synthetic construct
  source 1..20: mol_type = other RNA
ttgttttctggggatcatag

SEQ ID NO: 4747 - RNA, 20 nt, synthetic construct
  source 1..20: mol_type = other RNA
tgttttctggggatcatagt

SEQ ID NO: 4748 - RNA, 20 nt, synthetic construct
  source 1..20: mol_type = other RNA
ggatcatagtgggagagagt

SEQ ID NO: 4749 - RNA, 20 nt, synthetic construct
  source 1..20: mol_type = other RNA
gagagttggacattgtctgc

SEQ ID NO: 4750 - RNA, 20 nt, synthetic construct
  source 1..20: mol_type = other RNA
agagttggacattgtctgct

SEQ ID NO: 4751 - RNA, 20 nt, synthetic construct
  source 1..20: mol_type = other RNA
tctgctgggtaccctagatt

SEQ ID NO: 4752 - RNA, 20 nt, synthetic construct
  source 1..20: mol_type = other RNA
acagaaagaaaccaaatcta

SEQ ID NO: 4753 - RNA, 20 nt, synthetic construct
  source 1..20: mol_type = other RNA
cacagaaagaaaccaaatct

SEQ ID NO: 4754 - RNA, 20 nt, synthetic construct
  source 1..20: mol_type = other RNA
ttctgtgcagctgtctaaaa

SEQ ID NO: 4755 - RNA, 20 nt, synthetic construct
  source 1..20: mol_type = other RNA
tctgtgcagctgtctaaaaa

SEQ ID NO: 4756 - RNA, 20 nt, synthetic construct
  source 1..20: mol_type = other RNA
tgcagctgtctaaaaaggga

SEQ ID NO: 4757 - RNA, 20 nt, synthetic construct
  source 1..20: mol_type = other RNA
ggaagcagggtgggagctcg

SEQ ID NO: 4758 - RNA, 20 nt, synthetic construct
  source 1..20: mol_type = other RNA
aggaagcagggtgggagctc

SEQ ID NO: 4759 - RNA, 20 nt, synthetic construct
  source 1..20: mol_type = other RNA
gaggaagcagggtgggagct

SEQ ID NO: 4760 - RNA, 20 nt, synthetic construct
  source 1..20: mol_type = other RNA
aggggatgaggaagcagggt

SEQ ID NO: 4761 - RNA, 20 nt, synthetic construct
  source 1..20: mol_type = other RNA
caggggatgaggaagcaggg

SEQ ID NO: 4762 - RNA, 20 nt, synthetic construct
  source 1..20: mol_type = other RNA
gggcaggggatgaggaagca

SEQ ID NO: 4763 - RNA, 20 nt, synthetic construct
  source 1..20: mol_type = other RNA
agggcaggggatgaggaagc

SEQ ID NO: 4764 - RNA, 20 nt, synthetic construct
  source 1..20: mol_type = other RNA
agggctgagggcaggggatg

SEQ ID NO: 4765 - RNA, 20 nt, synthetic construct
  source 1..20: mol_type = other RNA
aactaaagggctgagggcag

SEQ ID NO: 4766 - RNA, 20 nt, synthetic construct
  source 1..20: mol_type = other RNA
ccctcagccctttagttctg

SEQ ID NO: 4767 - RNA, 20 nt, synthetic construct
  source 1..20: mol_type = other RNA
agaactaaagggctgagggc

SEQ ID NO: 4768 - RNA, 20 nt, synthetic construct
  source 1..20: mol_type = other RNA
cctcagaactaaagggctga

SEQ ID NO: 4769 - RNA, 20 nt, synthetic construct
  source 1..20: mol_type = other RNA
gcctcagaactaaagggctg

SEQ ID NO: 4770 - RNA, 20 nt, synthetic construct
  source 1..20: mol_type = other RNA
agctaagcctcagaactaaa

SEQ ID NO: 4771 - RNA, 20 nt, synthetic construct
  source 1..20: mol_type = other RNA
aagctaagcctcagaactaa

SEQ ID NO: 4772 - RNA, 20 nt, synthetic construct
  source 1..20: mol_type = other RNA
acttcagaaggagcagaggg

SEQ ID NO: 4773 - RNA, 20 nt, synthetic construct
  source 1..20: mol_type = other RNA
gatacttcagaaggagcaga

SEQ ID NO: 4774 - RNA, 20 nt, synthetic construct
  source 1..20: mol_type = other RNA
agatacttcagaaggagcag

SEQ ID NO: 4775 - RNA, 20 nt, synthetic construct
  source 1..20: mol_type = other RNA
aacacaaaagatacttcaga

SEQ ID NO: 4776 - RNA, 20 nt, synthetic construct
  source 1..20: mol_type = other RNA
ccagcagcaacagcagcaac

SEQ ID NO: 4777 - RNA, 20 nt, synthetic construct
  source 1..20: mol_type = other RNA
gcagcaacagcagcaacagg

SEQ ID NO: 4778 - RNA, 20 nt, synthetic construct
  source 1..20: mol_type = other RNA
cctgttgctgctgttgctgc

SEQ ID NO: 4779 - RNA, 20 nt, synthetic construct
  source 1..20: mol_type = other RNA
gactggggctggggttgggg

SEQ ID NO: 4780 - RNA, 20 nt, synthetic construct
  source 1..20: mol_type = other RNA
tgggactggggctggggttg

SEQ ID NO: 4781 - RNA, 20 nt, synthetic construct
  source 1..20: mol_type = other RNA
ctgggactggggctggggtt

SEQ ID NO: 4782 - RNA, 20 nt, synthetic construct
  source 1..20: mol_type = other RNA
gctgggactggggctggggt

SEQ ID NO: 4783 - RNA, 20 nt, synthetic construct
  source 1..20: mol_type = other RNA
ccagccccagtcccagcccc

SEQ ID NO: 4784 - RNA, 20 nt, synthetic construct
  source 1..20: mol_type = other RNA
tggggctgggactggggctg

SEQ ID NO: 4785 - RNA, 20 nt, synthetic construct
  source 1..20: mol_type = other RNA
ctggggctgggactggggct

SEQ ID NO: 4786 - RNA, 20 nt, synthetic construct
  source 1..20: mol_type = other RNA
cctggggctgggactggggc

SEQ ID NO: 4787 - RNA, 20 nt, synthetic construct
  source 1..20: mol_type = other RNA
gctacctggggctgggactg

SEQ ID NO: 4788 - RNA, 20 nt, synthetic construct
  source 1..20: mol_type = other RNA
tcccagccccaggtagctgc

SEQ ID NO: 4789 - RNA, 20 nt, synthetic construct
  source 1..20: mol_type = other RNA
cagctacctggggctgggac

SEQ ID NO: 4790 - RNA, 20 nt, synthetic construct
  source 1..20: mol_type = other RNA
tccagcagctacctggggct

SEQ ID NO: 4791 - RNA, 20 nt, synthetic construct
  source 1..20: mol_type = other RNA
gtccagcagctacctggggc

SEQ ID NO: 4792 - RNA, 20 nt, synthetic construct
  source 1..20: mol_type = other RNA
tgtagtccagcagctacctg

SEQ ID NO: 4793 - RNA, 20 nt, synthetic construct
  source 1..20: mol_type = other RNA
ctgtagtccagcagctacct

SEQ ID NO: 4794 - RNA, 20 nt, synthetic construct
  source 1..20: mol_type = other RNA
gctgtagtccagcagctacc

SEQ ID NO: 4795 - RNA, 20 nt, synthetic construct
  source 1..20: mol_type = other RNA
agctgctggactacagcccc

SEQ ID NO: 4796 - RNA, 20 nt, synthetic construct
  source 1..20: mol_type = other RNA
aactgggtggaaataggaag

SEQ ID NO: 4797 - RNA, 20 nt, synthetic construct
  source 1..20: mol_type = other RNA
ttccacccagttccagcgcc

SEQ ID NO: 4798 - RNA, 20 nt, synthetic construct
  source 1..20: mol_type = other RNA
tccacccagttccagcgcca

SEQ ID NO: 4799 - RNA, 20 nt, synthetic construct
  source 1..20: mol_type = other RNA
ccacccagttccagcgccag

SEQ ID NO: 4800 - RNA, 20 nt, synthetic construct
  source 1..20: mol_type = other RNA
cccctggcgctggaactggg

SEQ ID NO: 4801 - RNA, 20 nt, synthetic construct
  source 1..20: mol_type = other RNA
aagcccctggcgctggaact

SEQ ID NO: 4802 - RNA, 20 nt, synthetic construct
  source 1..20: mol_type = other RNA
gaagcccctggcgctggaac

SEQ ID NO: 4803 - RNA, 20 nt, synthetic construct
  source 1..20: mol_type = other RNA
tctgctgaagcccctggcgc

SEQ ID NO: 4804 - RNA, 20 nt, synthetic construct
  source 1..20: mol_type = other RNA
gctgggtctgctgaagcccc

SEQ ID NO: 4805 - RNA, 20 nt, synthetic construct
  source 1..20: mol_type = other RNA
tgctgtctgttgctgctgct

SEQ ID NO: 4806 - RNA, 20 nt, synthetic construct
  source 1..20: mol_type = other RNA
ctgctgtctgttgctgctgc

SEQ ID NO: 4807 - RNA, 20 nt, synthetic construct
  source 1..20: mol_type = other RNA
gcagcaacagacagcagctt

SEQ ID NO: 4808 - RNA, 20 nt, synthetic construct
  source 1..20: mol_type = other RNA
aacagacagcagctttggtc

SEQ ID NO: 4809 - RNA, 20 nt, synthetic construct
  source 1..20: mol_type = other RNA
agagctgttgttgaagttgc

SEQ ID NO: 4810 - RNA, 20 nt, synthetic construct
  source 1..20: mol_type = other RNA
taagcctgcctgccttccca

SEQ ID NO: 4811 - RNA, 20 nt, synthetic construct
  source 1..20: mol_type = other RNA
tgaaaaaccagagattatca

SEQ ID NO: 4812 - RNA, 20 nt, synthetic construct
  source 1..20: mol_type = other RNA
gtgaaaaaccagagattatc

SEQ ID NO: 4813 - RNA, 20 nt, synthetic construct
  source 1..20: mol_type = other RNA
gttggtactgggctgtggct

SEQ ID NO: 4814 - RNA, 20 nt, synthetic construct
  source 1..20: mol_type = other RNA
tgttggtactgggctgtggc

SEQ ID NO: 4815 - RNA, 20 nt, synthetic construct
  source 1..20: mol_type = other RNA
cagcccagtaccaacatatt

SEQ ID NO: 4816 - RNA, 20 nt, synthetic construct
  source 1..20: mol_type = other RNA
aatatgttggtactgggctg

SEQ ID NO: 4817 - RNA, 20 nt, synthetic construct
  source 1..20: mol_type = other RNA
cgtccaaatatgttggtact

SEQ ID NO: 4818 - RNA, 20 nt, synthetic construct
  source 1..20: mol_type = other RNA
gcgtccaaatatgttggtac

SEQ ID NO: 4819 - RNA, 20 nt, synthetic construct
  source 1..20: mol_type = other RNA
tcagtagcgtccaaatatgt

SEQ ID NO: 4820 - RNA, 20 nt, synthetic construct
  source 1..20: mol_type = other RNA
ttggacgctactgagccacc

SEQ ID NO: 4821 - RNA, 20 nt, synthetic construct
  source 1..20: mol_type = other RNA
gacgctactgagccacctgg

SEQ ID NO: 4822 - RNA, 20 nt, synthetic construct
  source 1..20: mol_type = other RNA
tggaggaactgcttgtgcac

SEQ ID NO: 4823 - RNA, 20 nt, synthetic construct
  source 1..20: mol_type = other RNA
agtgcacaagcagttcctcc

SEQ ID NO: 4824 - RNA, 20 nt, synthetic construct
  source 1..20: mol_type = other RNA
aactgcttgtgcactggatg

SEQ ID NO: 4825 - RNA, 20 nt, synthetic construct
  source 1..20: mol_type = other RNA
ggaattaagaggaaagggtg

SEQ ID NO: 4826 - RNA, 20 nt, synthetic construct
  source 1..20: mol_type = other RNA
gggaattaagaggaaagggt

SEQ ID NO: 4827 - RNA, 20 nt, synthetic construct
  source 1..20: mol_type = other RNA
tgggaattaagaggaaaggg

SEQ ID NO: 4828 - RNA, 20 nt, synthetic construct
  source 1..20: mol_type = other RNA
gattgggaattaagaggaaa

SEQ ID NO: 4829 - RNA, 20 nt, synthetic construct
  source 1..20: mol_type = other RNA
ggattgggaattaagaggaa

SEQ ID NO: 4830 - RNA, 20 nt, synthetic construct
  source 1..20: mol_type = other RNA
ttaattcccaatcccattcc

SEQ ID NO: 4831 - RNA, 20 nt, synthetic construct
  source 1..20: mol_type = other RNA
taattcccaatcccattcct

SEQ ID NO: 4832 - RNA, 20 nt, synthetic construct
  source 1..20: mol_type = other RNA
gctagcccaggaatgggatt

SEQ ID NO: 4833 - RNA, 20 nt, synthetic construct
  source 1..20: mol_type = other RNA
tgctagcccaggaatgggat

SEQ ID NO: 4834 - RNA, 20 nt, synthetic construct
  source 1..20: mol_type = other RNA
tcctgggctagcaccagtag

SEQ ID NO: 4835 - RNA, 20 nt, synthetic construct
  source 1..20: mol_type = other RNA
tactggtgctagcccaggaa

SEQ ID NO: 4836 - RNA, 20 nt, synthetic construct
  source 1..20: mol_type = other RNA
gggctagcaccagtagtggt

SEQ ID NO: 4837 - RNA, 20 nt, synthetic construct
  source 1..20: mol_type = other RNA
ggctagcaccagtagtggtt

SEQ ID NO: 4838 - RNA, 20 nt, synthetic construct
  source 1..20: mol_type = other RNA
gctagcaccagtagtggttg

SEQ ID NO: 4839 - RNA, 20 nt, synthetic construct
  source 1..20: mol_type = other RNA
gggagggccccaaccactac

SEQ ID NO: 4840 - RNA, 20 nt, synthetic construct
  source 1..20: mol_type = other RNA
gtggttggggccctcccctc

SEQ ID NO: 4841 - RNA, 20 nt, synthetic construct
  source 1..20: mol_type = other RNA
aaaaatggagcctgagggga

SEQ ID NO: 4842 - RNA, 20 nt, synthetic construct
  source 1..20: mol_type = other RNA
taaaaatggagcctgagggg

SEQ ID NO: 4843 - RNA, 20 nt, synthetic construct
  source 1..20: mol_type = other RNA
tattaaaaatggagcctgag

SEQ ID NO: 4844 - RNA, 20 nt, synthetic construct
  source 1..20: mol_type = other RNA
ttattaaaaatggagcctga

SEQ ID NO: 4845 - RNA, 20 nt, synthetic construct
  source 1..20: mol_type = other RNA
cttattaaaaatggagcctg

SEQ ID NO: 4846 - RNA, 20 nt, synthetic construct
  source 1..20: mol_type = other RNA
tactaaaaacttattaaaaa

SEQ ID NO: 4847 - RNA, 20 nt, synthetic construct
  source 1..20: mol_type = other RNA
ttagtatttttgttaatgtg

SEQ ID NO: 4848 - RNA, 20 nt, synthetic construct
  source 1..20: mol_type = other RNA
aatgtgaggcattgagctgt

SEQ ID NO: 4849 - RNA, 20 nt, synthetic construct
  source 1..20: mol_type = other RNA
atgtgaggcattgagctgtt

SEQ ID NO: 4850 - RNA, 20 nt, synthetic construct
  source 1..20: mol_type = other RNA
tattgggtgcaacagctctg

SEQ ID NO: 4851 - RNA, 20 nt, synthetic construct
  source 1..20: mol_type = other RNA
gtattgggtgcaacagctct

SEQ ID NO: 4852 - RNA, 20 nt, synthetic construct
  source 1..20: mol_type = other RNA
tgtattgggtgcaacagctc

SEQ ID NO: 4853 - RNA, 20 nt, synthetic construct
  source 1..20: mol_type = other RNA
gcaaagaagctctgtgtatt

SEQ ID NO: 4854 - RNA, 20 nt, synthetic construct
  source 1..20: mol_type = other RNA
tgcaaagaagctctgtgtat

SEQ ID NO: 4855 - DNA, 28 bp, synthetic construct
  source 1..28: mol_type = other DNA
ttttattttatttattgttttgagacgg

SEQ ID NO: 4856 - DNA, 28 bp, synthetic construct
  source 1..28: mol_type = other DNA
gaggtaacatttgaactaactctgaagg

SEQ ID NO: 4857 - DNA, 28 bp, synthetic construct
  source 1..28: mol_type = other DNA
atgttacctcagcctcctgagcagctgg

SEQ ID NO: 4858 - DNA, 28 bp, synthetic construct
  source 1..28: mol_type = other DNA
gtaatgccagctgctcaggaggctgagg

SEQ ID NO: 4859 - DNA, 28 bp, synthetic construct
  source 1..28: mol_type = other DNA
cagcctcctgagcagctggcattacagg

SEQ ID NO: 4860 - DNA, 28 bp, synthetic construct
  source 1..28: mol_type = other DNA
gcgcctgtaatgccagctgctcaggagg

SEQ ID NO: 4861 - DNA, 28 bp, synthetic construct
  source 1..28: mol_type = other DNA
caggcgcctgtaatgccagctgctcagg

SEQ ID NO: 4862 - DNA, 28 bp, synthetic construct
  source 1..28: mol_type = other DNA
tacaaaaattagcttgtgtggtggcagg

SEQ ID NO: 4863 - DNA, 28 bp, synthetic construct
  source 1..28: mol_type = other DNA
aaaatacaaaaattagcttgtgtggtgg

SEQ ID NO: 4864 - DNA, 28 bp, synthetic construct
  source 1..28: mol_type = other DNA
ctaaaaatacaaaaattagcttgtgtgg

SEQ ID NO: 4865 - DNA, 28 bp, synthetic construct
  source 1..28: mol_type = other DNA
ctaatttttgtatttttagtagagatgg

SEQ ID NO: 4866 - DNA, 28 bp, synthetic construct
  source 1..28: mol_type = other DNA
taatttttgtatttttagtagagatggg

SEQ ID NO: 4867 - DNA, 28 bp, synthetic construct
  source 1..28: mol_type = other DNA
tagtagagatgggatttcaccacgttgg

SEQ ID NO: 4868 - DNA, 28 bp, synthetic construct
  source 1..28: mol_type = other DNA
gagatgggatttcaccacgttggccagg

SEQ ID NO: 4869 - DNA, 28 bp, synthetic construct
  source 1..28: mol_type = other DNA
tgggatttcaccacgttggccaggctgg

SEQ ID NO: 4870 - DNA, 28 bp, synthetic construct
  source 1..28: mol_type = other DNA
gagttcaagaccagcctggccaacgtgg

SEQ ID NO: 4871 - DNA, 28 bp, synthetic construct
  source 1..28: mol_type = other DNA
tgaggtcaggagttcaagaccagcctgg

SEQ ID NO: 4872 - DNA, 28 bp, synthetic construct
  source 1..28: mol_type = other DNA
aggctggtcttgaactcctgacctcagg

SEQ ID NO: 4873 - DNA, 28 bp, synthetic construct
  source 1..28: mol_type = other DNA
cctgacctcaggtgattccctgccttgg

SEQ ID NO: 4874 - DNA, 28 bp, synthetic construct
  source 1..28: mol_type = other DNA
ggaggccaaggcagggaatcacctgagg

SEQ ID NO: 4875 - DNA, 28 bp, synthetic construct
  source 1..28: mol_type = other DNA
tccctgccttggcctcccaaagtgctgg

SEQ ID NO: 4876 - DNA, 28 bp, synthetic construct
  source 1..28: mol_type = other DNA
ccctgccttggcctcccaaagtgctggg

SEQ ID NO: 4877 - DNA, 28 bp, synthetic construct
  source 1..28: mol_type = other DNA
tcccagcactttgggaggccaaggcagg

SEQ ID NO: 4878 - DNA, 28 bp, synthetic construct
  source 1..28: mol_type = other DNA
gtaatcccagcactttgggaggccaagg

SEQ ID NO: 4879 - DNA, 28 bp, synthetic construct
  source 1..28: mol_type = other DNA
ttggcctcccaaagtgctgggattacgg

SEQ ID NO: 4880 - DNA, 28 bp, synthetic construct
  source 1..28: mol_type = other DNA
acgtccgtaatcccagcactttgggagg

SEQ ID NO: 4881 - DNA, 28 bp, synthetic construct
  source 1..28: mol_type = other DNA
ctcacgtccgtaatcccagcactttggg

SEQ ID NO: 4882 - DNA, 28 bp, synthetic construct
  source 1..28: mol_type = other DNA
gctcacgtccgtaatcccagcactttgg

SEQ ID NO: 4883 - DNA, 28 bp, synthetic construct
  source 1..28: mol_type = other DNA
agaagtaattcaaggcggggagtggtgg

SEQ ID NO: 4884 - DNA, 28 bp, synthetic construct
  source 1..28: mol_type = other DNA
agaagaagtaattcaaggcggggagtgg

SEQ ID NO: 4885 - DNA, 28 bp, synthetic construct
  source 1..28: mol_type = other DNA
tggaaagaagaagtaattcaaggcgggg

SEQ ID NO: 4886 - DNA, 28 bp, synthetic construct
  source 1..28: mol_type = other DNA
atggaaagaagaagtaattcaaggcggg

SEQ ID NO: 4887 - DNA, 28 bp, synthetic construct
  source 1..28: mol_type = other DNA
aatggaaagaagaagtaattcaaggcgg

SEQ ID NO: 4888 - DNA, 28 bp, synthetic construct
  source 1..28: mol_type = other DNA
cacaatggaaagaagaagtaattcaagg

SEQ ID NO: 4889 - DNA, 28 bp, synthetic construct
  source 1..28: mol_type = other DNA
ataacaaaatgctattgaatcacaatgg

SEQ ID NO: 4890 - DNA, 28 bp, synthetic construct
  source 1..28: mol_type = other DNA
aatagcattttgttatttttgttactgg

SEQ ID NO: 4891 - DNA, 28 bp, synthetic construct
  source 1..28: mol_type = other DNA
atttgttacttttgttacagcacactgg

SEQ ID NO: 4892 - DNA, 28 bp, synthetic construct
  source 1..28: mol_type = other DNA
gcacactggctgtcttttctctaaaagg

SEQ ID NO: 4893 - DNA, 28 bp, synthetic construct
  source 1..28: mol_type = other DNA
tgtcttttctctaaaaggcaatacaagg

SEQ ID NO: 4894 - DNA, 28 bp, synthetic construct
  source 1..28: mol_type = other DNA
ttttctctaaaaggcaatacaaggccgg

SEQ ID NO: 4895 - DNA, 28 bp, synthetic construct
  source 1..28: mol_type = other DNA
aaaaggcaatacaaggccggcacagtgg

SEQ ID NO: 4896 - DNA, 28 bp, synthetic construct
  source 1..28: mol_type = other DNA
ggactacaggcgtgcgccactgtgccgg

SEQ ID NO: 4897 - DNA, 28 bp, synthetic construct
  source 1..28: mol_type = other DNA
gcacagtggcgcacgcctgtagtccagg

SEQ ID NO: 4898 - DNA, 28 bp, synthetic construct
  source 1..28: mol_type = other DNA
ggcgcacgcctgtagtccaggctactgg

SEQ ID NO: 4899 - DNA, 28 bp, synthetic construct
  source 1..28: mol_type = other DNA
gcgcacgcctgtagtccaggctactggg

SEQ ID NO: 4900 - DNA, 28 bp, synthetic construct
  source 1..28: mol_type = other DNA
cacgcctgtagtccaggctactgggagg

SEQ ID NO: 4901 - DNA, 28 bp, synthetic construct
  source 1..28: mol_type = other DNA
tcagcctcccagtagcctggactacagg

SEQ ID NO: 4902 - DNA, 28 bp, synthetic construct
  source 1..28: mol_type = other DNA
tgtagtccaggctactgggaggctgagg

SEQ ID NO: 4903 - DNA, 28 bp, synthetic construct
  source 1..28: mol_type = other DNA
agtccaggctactgggaggctgaggcgg

SEQ ID NO: 4904 - DNA, 28 bp, synthetic construct
  source 1..28: mol_type = other DNA
gtccaggctactgggaggctgaggcggg

SEQ ID NO: 4905 - DNA, 28 bp, synthetic construct
  source 1..28: mol_type = other DNA
ctcccgcctcagcctcccagtagcctgg

SEQ ID NO: 4906 - DNA, 28 bp, synthetic construct
  source 1..28: mol_type = other DNA
caggctactgggaggctgaggcgggagg

SEQ ID NO: 4907 - DNA, 28 bp, synthetic construct
  source 1..28: mol_type = other DNA
tgggaggctgaggcgggaggatcgctgg

SEQ ID NO: 4908 - DNA, 28 bp, synthetic construct
  source 1..28: mol_type = other DNA
ggcgggaggatcgctggagtccagaagg

SEQ ID NO: 4909 - DNA, 28 bp, synthetic construct
  source 1..28: mol_type = other DNA
acggctcactgcagcatcaaccttctgg

SEQ ID NO: 4910 - DNA, 28 bp, synthetic construct
  source 1..28: mol_type = other DNA
aggctggagtgcagtggcgctatcacgg

SEQ ID NO: 4911 - DNA, 28 bp, synthetic construct
  source 1..28: mol_type = other DNA
tgatagcgccactgcactccagcctagg

SEQ ID NO: 4912 - DNA, 28 bp, synthetic construct
  source 1..28: mol_type = other DNA
ctctgtcgcctaggctggagtgcagtgg

SEQ ID NO: 4913 - DNA, 28 bp, synthetic construct
  source 1..28: mol_type = other DNA
cactgcactccagcctaggcgacagagg

SEQ ID NO: 4914 - DNA, 28 bp, synthetic construct
  source 1..28: mol_type = other DNA
actgcactccagcctaggcgacagaggg

SEQ ID NO: 4915 - DNA, 28 bp, synthetic construct
  source 1..28: mol_type = other DNA
caggttctccctctgtcgcctaggctgg

SEQ ID NO: 4916 - DNA, 28 bp, synthetic construct
  source 1..28: mol_type = other DNA
gaggcaggttctccctctgtcgcctagg

SEQ ID NO: 4917 - DNA, 28 bp, synthetic construct
  source 1..28: mol_type = other DNA
tattgctatttgtttattttgaggcagg

SEQ ID NO: 4918 - DNA, 28 bp, synthetic construct
  source 1..28: mol_type = other DNA
gtcgtattgctatttgtttattttgagg

SEQ ID NO: 4919 - DNA, 28 bp, synthetic construct
  source 1..28: mol_type = other DNA
aataaacaaatagcaatacgacaatagg

SEQ ID NO: 4920 - DNA, 28 bp, synthetic construct
  source 1..28: mol_type = other DNA
aaatagcaatacgacaataggatattgg

SEQ ID NO: 4921 - DNA, 28 bp, synthetic construct
  source 1..28: mol_type = other DNA
caatacgacaataggatattggctctgg

SEQ ID NO: 4922 - DNA, 28 bp, synthetic construct
  source 1..28: mol_type = other DNA
ttatacagctactgagtaacagagctgg

SEQ ID NO: 4923 - DNA, 28 bp, synthetic construct
  source 1..28: mol_type = other DNA
ctgttactcagtagctgtataatattgg

SEQ ID NO: 4924 - DNA, 28 bp, synthetic construct
  source 1..28: mol_type = other DNA
gctcgattttgcggatggaggaagctgg

SEQ ID NO: 4925 - DNA, 28 bp, synthetic construct
  source 1..28: mol_type = other DNA
attattggctcgattttgcggatggagg

SEQ ID NO: 4926 - DNA, 28 bp, synthetic construct
  source 1..28: mol_type = other DNA
attattattggctcgattttgcggatgg

SEQ ID NO: 4927 - DNA, 28 bp, synthetic construct
  source 1..28: mol_type = other DNA
agggattattattggctcgattttgcgg

SEQ ID NO: 4928 - DNA, 28 bp, synthetic construct
  source 1..28: mol_type = other DNA
agccaataataatccctaactcatgagg

SEQ ID NO: 4929 - DNA, 28 bp, synthetic construct
  source 1..28: mol_type = other DNA
agcctcatgagttagggattattattgg

SEQ ID NO: 4930 - DNA, 28 bp, synthetic construct
  source 1..28: mol_type = other DNA
aatctgctcacagcctcatgagttaggg

SEQ ID NO: 4931 - DNA, 28 bp, synthetic construct
  source 1..28: mol_type = other DNA
taatctgctcacagcctcatgagttagg

SEQ ID NO: 4932 - DNA, 28 bp, synthetic construct
  source 1..28: mol_type = other DNA
actcatgaggctgtgagcagattaaagg

SEQ ID NO: 4933 - DNA, 28 bp, synthetic construct
  source 1..28: mol_type = other DNA
gtgtctgaaaagcatctgacacaatagg

SEQ ID NO: 4934 - DNA, 28 bp, synthetic construct
  source 1..28: mol_type = other DNA
aataggtgcctctttagctagaccaagg

SEQ ID NO: 4935 - DNA, 28 bp, synthetic construct
  source 1..28: mol_type = other DNA
ataggtgcctctttagctagaccaaggg

SEQ ID NO: 4936 - DNA, 28 bp, synthetic construct
  source 1..28: mol_type = other DNA
ttaagaacccttggtctagctaaagagg

SEQ ID NO: 4937 - DNA, 28 bp, synthetic construct
  source 1..28: mol_type = other DNA
ttagctagaccaagggttcttaacctgg

SEQ ID NO: 4938 - DNA, 28 bp, synthetic construct
  source 1..28: mol_type = other DNA
ccaagggttcttaacctggagttcatgg

SEQ ID NO: 4939 - DNA, 28 bp, synthetic construct
  source 1..28: mol_type = other DNA
cttaacctggagttcatggacccttagg

SEQ ID NO: 4940 - DNA, 28 bp, synthetic construct
  source 1..28: mol_type = other DNA
ttaacctggagttcatggacccttaggg

SEQ ID NO: 4941 - DNA, 28 bp, synthetic construct
  source 1..28: mol_type = other DNA
taacctggagttcatggacccttagggg

SEQ ID NO: 4942 - DNA, 28 bp, synthetic construct
  source 1..28: mol_type = other DNA
tatcccctaagggtccatgaactccagg

SEQ ID NO: 4943 - DNA, 28 bp, synthetic construct
  source 1..28: mol_type = other DNA
agttcatggacccttaggggatacatgg

SEQ ID NO: 4944 - DNA, 28 bp, synthetic construct
  source 1..28: mol_type = other DNA
tgaagttcatccatgtatcccctaaggg

SEQ ID NO: 4945 - DNA, 28 bp, synthetic construct
  source 1..28: mol_type = other DNA
ctgaagttcatccatgtatcccctaagg

SEQ ID NO: 4946 - DNA, 28 bp, synthetic construct
  source 1..28: mol_type = other DNA
cttaggggatacatggatgaacttcagg

SEQ ID NO: 4947 - DNA, 28 bp, synthetic construct
  source 1..28: mol_type = other DNA
ttaggggatacatggatgaacttcaggg

SEQ ID NO: 4948 - DNA, 28 bp, synthetic construct
  source 1..28: mol_type = other DNA
taggggatacatggatgaacttcagggg

SEQ ID NO: 4949 - DNA, 28 bp, synthetic construct
  source 1..28: mol_type = other DNA
ttattattattattattattatttctgg

SEQ ID NO: 4950 - DNA, 28 bp, synthetic construct
  source 1..28: mol_type = other DNA
tattattattattattattatttctggg

SEQ ID NO: 4951 - DNA, 28 bp, synthetic construct
  source 1..28: mol_type = other DNA
attattattattatttctgggaagaagg

SEQ ID NO: 4952 - DNA, 28 bp, synthetic construct
  source 1..28: mol_type = other DNA
tccatagctttcatcagcacctttaagg

SEQ ID NO: 4953 - DNA, 28 bp, synthetic construct
  source 1..28: mol_type = other DNA
ccatagctttcatcagcacctttaaggg

SEQ ID NO: 4954 - DNA, 28 bp, synthetic construct
  source 1..28: mol_type = other DNA
acgtttttgattcacaaacccttaaagg

SEQ ID NO: 4955 - DNA, 28 bp, synthetic construct
  source 1..28: mol_type = other DNA
tttgtgaatcaaaaacgttagtatgcgg

SEQ ID NO: 4956 - DNA, 28 bp, synthetic construct
  source 1..28: mol_type = other DNA
caaaaacgttagtatgcggtacccttgg

SEQ ID NO: 4957 - DNA, 28 bp, synthetic construct
  source 1..28: mol_type = other DNA
aaaaacgttagtatgcggtacccttggg

SEQ ID NO: 4958 - DNA, 28 bp, synthetic construct
  source 1..28: mol_type = other DNA
ttttcttgtttgtttttctgcccaaggg

SEQ ID NO: 4959 - DNA, 28 bp, synthetic construct
  source 1..28: mol_type = other DNA
cttttcttgtttgtttttctgcccaagg

SEQ ID NO: 4960 - DNA, 28 bp, synthetic construct
  source 1..28: mol_type = other DNA
cttgggcagaaaaacaaacaagaaaagg

SEQ ID NO: 4961 - DNA, 28 bp, synthetic construct
  source 1..28: mol_type = other DNA
aacaagaaaaggttagacaactcgatgg

SEQ ID NO: 4962 - DNA, 28 bp, synthetic construct
  source 1..28: mol_type = other DNA
ttagacaactcgatggtagaccttgagg

SEQ ID NO: 4963 - DNA, 28 bp, synthetic construct
  source 1..28: mol_type = other DNA
tagacaactcgatggtagaccttgaggg

SEQ ID NO: 4964 - DNA, 28 bp, synthetic construct
  source 1..28: mol_type = other DNA
ctgaaaggctggctctaatccctcaagg

SEQ ID NO: 4965 - DNA, 28 bp, synthetic construct
  source 1..28: mol_type = other DNA
cttgagggattagagccagcctttcagg

SEQ ID NO: 4966 - DNA, 28 bp, synthetic construct
  source 1..28: mol_type = other DNA
ttgagggattagagccagcctttcaggg

SEQ ID NO: 4967 - DNA, 28 bp, synthetic construct
  source 1..28: mol_type = other DNA
tagagccagcctttcagggtttaatagg

SEQ ID NO: 4968 - DNA, 28 bp, synthetic construct
  source 1..28: mol_type = other DNA
aagaacctattaaaccctgaaaggctgg

SEQ ID NO: 4969 - DNA, 28 bp, synthetic construct
  source 1..28: mol_type = other DNA
gagaaagaacctattaaaccctgaaagg

SEQ ID NO: 4970 - DNA, 28 bp, synthetic construct
  source 1..28: mol_type = other DNA
tctaatgttcacaatagccccttgaagg

SEQ ID NO: 4971 - DNA, 28 bp, synthetic construct
  source 1..28: mol_type = other DNA
aatgttcacaatagccccttgaaggagg

SEQ ID NO: 4972 - DNA, 28 bp, synthetic construct
  source 1..28: mol_type = other DNA
taggtgcgctaacacctccttcaagggg

SEQ ID NO: 4973 - DNA, 28 bp, synthetic construct
  source 1..28: mol_type = other DNA
ataggtgcgctaacacctccttcaaggg

SEQ ID NO: 4974 - DNA, 28 bp, synthetic construct
  source 1..28: mol_type = other DNA
aataggtgcgctaacacctccttcaagg

SEQ ID NO: 4975 - DNA, 28 bp, synthetic construct
  source 1..28: mol_type = other DNA
gttagcgcacctatttttcagatgccgg

SEQ ID NO: 4976 - DNA, 28 bp, synthetic construct
  source 1..28: mol_type = other DNA
ttcttagttccggcatctgaaaaatagg

SEQ ID NO: 4977 - DNA, 28 bp, synthetic construct
  source 1..28: mol_type = other DNA
tacagatcagttcgtttcttagttccgg

SEQ ID NO: 4978 - DNA, 28 bp, synthetic construct
  source 1..28: mol_type = other DNA
aagaaacgaactgatctgtaatagacgg

SEQ ID NO: 4979 - DNA, 28 bp, synthetic construct
  source 1..28: mol_type = other DNA
gtcttcaataatatttgcattggttagg

SEQ ID NO: 4980 - DNA, 28 bp, synthetic construct
  source 1..28: mol_type = other DNA
gaaaagtcttcaataatatttgcattgg

SEQ ID NO: 4981 - DNA, 28 bp, synthetic construct
  source 1..28: mol_type = other DNA
tgcaaatattattgaagacttttctagg

SEQ ID NO: 4982 - DNA, 28 bp, synthetic construct
  source 1..28: mol_type = other DNA
gacttttctaggccaaaaccgagctagg

SEQ ID NO: 4983 - DNA, 28 bp, synthetic construct
  source 1..28: mol_type = other DNA
tctaggccaaaaccgagctaggctatgg

SEQ ID NO: 4984 - DNA, 28 bp, synthetic construct
  source 1..28: mol_type = other DNA
ctaggccaaaaccgagctaggctatggg

SEQ ID NO: 4985 - DNA, 28 bp, synthetic construct
  source 1..28: mol_type = other DNA
cggttcccatagcctagctcggttttgg

SEQ ID NO: 4986 - DNA, 28 bp, synthetic construct
  source 1..28: mol_type = other DNA
ggacttcggttcccatagcctagctcgg

SEQ ID NO: 4987 - DNA, 28 bp, synthetic construct
  source 1..28: mol_type = other DNA
gtggtgctgagttctgactggacttcgg

SEQ ID NO: 4988 - DNA, 28 bp, synthetic construct
  source 1..28: mol_type = other DNA
gtccagtcagaactcagcaccacagagg

SEQ ID NO: 4989 - DNA, 28 bp, synthetic construct
  source 1..28: mol_type = other DNA
ggcctctgtggtgctgagttctgactgg

SEQ ID NO: 4990 - DNA, 28 bp, synthetic construct
  source 1..28: mol_type = other DNA
gcaccacagaggcctccttcttccctgg

SEQ ID NO: 4991 - DNA, 28 bp, synthetic construct
  source 1..28: mol_type = other DNA
aaaccagggaagaaggaggcctctgtgg

SEQ ID NO: 4992 - DNA, 28 bp, synthetic construct
  source 1..28: mol_type = other DNA
tggggatgcaaaccagggaagaaggagg

SEQ ID NO: 4993 - DNA, 28 bp, synthetic construct
  source 1..28: mol_type = other DNA
agctggggatgcaaaccagggaagaagg

SEQ ID NO: 4994 - DNA, 28 bp, synthetic construct
  source 1..28: mol_type = other DNA
cagaatgagctggggatgcaaaccaggg

SEQ ID NO: 4995 - DNA, 28 bp, synthetic construct
  source 1..28: mol_type = other DNA
gcagaatgagctggggatgcaaaccagg

SEQ ID NO: 4996 - DNA, 28 bp, synthetic construct
  source 1..28: mol_type = other DNA
gcatccccagctcattctgcgcctccgg

SEQ ID NO: 4997 - DNA, 28 bp, synthetic construct
  source 1..28: mol_type = other DNA
cgttccggaggcgcagaatgagctgggg

SEQ ID NO: 4998 - DNA, 28 bp, synthetic construct
  source 1..28: mol_type = other DNA
acgttccggaggcgcagaatgagctggg

SEQ ID NO: 4999 - DNA, 28 bp, synthetic construct
  source 1..28: mol_type = other DNA
aacgttccggaggcgcagaatgagctgg

SEQ ID NO: 5000 - DNA, 28 bp, synthetic construct
  source 1..28: mol_type = other DNA
agcaaaaatctatgaaacgttccggagg

SEQ ID NO: 5001 - DNA, 28 bp, synthetic construct
  source 1..28: mol_type = other DNA
ctcagcaaaaatctatgaaacgttccgg

SEQ ID NO: 5002 - DNA, 28 bp, synthetic construct
  source 1..28: mol_type = other DNA
gctgccgccaccgccgaaaaactcccgg

SEQ ID NO: 5003 - DNA, 28 bp, synthetic construct
  source 1..28: mol_type = other DNA
ctgccgccaccgccgaaaaactcccggg

SEQ ID NO: 5004 - DNA, 28 bp, synthetic construct
  source 1..28: mol_type = other DNA
tgccgccaccgccgaaaaactcccgggg

SEQ ID NO: 5005 - DNA, 28 bp, synthetic construct
  source 1..28: mol_type = other DNA
tgccccgggagtttttcggcggtggcgg

SEQ ID NO: 5006 - DNA, 28 bp, synthetic construct
  source 1..28: mol_type = other DNA
ctgtgccccgggagtttttcggcggtgg

SEQ ID NO: 5007 - DNA, 28 bp, synthetic construct
  source 1..28: mol_type = other DNA
gctctgtgccccgggagtttttcggcgg

SEQ ID NO: 5008 - DNA, 28 bp, synthetic construct
  source 1..28: mol_type = other DNA
ggagctctgtgccccgggagtttttcgg

SEQ ID NO: 5009 - DNA, 28 bp, synthetic construct
  source 1..28: mol_type = other DNA
cggtgggggcggagctctgtgccccggg

SEQ ID NO: 5010 - DNA, 28 bp, synthetic construct
  source 1..28: mol_type = other DNA
ccggggcacagagctccgcccccaccgg

SEQ ID NO: 5011 - DNA, 28 bp, synthetic construct
  source 1..28: mol_type = other DNA
cggggcacagagctccgcccccaccggg

SEQ ID NO: 5012 - DNA, 28 bp, synthetic construct
  source 1..28: mol_type = other DNA
cacagagctccgcccccaccgggccagg

SEQ ID NO: 5013 - DNA, 28 bp, synthetic construct
  source 1..28: mol_type = other DNA
gaggtggggcctggcccggtgggggcgg

SEQ ID NO: 5014 - DNA, 28 bp, synthetic construct
  source 1..28: mol_type = other DNA
gaggaggtggggcctggcccggtggggg

SEQ ID NO: 5015 - DNA, 28 bp, synthetic construct
  source 1..28: mol_type = other DNA
agaggaggtggggcctggcccggtgggg

SEQ ID NO: 5016 - DNA, 28 bp, synthetic construct
  source 1..28: mol_type = other DNA
cagaggaggtggggcctggcccggtggg

SEQ ID NO: 5017 - DNA, 28 bp, synthetic construct
  source 1..28: mol_type = other DNA
gcagaggaggtggggcctggcccggtgg

SEQ ID NO: 5018 - DNA, 28 bp, synthetic construct
  source 1..28: mol_type = other DNA
actgcagaggaggtggggcctggcccgg

SEQ ID NO: 5019 - DNA, 28 bp, synthetic construct
  source 1..28: mol_type = other DNA
ggccaggccccacctcctctgcagtcgg

SEQ ID NO: 5020 - DNA, 28 bp, synthetic construct
  source 1..28: mol_type = other DNA
taccgactgcagaggaggtggggcctgg

SEQ ID NO: 5021 - DNA, 28 bp, synthetic construct
  source 1..28: mol_type = other DNA
gacaataccgactgcagaggaggtgggg

SEQ ID NO: 5022 - DNA, 28 bp, synthetic construct
  source 1..28: mol_type = other DNA
ggacaataccgactgcagaggaggtggg

SEQ ID NO: 5023 - DNA, 28 bp, synthetic construct
  source 1..28: mol_type = other DNA
cggacaataccgactgcagaggaggtgg

SEQ ID NO: 5024 - DNA, 28 bp, synthetic construct
  source 1..28: mol_type = other DNA
catcggacaataccgactgcagaggagg

SEQ ID NO: 5025 - DNA, 28 bp, synthetic construct
  source 1..28: mol_type = other DNA
ctcctctgcagtcggtattgtccgatgg

SEQ ID NO: 5026 - DNA, 28 bp, synthetic construct
  source 1..28: mol_type = other DNA
aaccatcggacaataccgactgcagagg

SEQ ID NO: 5027 - DNA, 28 bp, synthetic construct
  source 1..28: mol_type = other DNA
gcagtcggtattgtccgatggttcccgg

SEQ ID NO: 5028 - DNA, 28 bp, synthetic construct
  source 1..28: mol_type = other DNA
ttgtccgatggttcccggcgtacctcgg

SEQ ID NO: 5029 - DNA, 28 bp, synthetic construct
  source 1..28: mol_type = other DNA
gaagccgaggtacgccgggaaccatcgg

SEQ ID NO: 5030 - DNA, 28 bp, synthetic construct
  source 1..28: mol_type = other DNA
gttcccggcgtacctcggcttccctcgg

SEQ ID NO: 5031 - DNA, 28 bp, synthetic construct
  source 1..28: mol_type = other DNA
ctaccgagggaagccgaggtacgccggg

SEQ ID NO: 5032 - DNA, 28 bp, synthetic construct
  source 1..28: mol_type = other DNA
actaccgagggaagccgaggtacgccgg

SEQ ID NO: 5033 - DNA, 28 bp, synthetic construct
  source 1..28: mol_type = other DNA
tacctcggcttccctcggtagtttccgg

SEQ ID NO: 5034 - DNA, 28 bp, synthetic construct
  source 1..28: mol_type = other DNA
tgccggaaactaccgagggaagccgagg

SEQ ID NO: 5035 - DNA, 28 bp, synthetic construct
  source 1..28: mol_type = other DNA
ggcttccctcggtagtttccggcaatgg

SEQ ID NO: 5036 - DNA, 28 bp, synthetic construct
  source 1..28: mol_type = other DNA
ctcgaccattgccggaaactaccgaggg

SEQ ID NO: 5037 - DNA, 28 bp, synthetic construct
  source 1..28: mol_type = other DNA
tctcgaccattgccggaaactaccgagg

SEQ ID NO: 5038 - DNA, 28 bp, synthetic construct
  source 1..28: mol_type = other DNA
cacgttagaaactctcgaccattgccgg

SEQ ID NO: 5039 - DNA, 28 bp, synthetic construct
  source 1..28: mol_type = other DNA
tctaacgtgcccccttgttgtctctcgg

SEQ ID NO: 5040 - DNA, 28 bp, synthetic construct
  source 1..28: mol_type = other DNA
ggacggcggccgagagacaacaaggggg

SEQ ID NO: 5041 - DNA, 28 bp, synthetic construct
  source 1..28: mol_type = other DNA
aggacggcggccgagagacaacaagggg

SEQ ID NO: 5042 - DNA, 28 bp, synthetic construct
  source 1..28: mol_type = other DNA
gaggacggcggccgagagacaacaaggg

SEQ ID NO: 5043 - DNA, 28 bp, synthetic construct
  source 1..28: mol_type = other DNA
agaggacggcggccgagagacaacaagg

SEQ ID NO: 5044 - DNA, 28 bp, synthetic construct
  source 1..28: mol_type = other DNA
aggggggcggtggttgagaggacggcgg

SEQ ID NO: 5045 - DNA, 28 bp, synthetic construct
  source 1..28: mol_type = other DNA
aaaaggggggcggtggttgagaggacgg

SEQ ID NO: 5046 - DNA, 28 bp, synthetic construct
  source 1..28: mol_type = other DNA
tcctctcaaccaccgccccccttttcgg

SEQ ID NO: 5047 - DNA, 28 bp, synthetic construct
  source 1..28: mol_type = other DNA
gccgaaaaggggggcggtggttgagagg

SEQ ID NO: 5048 - DNA, 28 bp, synthetic construct
  source 1..28: mol_type = other DNA
gagagggagccgaaaaggggggcggtgg

SEQ ID NO: 5049 - DNA, 28 bp, synthetic construct
  source 1..28: mol_type = other DNA
ggggagagggagccgaaaaggggggcgg

SEQ ID NO: 5050 - DNA, 28 bp, synthetic construct
  source 1..28: mol_type = other DNA
aagggggagagggagccgaaaagggggg

SEQ ID NO: 5051 - DNA, 28 bp, synthetic construct
  source 1..28: mol_type = other DNA
gaagggggagagggagccgaaaaggggg

SEQ ID NO: 5052 - DNA, 28 bp, synthetic construct
  source 1..28: mol_type = other DNA
ggaagggggagagggagccgaaaagggg

SEQ ID NO: 5053 - DNA, 28 bp, synthetic construct
  source 1..28: mol_type = other DNA
gggaagggggagagggagccgaaaaggg

SEQ ID NO: 5054 - DNA, 28 bp, synthetic construct
  source 1..28: mol_type = other DNA
cgggaagggggagagggagccgaaaagg

SEQ ID NO: 5055 - DNA, 28 bp, synthetic construct
  source 1..28: mol_type = other DNA
gactgggggaacgggaagggggagaggg

SEQ ID NO: 5056 - DNA, 28 bp, synthetic construct
  source 1..28: mol_type = other DNA
tgactgggggaacgggaagggggagagg

SEQ ID NO: 5057 - DNA, 28 bp, synthetic construct
  source 1..28: mol_type = other DNA
caggctgactgggggaacgggaaggggg

SEQ ID NO: 5058 - DNA, 28 bp, synthetic construct
  source 1..28: mol_type = other DNA
ccccttcccgttcccccagtcagcctgg

SEQ ID NO: 5059 - DNA, 28 bp, synthetic construct
  source 1..28: mol_type = other DNA
gccaggctgactgggggaacgggaaggg

SEQ ID NO: 5060 - DNA, 28 bp, synthetic construct
  source 1..28: mol_type = other DNA
ggccaggctgactgggggaacgggaagg

SEQ ID NO: 5061 - DNA, 28 bp, synthetic construct
  source 1..28: mol_type = other DNA
gcagggccaggctgactgggggaacggg

SEQ ID NO: 5062 - DNA, 28 bp, synthetic construct
  source 1..28: mol_type = other DNA
agcagggccaggctgactgggggaacgg

SEQ ID NO: 5063 - DNA, 28 bp, synthetic construct
  source 1..28: mol_type = other DNA
gttcccccagtcagcctggccctgctgg

SEQ ID NO: 5064 - DNA, 28 bp, synthetic construct
  source 1..28: mol_type = other DNA
gcaccagcagggccaggctgactggggg

SEQ ID NO: 5065 - DNA, 28 bp, synthetic construct
  source 1..28: mol_type = other DNA
ggcaccagcagggccaggctgactgggg

SEQ ID NO: 5066 - DNA, 28 bp, synthetic construct
  source 1..28: mol_type = other DNA
aggcaccagcagggccaggctgactggg

SEQ ID NO: 5067 - DNA, 28 bp, synthetic construct
  source 1..28: mol_type = other DNA
gaggcaccagcagggccaggctgactgg

SEQ ID NO: 5068 - DNA, 28 bp, synthetic construct
  source 1..28: mol_type = other DNA
gtcagcctggccctgctggtgcctccgg

SEQ ID NO: 5069 - DNA, 28 bp, synthetic construct
  source 1..28: mol_type = other DNA
tagcgccggaggcaccagcagggccagg

SEQ ID NO: 5070 - DNA, 28 bp, synthetic construct
  source 1..28: mol_type = other DNA
ggccctgctggtgcctccggcgctacgg

SEQ ID NO: 5071 - DNA, 28 bp, synthetic construct
  source 1..28: mol_type = other DNA
gccctgctggtgcctccggcgctacggg

SEQ ID NO: 5072 - DNA, 28 bp, synthetic construct
  source 1..28: mol_type = other DNA
gcccgtagcgccggaggcaccagcaggg

SEQ ID NO: 5073 - DNA, 28 bp, synthetic construct
  source 1..28: mol_type = other DNA
agcccgtagcgccggaggcaccagcagg

SEQ ID NO: 5074 - DNA, 28 bp, synthetic construct
  source 1..28: mol_type = other DNA
tgctggtgcctccggcgctacgggctgg

SEQ ID NO: 5075 - DNA, 28 bp, synthetic construct
  source 1..28: mol_type = other DNA
gctggtgcctccggcgctacgggctggg

SEQ ID NO: 5076 - DNA, 28 bp, synthetic construct
  source 1..28: mol_type = other DNA
catcttgcccagcccgtagcgccggagg

SEQ ID NO: 5077 - DNA, 28 bp, synthetic construct
  source 1..28: mol_type = other DNA
ctccggcgctacgggctgggcaagatgg

SEQ ID NO: 5078 - DNA, 28 bp, synthetic construct
  source 1..28: mol_type = other DNA
cgccatcttgcccagcccgtagcgccgg

SEQ ID NO: 5079 - DNA, 28 bp, synthetic construct
  source 1..28: mol_type = other DNA
cggcgctacgggctgggcaagatggcgg

SEQ ID NO: 5080 - DNA, 28 bp, synthetic construct
  source 1..28: mol_type = other DNA
acgggctgggcaagatggcggccttcgg

SEQ ID NO: 5081 - DNA, 28 bp, synthetic construct
  source 1..28: mol_type = other DNA
cgggctgggcaagatggcggccttcggg

SEQ ID NO: 5082 - DNA, 28 bp, synthetic construct
  source 1..28: mol_type = other DNA
cggtgttcgtagctcaagatcccgaagg

SEQ ID NO: 5083 - DNA, 28 bp, synthetic construct
  source 1..28: mol_type = other DNA
cttcgggatcttgagctacgaacaccgg

SEQ ID NO: 5084 - DNA, 28 bp, synthetic construct
  source 1..28: mol_type = other DNA
gagctacgaacaccggcccctgaagcgg

SEQ ID NO: 5085 - DNA, 28 bp, synthetic construct
  source 1..28: mol_type = other DNA
cgaacaccggcccctgaagcggccgcgg

SEQ ID NO: 5086 - DNA, 28 bp, synthetic construct
  source 1..28: mol_type = other DNA
caccggcccctgaagcggccgcggctgg

SEQ ID NO: 5087 - DNA, 28 bp, synthetic construct
  source 1..28: mol_type = other DNA
accggcccctgaagcggccgcggctggg

SEQ ID NO: 5088 - DNA, 28 bp, synthetic construct
  source 1..28: mol_type = other DNA
ccggcccctgaagcggccgcggctgggg

SEQ ID NO: 5089 - DNA, 28 bp, synthetic construct
  source 1..28: mol_type = other DNA
gaggccccagccgcggccgcttcagggg

SEQ ID NO: 5090 - DNA, 28 bp, synthetic construct
  source 1..28: mol_type = other DNA
ggaggccccagccgcggccgcttcaggg

SEQ ID NO: 5091 - DNA, 28 bp, synthetic construct
  source 1..28: mol_type = other DNA
gggaggccccagccgcggccgcttcagg

SEQ ID NO: 5092 - DNA, 28 bp, synthetic construct
  source 1..28: mol_type = other DNA
ggtaaacatcgggaggccccagccgcgg

SEQ ID NO: 5093 - DNA, 28 bp, synthetic construct
  source 1..28: mol_type = other DNA
ctggggcctcccgatgtttaccctcagg

SEQ ID NO: 5094 - DNA, 28 bp, synthetic construct
  source 1..28: mol_type = other DNA
tggggtcctgagggtaaacatcgggagg

SEQ ID NO: 5095 - DNA, 28 bp, synthetic construct
  source 1..28: mol_type = other DNA
gtttggggtcctgagggtaaacatcggg

SEQ ID NO: 5096 - DNA, 28 bp, synthetic construct
  source 1..28: mol_type = other DNA
tgtttggggtcctgagggtaaacatcgg

SEQ ID NO: 5097 - DNA, 28 bp, synthetic construct
  source 1..28: mol_type = other DNA
gtttaccctcaggaccccaaacagaagg

SEQ ID NO: 5098 - DNA, 28 bp, synthetic construct
  source 1..28: mol_type = other DNA
taccctcaggaccccaaacagaaggagg

SEQ ID NO: 5099 - DNA, 28 bp, synthetic construct
  source 1..28: mol_type = other DNA
cacctccttctgtttggggtcctgaggg

SEQ ID NO: 5100 - DNA, 28 bp, synthetic construct
  source 1..28: mol_type = other DNA
gcacctccttctgtttggggtcctgagg

SEQ ID NO: 5101 - DNA, 28 bp, synthetic construct
  source 1..28: mol_type = other DNA
tttcgaacgcacctccttctgtttgggg

SEQ ID NO: 5102 - DNA, 28 bp, synthetic construct
  source 1..28: mol_type = other DNA
ttttcgaacgcacctccttctgtttggg

SEQ ID NO: 5103 - DNA, 28 bp, synthetic construct
  source 1..28: mol_type = other DNA
attttcgaacgcacctccttctgtttgg

SEQ ID NO: 5104 - DNA, 28 bp, synthetic construct
  source 1..28: mol_type = other DNA
aacagaaggaggtgcgttcgaaaatcgg

SEQ ID NO: 5105 - DNA, 28 bp, synthetic construct
  source 1..28: mol_type = other DNA
acagaaggaggtgcgttcgaaaatcggg

SEQ ID NO: 5106 - DNA, 28 bp, synthetic construct
  source 1..28: mol_type = other DNA
cagaaggaggtgcgttcgaaaatcgggg

SEQ ID NO: 5107 - DNA, 28 bp, synthetic construct
  source 1..28: mol_type = other DNA
gaggtgcgttcgaaaatcggggctctgg

SEQ ID NO: 5108 - DNA, 28 bp, synthetic construct
  source 1..28: mol_type = other DNA
caactaaacgccgctttcctgcctcagg

SEQ ID NO: 5109 - DNA, 28 bp, synthetic construct
  source 1..28: mol_type = other DNA
gtcagttcatcctgaggcaggaaagcgg

SEQ ID NO: 5110 - DNA, 28 bp, synthetic construct
  source 1..28: mol_type = other DNA
gctttcctgcctcaggatgaactgacgg

SEQ ID NO: 5111 - DNA, 28 bp, synthetic construct
  source 1..28: mol_type = other DNA
caaggccgtcagttcatcctgaggcagg

SEQ ID NO: 5112 - DNA, 28 bp, synthetic construct
  source 1..28: mol_type = other DNA
cattcaaggccgtcagttcatcctgagg

SEQ ID NO: 5113 - DNA, 28 bp, synthetic construct
  source 1..28: mol_type = other DNA
aactgacggccttgaatgtaaaacaagg

SEQ ID NO: 5114 - DNA, 28 bp, synthetic construct
  source 1..28: mol_type = other DNA
ttattgaaaccttgttttacattcaagg

SEQ ID NO: 5115 - DNA, 28 bp, synthetic construct
  source 1..28: mol_type = other DNA
gtttcaataaccagcctgctgtctctgg

SEQ ID NO: 5116 - DNA, 28 bp, synthetic construct
  source 1..28: mol_type = other DNA
tttcaataaccagcctgctgtctctggg

SEQ ID NO: 5117 - DNA, 28 bp, synthetic construct
  source 1..28: mol_type = other DNA
ttcaataaccagcctgctgtctctgggg

SEQ ID NO: 5118 - DNA, 28 bp, synthetic construct
  source 1..28: mol_type = other DNA
atgctcatccccagagacagcaggctgg

SEQ ID NO: 5119 - DNA, 28 bp, synthetic construct
  source 1..28: mol_type = other DNA
agcctgctgtctctggggatgagcatgg

SEQ ID NO: 5120 - DNA, 28 bp, synthetic construct
  source 1..28: mol_type = other DNA
tgccatgctcatccccagagacagcagg

SEQ ID NO: 5121 - DNA, 28 bp, synthetic construct
  source 1..28: mol_type = other DNA
ttggcaggattgaagctgacgttcttgg

SEQ ID NO: 5122 - DNA, 28 bp, synthetic construct
  source 1..28: mol_type = other DNA
aagaacgtcagcttcaatcctgccaagg

SEQ ID NO: 5123 - DNA, 28 bp, synthetic construct
  source 1..28: mol_type = other DNA
cctgccaaggtgagacaactctgccagg

SEQ ID NO: 5124 - DNA, 28 bp, synthetic construct
  source 1..28: mol_type = other DNA
tcagcctggcagagttgtctcaccttgg

SEQ ID NO: 5125 - DNA, 28 bp, synthetic construct
  source 1..28: mol_type = other DNA
aggtgagacaactctgccaggctgaagg

SEQ ID NO: 5126 - DNA, 28 bp, synthetic construct
  source 1..28: mol_type = other DNA
tctgagggaagaaaagtgtacctcaggg

SEQ ID NO: 5127 - DNA, 28 bp, synthetic construct
  source 1..28: mol_type = other DNA
atctgagggaagaaaagtgtacctcagg

SEQ ID NO: 5128 - DNA, 28 bp, synthetic construct
  source 1..28: mol_type = other DNA
gctgctgaagttggaactgatctgaggg

SEQ ID NO: 5129 - DNA, 28 bp, synthetic construct
  source 1..28: mol_type = other DNA
tgctgctgaagttggaactgatctgagg

SEQ ID NO: 5130 - DNA, 28 bp, synthetic construct
  source 1..28: mol_type = other DNA
ttctctgcaataatgctgctgaagttgg

SEQ ID NO: 5131 - DNA, 28 bp, synthetic construct
  source 1..28: mol_type = other DNA
tacgttgtaatacccttcctgacactgg

SEQ ID NO: 5132 - DNA, 28 bp, synthetic construct
  source 1..28: mol_type = other DNA
taatacccttcctgacactggtcgcagg

SEQ ID NO: 5133 - DNA, 28 bp, synthetic construct
  source 1..28: mol_type = other DNA
ggcttcctgcgaccagtgtcaggaaggg

SEQ ID NO: 5134 - DNA, 28 bp, synthetic construct
  source 1..28: mol_type = other DNA
gggcttcctgcgaccagtgtcaggaagg

SEQ ID NO: 5135 - DNA, 28 bp, synthetic construct
  source 1..28: mol_type = other DNA
cttggggcttcctgcgaccagtgtcagg

SEQ ID NO: 5136 - DNA, 28 bp, synthetic construct
  source 1..28: mol_type = other DNA
cgcaggaagccccaagtgaaccagaagg

SEQ ID NO: 5137 - DNA, 28 bp, synthetic construct
  source 1..28: mol_type = other DNA
agaagttatccttctggttcacttgggg

SEQ ID NO: 5138 - DNA, 28 bp, synthetic construct
  source 1..28: mol_type = other DNA
cagaagttatccttctggttcacttggg

SEQ ID NO: 5139 - DNA, 28 bp, synthetic construct
  source 1..28: mol_type = other DNA
ccaagtgaaccagaaggataacttctgg

SEQ ID NO: 5140 - DNA, 28 bp, synthetic construct
  source 1..28: mol_type = other DNA
gtgaaccagaaggataacttctggctgg

SEQ ID NO: 5141 - DNA, 28 bp, synthetic construct
  source 1..28: mol_type = other DNA
agtcaccagccagaagttatccttctgg

SEQ ID NO: 5142 - DNA, 28 bp, synthetic construct
  source 1..28: mol_type = other DNA
acgatcccagagtgccattaacacttgg

SEQ ID NO: 5143 - DNA, 28 bp, synthetic construct
  source 1..28: mol_type = other DNA
gtgaaccaagtgttaatggcactctggg

SEQ ID NO: 5144 - DNA, 28 bp, synthetic construct
  source 1..28: mol_type = other DNA
agtgaaccaagtgttaatggcactctgg

SEQ ID NO: 5145 - DNA, 28 bp, synthetic construct
  source 1..28: mol_type = other DNA
gccattaacacttggttcactgacttgg

SEQ ID NO: 5146 - DNA, 28 bp, synthetic construct
  source 1..28: mol_type = other DNA
gccaagtcagtgaaccaagtgttaatgg

SEQ ID NO: 5147 - DNA, 28 bp, synthetic construct
  source 1..28: mol_type = other DNA
ttaacacttggttcactgacttggctgg

SEQ ID NO: 5148 - DNA, 28 bp, synthetic construct
  source 1..28: mol_type = other DNA
tttttggctagttgcgtgagtggcttgg

SEQ ID NO: 5149 - DNA, 28 bp, synthetic construct
  source 1..28: mol_type = other DNA
aagccactcacgcaactagccaaaaagg

SEQ ID NO: 5150 - DNA, 28 bp, synthetic construct
  source 1..28: mol_type = other DNA
ttacctttttggctagttgcgtgagtgg

SEQ ID NO: 5151 - DNA, 28 bp, synthetic construct
  source 1..28: mol_type = other DNA
actcacgcaactagccaaaaaggtaagg

SEQ ID NO: 5152 - DNA, 28 bp, synthetic construct
  source 1..28: mol_type = other DNA
gacaggaaacagtaccttacctttttgg

SEQ ID NO: 5153 - DNA, 28 bp, synthetic construct
  source 1..28: mol_type = other DNA
ggtaaggtactgtttcctgtccttcagg

SEQ ID NO: 5154 - DNA, 28 bp, synthetic construct
  source 1..28: mol_type = other DNA
acctcactatttgcaatgtccatccagg

SEQ ID NO: 5155 - DNA, 28 bp, synthetic construct
  source 1..28: mol_type = other DNA
acctggatggacattgcaaatagtgagg

SEQ ID NO: 5156 - DNA, 28 bp, synthetic construct
  source 1..28: mol_type = other DNA
ttcttactgaaaatggggacctggatgg

SEQ ID NO: 5157 - DNA, 28 bp, synthetic construct
  source 1..28: mol_type = other DNA
atccaggtccccattttcagtaagaagg

SEQ ID NO: 5158 - DNA, 28 bp, synthetic construct
  source 1..28: mol_type = other DNA
ttccttcttactgaaaatggggacctgg

SEQ ID NO: 5159 - DNA, 28 bp, synthetic construct
  source 1..28: mol_type = other DNA
gtccccattttcagtaagaaggaagagg

SEQ ID NO: 5160 - DNA, 28 bp, synthetic construct
  source 1..28: mol_type = other DNA
cacctcttccttcttactgaaaatgggg

SEQ ID NO: 5161 - DNA, 28 bp, synthetic construct
  source 1..28: mol_type = other DNA
acacctcttccttcttactgaaaatggg

SEQ ID NO: 5162 - DNA, 28 bp, synthetic construct
  source 1..28: mol_type = other DNA
aacacctcttccttcttactgaaaatgg

SEQ ID NO: 5163 - DNA, 28 bp, synthetic construct
  source 1..28: mol_type = other DNA
ttttcagtaagaaggaagaggtgtttgg

SEQ ID NO: 5164 - DNA, 28 bp, synthetic construct
  source 1..28: mol_type = other DNA
tttcagtaagaaggaagaggtgtttggg

SEQ ID NO: 5165 - DNA, 28 bp, synthetic construct
  source 1..28: mol_type = other DNA
agccaaatacacagtgcctgtgatgcgg

SEQ ID NO: 5166 - DNA, 28 bp, synthetic construct
  source 1..28: mol_type = other DNA
gccaaatacacagtgcctgtgatgcggg

SEQ ID NO: 5167 - DNA, 28 bp, synthetic construct
  source 1..28: mol_type = other DNA
gcccgcatcacaggcactgtgtatttgg

SEQ ID NO: 5168 - DNA, 28 bp, synthetic construct
  source 1..28: mol_type = other DNA
cacagtgcctgtgatgcgggctgcctgg

SEQ ID NO: 5169 - DNA, 28 bp, synthetic construct
  source 1..28: mol_type = other DNA
taatgagccaggcagcccgcatcacagg

SEQ ID NO: 5170 - DNA, 28 bp, synthetic construct
  source 1..28: mol_type = other DNA
taggcacaggtcatcttaatgagccagg

SEQ ID NO: 5171 - DNA, 28 bp, synthetic construct
  source 1..28: mol_type = other DNA
tcagagattgctgcatagtaggcacagg

SEQ ID NO: 5172 - DNA, 28 bp, synthetic construct
  source 1..28: mol_type = other DNA
ttggtctcagagattgctgcatagtagg

SEQ ID NO: 5173 - DNA, 28 bp, synthetic construct
  source 1..28: mol_type = other DNA
tactatgcagcaatctctgagaccaagg

SEQ ID NO: 5174 - DNA, 28 bp, synthetic construct
  source 1..28: mol_type = other DNA
gggtcaacatgtctcttcttaaccttgg

SEQ ID NO: 5175 - DNA, 28 bp, synthetic construct
  source 1..28: mol_type = other DNA
aagaagagacatgttgaccctttcatgg

SEQ ID NO: 5176 - DNA, 28 bp, synthetic construct
  source 1..28: mol_type = other DNA
agaagagacatgttgaccctttcatggg

SEQ ID NO: 5177 - DNA, 28 bp, synthetic construct
  source 1..28: mol_type = other DNA
tgttaggagttactcacccatgaaaggg

SEQ ID NO: 5178 - DNA, 28 bp, synthetic construct
  source 1..28: mol_type = other DNA
gtgttaggagttactcacccatgaaagg

SEQ ID NO: 5179 - DNA, 28 bp, synthetic construct
  source 1..28: mol_type = other DNA
tcatgggtgagtaactcctaacaccagg

SEQ ID NO: 5180 - DNA, 28 bp, synthetic construct
  source 1..28: mol_type = other DNA
ccctttttccctctttcctccagaatgg

SEQ ID NO: 5181 - DNA, 28 bp, synthetic construct
  source 1..28: mol_type = other DNA
tccattctggaggaaagagggaaaaagg

SEQ ID NO: 5182 - DNA, 28 bp, synthetic construct
  source 1..28: mol_type = other DNA
atctgagtccattctggaggaaagaggg

SEQ ID NO: 5183 - DNA, 28 bp, synthetic construct
  source 1..28: mol_type = other DNA
gatctgagtccattctggaggaaagagg

SEQ ID NO: 5184 - DNA, 28 bp, synthetic construct
  source 1..28: mol_type = other DNA
tggtgatgatctgagtccattctggagg

SEQ ID NO: 5185 - DNA, 28 bp, synthetic construct
  source 1..28: mol_type = other DNA
acttggtgatgatctgagtccattctgg

SEQ ID NO: 5186 - DNA, 28 bp, synthetic construct
  source 1..28: mol_type = other DNA
gactcagatcatcaccaagtacttatgg

SEQ ID NO: 5187 - DNA, 28 bp, synthetic construct
  source 1..28: mol_type = other DNA
actcagatcatcaccaagtacttatggg

SEQ ID NO: 5188 - DNA, 28 bp, synthetic construct
  source 1..28: mol_type = other DNA
ttctgtaactgctcccataagtacttgg

SEQ ID NO: 5189 - DNA, 28 bp, synthetic construct
  source 1..28: mol_type = other DNA
tacttatgggagcagttacagaagatgg

SEQ ID NO: 5190 - DNA, 28 bp, synthetic construct
  source 1..28: mol_type = other DNA
gttacagaagatggctgaatactaccgg

SEQ ID NO: 5191 - DNA, 28 bp, synthetic construct
  source 1..28: mol_type = other DNA
agaagatggctgaatactaccggccagg

SEQ ID NO: 5192 - DNA, 28 bp, synthetic construct
  source 1..28: mol_type = other DNA
gaagatggctgaatactaccggccaggg

SEQ ID NO: 5193 - DNA, 28 bp, synthetic construct
  source 1..28: mol_type = other DNA
ctgaatactaccggccagggcctgcagg

SEQ ID NO: 5194 - DNA, 28 bp, synthetic construct
  source 1..28: mol_type = other DNA
actaccggccagggcctgcaggaagtgg

SEQ ID NO: 5195 - DNA, 28 bp, synthetic construct
  source 1..28: mol_type = other DNA
ctaccggccagggcctgcaggaagtggg

SEQ ID NO: 5196 - DNA, 28 bp, synthetic construct
  source 1..28: mol_type = other DNA
taccggccagggcctgcaggaagtgggg

SEQ ID NO: 5197 - DNA, 28 bp, synthetic construct
  source 1..28: mol_type = other DNA
accggccagggcctgcaggaagtggggg

SEQ ID NO: 5198 - DNA, 28 bp, synthetic construct
  source 1..28: mol_type = other DNA
gcccccacttcctgcaggccctggccgg

SEQ ID NO: 5199 - DNA, 28 bp, synthetic construct
  source 1..28: mol_type = other DNA
cacagcccccacttcctgcaggccctgg

SEQ ID NO: 5200 - DNA, 28 bp, synthetic construct
  source 1..28: mol_type = other DNA
cagggcctgcaggaagtgggggctgtgg

SEQ ID NO: 5201 - DNA, 28 bp, synthetic construct
  source 1..28: mol_type = other DNA
tggaaccacagcccccacttcctgcagg

SEQ ID NO: 5202 - DNA, 28 bp, synthetic construct
  source 1..28: mol_type = other DNA
gaagtgggggctgtggttccacgatagg

SEQ ID NO: 5203 - DNA, 28 bp, synthetic construct
  source 1..28: mol_type = other DNA
aagtgggggctgtggttccacgataggg

SEQ ID NO: 5204 - DNA, 28 bp, synthetic construct
  source 1..28: mol_type = other DNA
acatcatggggcaagggccctatcgtgg

SEQ ID NO: 5205 - DNA, 28 bp, synthetic construct
  source 1..28: mol_type = other DNA
atagggcccttgccccatgatgtagagg

SEQ ID NO: 5206 - DNA, 28 bp, synthetic construct
  source 1..28: mol_type = other DNA
gggcccttgccccatgatgtagaggtgg

SEQ ID NO: 5207 - DNA, 28 bp, synthetic construct
  source 1..28: mol_type = other DNA
ttgccacctctacatcatggggcaaggg

SEQ ID NO: 5208 - DNA, 28 bp, synthetic construct
  source 1..28: mol_type = other DNA
attgccacctctacatcatggggcaagg

SEQ ID NO: 5209 - DNA, 28 bp, synthetic construct
  source 1..28: mol_type = other DNA
gccccatgatgtagaggtggcaatccgg

SEQ ID NO: 5210 - DNA, 28 bp, synthetic construct
  source 1..28: mol_type = other DNA
gccggattgccacctctacatcatgggg

SEQ ID NO: 5211 - DNA, 28 bp, synthetic construct
  source 1..28: mol_type = other DNA
tgccggattgccacctctacatcatggg

SEQ ID NO: 5212 - DNA, 28 bp, synthetic construct
  source 1..28: mol_type = other DNA
ctgccggattgccacctctacatcatgg

SEQ ID NO: 5213 - DNA, 28 bp, synthetic construct
  source 1..28: mol_type = other DNA
tgatgtagaggtggcaatccggcagtgg

SEQ ID NO: 5214 - DNA, 28 bp, synthetic construct
  source 1..28: mol_type = other DNA
gatgtagaggtggcaatccggcagtggg

SEQ ID NO: 5215 - DNA, 28 bp, synthetic construct
  source 1..28: mol_type = other DNA
cagcttctcggtgtaatcccactgccgg

SEQ ID NO: 5216 - DNA, 28 bp, synthetic construct
  source 1..28: mol_type = other DNA
cggcagtgggattacaccgagaagctgg

SEQ ID NO: 5217 - DNA, 28 bp, synthetic construct
  source 1..28: mol_type = other DNA
tgaaacatgaacatggccagcttctcgg

SEQ ID NO: 5218 - DNA, 28 bp, synthetic construct
  source 1..28: mol_type = other DNA
gagaagctggccatgttcatgtttcagg

SEQ ID NO: 5219 - DNA, 28 bp, synthetic construct
  source 1..28: mol_type = other DNA
ctactctctacctgaaacatgaacatgg

SEQ ID NO: 5220 - DNA, 28 bp, synthetic construct
  source 1..28: mol_type = other DNA
catgttcatgtttcaggtagagagtagg

SEQ ID NO: 5221 - DNA, 28 bp, synthetic construct
  source 1..28: mol_type = other DNA
atgttcatgtttcaggtagagagtaggg

SEQ ID NO: 5222 - DNA, 28 bp, synthetic construct
  source 1..28: mol_type = other DNA
caggtagagagtagggcatgctgtgtgg

SEQ ID NO: 5223 - DNA, 28 bp, synthetic construct
  source 1..28: mol_type = other DNA
aggtagagagtagggcatgctgtgtggg

SEQ ID NO: 5224 - DNA, 28 bp, synthetic construct
  source 1..28: mol_type = other DNA
ggtagagagtagggcatgctgtgtgggg

SEQ ID NO: 5225 - DNA, 28 bp, synthetic construct
  source 1..28: mol_type = other DNA
ccctcttccctcccctggtacccatagg

SEQ ID NO: 5226 - DNA, 28 bp, synthetic construct
  source 1..28: mol_type = other DNA
tcctatgggtaccaggggagggaagagg

SEQ ID NO: 5227 - DNA, 28 bp, synthetic construct
  source 1..28: mol_type = other DNA
cttccctcccctggtacccataggatgg

SEQ ID NO: 5228 - DNA, 28 bp, synthetic construct
  source 1..28: mol_type = other DNA
attccatcctatgggtaccaggggaggg

SEQ ID NO: 5229 - DNA, 28 bp, synthetic construct
  source 1..28: mol_type = other DNA
cattccatcctatgggtaccaggggagg

SEQ ID NO: 5230 - DNA, 28 bp, synthetic construct
  source 1..28: mol_type = other DNA
cagcattccatcctatgggtaccagggg

SEQ ID NO: 5231 - DNA, 28 bp, synthetic construct
  source 1..28: mol_type = other DNA
ccctggtacccataggatggaatgctgg

SEQ ID NO: 5232 - DNA, 28 bp, synthetic construct
  source 1..28: mol_type = other DNA
tccagcattccatcctatgggtaccagg

SEQ ID NO: 5233 - DNA, 28 bp, synthetic construct
  source 1..28: mol_type = other DNA
atgtctgtccagcattccatcctatggg

SEQ ID NO: 5234 - DNA, 28 bp, synthetic construct
  source 1..28: mol_type = other DNA
catgtctgtccagcattccatcctatgg

SEQ ID NO: 5235 - DNA, 28 bp, synthetic construct
  source 1..28: mol_type = other DNA
gctggacagacatgagttcctgacctgg

SEQ ID NO: 5236 - DNA, 28 bp, synthetic construct
  source 1..28: mol_type = other DNA
ctggacagacatgagttcctgacctggg

SEQ ID NO: 5237 - DNA, 28 bp, synthetic construct
  source 1..28: mol_type = other DNA
ctcaaaacactcaagcacccaggtcagg

SEQ ID NO: 5238 - DNA, 28 bp, synthetic construct
  source 1..28: mol_type = other DNA
atcttctcaaaacactcaagcacccagg

SEQ ID NO: 5239 - DNA, 28 bp, synthetic construct
  source 1..28: mol_type = other DNA
ttgagtgttttgagaagatccgccctgg

SEQ ID NO: 5240 - DNA, 28 bp, synthetic construct
  source 1..28: mol_type = other DNA
tgttttgagaagatccgccctggagagg

SEQ ID NO: 5241 - DNA, 28 bp, synthetic construct
  source 1..28: mol_type = other DNA
tttaagcaattcatcctctccagggcgg

SEQ ID NO: 5242 - DNA, 28 bp, synthetic construct
  source 1..28: mol_type = other DNA
cagtttaagcaattcatcctctccaggg

SEQ ID NO: 5243 - DNA, 28 bp, synthetic construct
  source 1..28: mol_type = other DNA
gcagtttaagcaattcatcctctccagg

SEQ ID NO: 5244 - DNA, 28 bp, synthetic construct
  source 1..28: mol_type = other DNA
gctgctgcctctgcttctccgagtaagg

SEQ ID NO: 5245 - DNA, 28 bp, synthetic construct
  source 1..28: mol_type = other DNA
tgcctctgcttctccgagtaaggcttgg

SEQ ID NO: 5246 - DNA, 28 bp, synthetic construct
  source 1..28: mol_type = other DNA
ttccaagccttactcggagaagcagagg

SEQ ID NO: 5247 - DNA, 28 bp, synthetic construct
  source 1..28: mol_type = other DNA
cttctccgagtaaggcttggaattttgg

SEQ ID NO: 5248 - DNA, 28 bp, synthetic construct
  source 1..28: mol_type = other DNA
cagtaccaaaattccaagccttactcgg

SEQ ID NO: 5249 - DNA, 28 bp, synthetic construct
  source 1..28: mol_type = other DNA
cgagtaaggcttggaattttggtactgg

SEQ ID NO: 5250 - DNA, 28 bp, synthetic construct
  source 1..28: mol_type = other DNA
tgatggtcgtgtcttcacagtactctgg

SEQ ID NO: 5251 - DNA, 28 bp, synthetic construct
  source 1..28: mol_type = other DNA
gatggtcgtgtcttcacagtactctggg

SEQ ID NO: 5252 - DNA, 28 bp, synthetic construct
  source 1..28: mol_type = other DNA
atggtcgtgtcttcacagtactctgggg

SEQ ID NO: 5253 - DNA, 28 bp, synthetic construct
  source 1..28: mol_type = other DNA
tgttcagtctgcatacctgtcccgccgg

SEQ ID NO: 5254 - DNA, 28 bp, synthetic construct
  source 1..28: mol_type = other DNA
acagaagtaggcaagccggcgggacagg

SEQ ID NO: 5255 - DNA, 28 bp, synthetic construct
  source 1..28: mol_type = other DNA
cgtgtacagaagtaggcaagccggcggg

SEQ ID NO: 5256 - DNA, 28 bp, synthetic construct
  source 1..28: mol_type = other DNA
ccgccggcttgcctacttctgtacacgg

SEQ ID NO: 5257 - DNA, 28 bp, synthetic construct
  source 1..28: mol_type = other DNA
tctccgtgtacagaagtaggcaagccgg

SEQ ID NO: 5258 - DNA, 28 bp, synthetic construct
  source 1..28: mol_type = other DNA
cttgcctacttctgtacacggagactgg

SEQ ID NO: 5259 - DNA, 28 bp, synthetic construct
  source 1..28: mol_type = other DNA
agggccagtctccgtgtacagaagtagg

SEQ ID NO: 5260 - DNA, 28 bp, synthetic construct
  source 1..28: mol_type = other DNA
tgtacacggagactggccctgcagctgg

SEQ ID NO: 5261 - DNA, 28 bp, synthetic construct
  source 1..28: mol_type = other DNA
cacggagactggccctgcagctggatgg

SEQ ID NO: 5262 - DNA, 28 bp, synthetic construct
  source 1..28: mol_type = other DNA
tgactgctcacaccatccagctgcaggg

SEQ ID NO: 5263 - DNA, 28 bp, synthetic construct
  source 1..28: mol_type = other DNA
gtgactgctcacaccatccagctgcagg

SEQ ID NO: 5264 - DNA, 28 bp, synthetic construct
  source 1..28: mol_type = other DNA
ttgggggctgaggagcaggggtggtggg

SEQ ID NO: 5265 - DNA, 28 bp, synthetic construct
  source 1..28: mol_type = other DNA
gttgggggctgaggagcaggggtggtgg

SEQ ID NO: 5266 - DNA, 28 bp, synthetic construct
  source 1..28: mol_type = other DNA
ctagttgggggctgaggagcaggggtgg

SEQ ID NO: 5267 - DNA, 28 bp, synthetic construct
  source 1..28: mol_type = other DNA
ctgctagttgggggctgaggagcagggg

SEQ ID NO: 5268 - DNA, 28 bp, synthetic construct
  source 1..28: mol_type = other DNA
gctgctagttgggggctgaggagcaggg

SEQ ID NO: 5269 - DNA, 28 bp, synthetic construct
  source 1..28: mol_type = other DNA
tgctgctagttgggggctgaggagcagg

SEQ ID NO: 5270 - DNA, 28 bp, synthetic construct
  source 1..28: mol_type = other DNA
agggtgtgctgctagttgggggctgagg

SEQ ID NO: 5271 - DNA, 28 bp, synthetic construct
  source 1..28: mol_type = other DNA
gagtcgagggtgtgctgctagttggggg

SEQ ID NO: 5272 - DNA, 28 bp, synthetic construct
  source 1..28: mol_type = other DNA
ggagtcgagggtgtgctgctagttgggg

SEQ ID NO: 5273 - DNA, 28 bp, synthetic construct
  source 1..28: mol_type = other DNA
gggagtcgagggtgtgctgctagttggg

SEQ ID NO: 5274 - DNA, 28 bp, synthetic construct
  source 1..28: mol_type = other DNA
agggagtcgagggtgtgctgctagttgg

SEQ ID NO: 5275 - DNA, 28 bp, synthetic construct
  source 1..28: mol_type = other DNA
taagcaggtcactaaagggagtcgaggg

SEQ ID NO: 5276 - DNA, 28 bp, synthetic construct
  source 1..28: mol_type = other DNA
ataagcaggtcactaaagggagtcgagg

SEQ ID NO: 5277 - DNA, 28 bp, synthetic construct
  source 1..28: mol_type = other DNA
gagggcacataagcaggtcactaaaggg

SEQ ID NO: 5278 - DNA, 28 bp, synthetic construct
  source 1..28: mol_type = other DNA
tgagggcacataagcaggtcactaaagg

SEQ ID NO: 5279 - DNA, 28 bp, synthetic construct
  source 1..28: mol_type = other DNA
tgacctgcttatgtgccctcagcaccgg

SEQ ID NO: 5280 - DNA, 28 bp, synthetic construct
  source 1..28: mol_type = other DNA
gggccggtgctgagggcacataagcagg

SEQ ID NO: 5281 - DNA, 28 bp, synthetic construct
  source 1..28: mol_type = other DNA
cttatgtgccctcagcaccggcccctgg

SEQ ID NO: 5282 - DNA, 28 bp, synthetic construct
  source 1..28: mol_type = other DNA
gccctcagcaccggcccctggtttttgg

SEQ ID NO: 5283 - DNA, 28 bp, synthetic construct
  source 1..28: mol_type = other DNA
gccaaaaaccaggggccggtgctgaggg

SEQ ID NO: 5284 - DNA, 28 bp, synthetic construct
  source 1..28: mol_type = other DNA
ggccaaaaaccaggggccggtgctgagg

SEQ ID NO: 5285 - DNA, 28 bp, synthetic construct
  source 1..28: mol_type = other DNA
acagctgaggccaaaaaccaggggccgg

SEQ ID NO: 5286 - DNA, 28 bp, synthetic construct
  source 1..28: mol_type = other DNA
ggatacagctgaggccaaaaaccagggg

SEQ ID NO: 5287 - DNA, 28 bp, synthetic construct
  source 1..28: mol_type = other DNA
aggatacagctgaggccaaaaaccaggg

SEQ ID NO: 5288 - DNA, 28 bp, synthetic construct
  source 1..28: mol_type = other DNA
taggatacagctgaggccaaaaaccagg

SEQ ID NO: 5289 - DNA, 28 bp, synthetic construct
  source 1..28: mol_type = other DNA
gtttttggcctcagctgtatcctacagg

SEQ ID NO: 5290 - DNA, 28 bp, synthetic construct
  source 1..28: mol_type = other DNA
ttggcctcagctgtatcctacaggtagg

SEQ ID NO: 5291 - DNA, 28 bp, synthetic construct
  source 1..28: mol_type = other DNA
agtacctacctgtaggatacagctgagg

SEQ ID NO: 5292 - DNA, 28 bp, synthetic construct
  source 1..28: mol_type = other DNA
cagctgtatcctacaggtaggtactagg

SEQ ID NO: 5293 - DNA, 28 bp, synthetic construct
  source 1..28: mol_type = other DNA
ctgtatcctacaggtaggtactaggcgg

SEQ ID NO: 5294 - DNA, 28 bp, synthetic construct
  source 1..28: mol_type = other DNA
tgtatcctacaggtaggtactaggcggg

SEQ ID NO: 5295 - DNA, 28 bp, synthetic construct
  source 1..28: mol_type = other DNA
ttgggcccgcctagtacctacctgtagg

SEQ ID NO: 5296 - DNA, 28 bp, synthetic construct
  source 1..28: mol_type = other DNA
tacaggtaggtactaggcgggcccaagg

SEQ ID NO: 5297 - DNA, 28 bp, synthetic construct
  source 1..28: mol_type = other DNA
aaggcactaggacagcacaggaggatgg

SEQ ID NO: 5298 - DNA, 28 bp, synthetic construct
  source 1..28: mol_type = other DNA
atcctcctgtgctgtcctagtgccttgg

SEQ ID NO: 5299 - DNA, 28 bp, synthetic construct
  source 1..28: mol_type = other DNA
aaccaaggcactaggacagcacaggagg

SEQ ID NO: 5300 - DNA, 28 bp, synthetic construct
  source 1..28: mol_type = other DNA
cctgtgctgtcctagtgccttggtttgg

SEQ ID NO: 5301 - DNA, 28 bp, synthetic construct
  source 1..28: mol_type = other DNA
gtgagtagtgccaaaccaaggcactagg

SEQ ID NO: 5302 - DNA, 28 bp, synthetic construct
  source 1..28: mol_type = other DNA
tcagtcagtgagtagtgccaaaccaagg

SEQ ID NO: 5303 - DNA, 28 bp, synthetic construct
  source 1..28: mol_type = other DNA
cactgactgatagcagaattaagaccgg

SEQ ID NO: 5304 - DNA, 28 bp, synthetic construct
  source 1..28: mol_type = other DNA
ataggcaagtggtcaagtggtgagccgg

SEQ ID NO: 5305 - DNA, 28 bp, synthetic construct
  source 1..28: mol_type = other DNA
acggggcaataggcaagtggtcaagtgg

SEQ ID NO: 5306 - DNA, 28 bp, synthetic construct
  source 1..28: mol_type = other DNA
caggttggacggggcaataggcaagtgg

SEQ ID NO: 5307 - DNA, 28 bp, synthetic construct
  source 1..28: mol_type = other DNA
gcatgggcaggttggacggggcaatagg

SEQ ID NO: 5308 - DNA, 28 bp, synthetic construct
  source 1..28: mol_type = other DNA
gccccgtccaacctgcccatgccagagg

SEQ ID NO: 5309 - DNA, 28 bp, synthetic construct
  source 1..28: mol_type = other DNA
ccccgtccaacctgcccatgccagaggg

SEQ ID NO: 5310 - DNA, 28 bp, synthetic construct
  source 1..28: mol_type = other DNA
accctctggcatgggcaggttggacggg

SEQ ID NO: 5311 - DNA, 28 bp, synthetic construct
  source 1..28: mol_type = other DNA
taccctctggcatgggcaggttggacgg

SEQ ID NO: 5312 - DNA, 28 bp, synthetic construct
  source 1..28: mol_type = other DNA
ctgttaccctctggcatgggcaggttgg

SEQ ID NO: 5313 - DNA, 28 bp, synthetic construct
  source 1..28: mol_type = other DNA
ggcactgttaccctctggcatgggcagg

SEQ ID NO: 5314 - DNA, 28 bp, synthetic construct
  source 1..28: mol_type = other DNA
tgaaggcactgttaccctctggcatggg

SEQ ID NO: 5315 - DNA, 28 bp, synthetic construct
  source 1..28: mol_type = other DNA
gtgaaggcactgttaccctctggcatgg

SEQ ID NO: 5316 - DNA, 28 bp, synthetic construct
  source 1..28: mol_type = other DNA
gctgagtgaaggcactgttaccctctgg

SEQ ID NO: 5317 - DNA, 28 bp, synthetic construct
  source 1..28: mol_type = other DNA
gagggtaacagtgccttcactcagcagg

SEQ ID NO: 5318 - DNA, 28 bp, synthetic construct
  source 1..28: mol_type = other DNA
gtggtcagacatacctgctgagtgaagg

SEQ ID NO: 5319 - DNA, 28 bp, synthetic construct
  source 1..28: mol_type = other DNA
cagcaggtatgtctgaccactagcctgg

SEQ ID NO: 5320 - DNA, 28 bp, synthetic construct
  source 1..28: mol_type = other DNA
ttgtagccttcctttttaacattgcagg

SEQ ID NO: 5321 - DNA, 28 bp, synthetic construct
  source 1..28: mol_type = other DNA
cacggacctgcaatgttaaaaaggaagg

SEQ ID NO: 5322 - DNA, 28 bp, synthetic construct
  source 1..28: mol_type = other DNA
tttgcacggacctgcaatgttaaaaagg

SEQ ID NO: 5323 - DNA, 28 bp, synthetic construct
  source 1..28: mol_type = other DNA
aacattgcaggtccgtgcaaagttgcgg

SEQ ID NO: 5324 - DNA, 28 bp, synthetic construct
  source 1..28: mol_type = other DNA
acattgcaggtccgtgcaaagttgcggg

SEQ ID NO: 5325 - DNA, 28 bp, synthetic construct
  source 1..28: mol_type = other DNA
ctgctcgatctcccgcaactttgcacgg

SEQ ID NO: 5326 - DNA, 28 bp, synthetic construct
  source 1..28: mol_type = other DNA
ttgcgggagatcgagcagcagatcaagg

SEQ ID NO: 5327 - DNA, 28 bp, synthetic construct
  source 1..28: mol_type = other DNA
ggagatcgagcagcagatcaaggagcgg

SEQ ID NO: 5328 - DNA, 28 bp, synthetic construct
  source 1..28: mol_type = other DNA
gagatcgagcagcagatcaaggagcggg

SEQ ID NO: 5329 - DNA, 28 bp, synthetic construct
  source 1..28: mol_type = other DNA
agatcgagcagcagatcaaggagcgggg

SEQ ID NO: 5330 - DNA, 28 bp, synthetic construct
  source 1..28: mol_type = other DNA
gagcagcagatcaaggagcggggacagg

SEQ ID NO: 5331 - DNA, 28 bp, synthetic construct
  source 1..28: mol_type = other DNA
gcggggacaggcagttgaagttcgctgg

SEQ ID NO: 5332 - DNA, 28 bp, synthetic construct
  source 1..28: mol_type = other DNA
gttcgctggtctttcgataaatgccagg

SEQ ID NO: 5333 - DNA, 28 bp, synthetic construct
  source 1..28: mol_type = other DNA
tcgataaatgccaggaagctactgcagg

SEQ ID NO: 5334 - DNA, 28 bp, synthetic construct
  source 1..28: mol_type = other DNA
ctgacacatacctgcagtagcttcctgg

SEQ ID NO: 5335 - DNA, 28 bp, synthetic construct
  source 1..28: mol_type = other DNA
aggtatgtgtcagagaacagataatagg

SEQ ID NO: 5336 - DNA, 28 bp, synthetic construct
  source 1..28: mol_type = other DNA
gtcccctttaccacttttcctccttagg

SEQ ID NO: 5337 - DNA, 28 bp, synthetic construct
  source 1..28: mol_type = other DNA
agcctaaggaggaaaagtggtaaagggg

SEQ ID NO: 5338 - DNA, 28 bp, synthetic construct
  source 1..28: mol_type = other DNA
aagcctaaggaggaaaagtggtaaaggg

SEQ ID NO: 5339 - DNA, 28 bp, synthetic construct
  source 1..28: mol_type = other DNA
gaagcctaaggaggaaaagtggtaaagg

SEQ ID NO: 5340 - DNA, 28 bp, synthetic construct
  source 1..28: mol_type = other DNA
aatggtgaagcctaaggaggaaaagtgg

SEQ ID NO: 5341 - DNA, 28 bp, synthetic construct
  source 1..28: mol_type = other DNA
acttttcctccttaggcttcaccattgg

SEQ ID NO: 5342 - DNA, 28 bp, synthetic construct
  source 1..28: mol_type = other DNA
ttcctccttaggcttcaccattggacgg

SEQ ID NO: 5343 - DNA, 28 bp, synthetic construct
  source 1..28: mol_type = other DNA
tcctccttaggcttcaccattggacggg

SEQ ID NO: 5344 - DNA, 28 bp, synthetic construct
  source 1..28: mol_type = other DNA
acccgtccaatggtgaagcctaaggagg

SEQ ID NO: 5345 - DNA, 28 bp, synthetic construct
  source 1..28: mol_type = other DNA
agtacccgtccaatggtgaagcctaagg

SEQ ID NO: 5346 - DNA, 28 bp, synthetic construct
  source 1..28: mol_type = other DNA
accattggacgggtacttcatactttgg

SEQ ID NO: 5347 - DNA, 28 bp, synthetic construct
  source 1..28: mol_type = other DNA
tccaaagtatgaagtacccgtccaatgg

SEQ ID NO: 5348 - DNA, 28 bp, synthetic construct
  source 1..28: mol_type = other DNA
cgggtacttcatactttggaagtgctgg

SEQ ID NO: 5349 - DNA, 28 bp, synthetic construct
  source 1..28: mol_type = other DNA
gctgaagtcagagcgttcaaaactatgg

SEQ ID NO: 5350 - DNA, 28 bp, synthetic construct
  source 1..28: mol_type = other DNA
ttgactccctttgtaaccgaatctttgg

SEQ ID NO: 5351 - DNA, 28 bp, synthetic construct
  source 1..28: mol_type = other DNA
tccctttgtaaccgaatctttggattgg

SEQ ID NO: 5352 - DNA, 28 bp, synthetic construct
  source 1..28: mol_type = other DNA
ccctttgtaaccgaatctttggattggg

SEQ ID NO: 5353 - DNA, 28 bp, synthetic construct
  source 1..28: mol_type = other DNA
tcccaatccaaagattcggttacaaagg

SEQ ID NO: 5354 - DNA, 28 bp, synthetic construct
  source 1..28: mol_type = other DNA
cttgctaggtcccaatccaaagattcgg

SEQ ID NO: 5355 - DNA, 28 bp, synthetic construct
  source 1..28: mol_type = other DNA
cgaatctttggattgggacctagcaagg

SEQ ID NO: 5356 - DNA, 28 bp, synthetic construct
  source 1..28: mol_type = other DNA
tctttggattgggacctagcaaggatgg

SEQ ID NO: 5357 - DNA, 28 bp, synthetic construct
  source 1..28: mol_type = other DNA
ctttggattgggacctagcaaggatggg

SEQ ID NO: 5358 - DNA, 28 bp, synthetic construct
  source 1..28: mol_type = other DNA
ttgggacctagcaaggatgggcatgagg

SEQ ID NO: 5359 - DNA, 28 bp, synthetic construct
  source 1..28: mol_type = other DNA
cgcttacctcatgcccatccttgctagg

SEQ ID NO: 5360 - DNA, 28 bp, synthetic construct
  source 1..28: mol_type = other DNA
aaggatgggcatgaggtaagcgaaaagg

SEQ ID NO: 5361 - DNA, 28 bp, synthetic construct
  source 1..28: mol_type = other DNA
aggatgggcatgaggtaagcgaaaaggg

SEQ ID NO: 5362 - DNA, 28 bp, synthetic construct
  source 1..28: mol_type = other DNA
ggatgggcatgaggtaagcgaaaagggg

SEQ ID NO: 5363 - DNA, 28 bp, synthetic construct
  source 1..28: mol_type = other DNA
tgaggtaagcgaaaaggggaatagaagg

SEQ ID NO: 5364 - DNA, 28 bp, synthetic construct
  source 1..28: mol_type = other DNA
atctggagaacaaaggaagagaaggagg

SEQ ID NO: 5365 - DNA, 28 bp, synthetic construct
  source 1..28: mol_type = other DNA
gagatctggagaacaaaggaagagaagg

SEQ ID NO: 5366 - DNA, 28 bp, synthetic construct
  source 1..28: mol_type = other DNA
tcatctgaggagatctggagaacaaagg

SEQ ID NO: 5367 - DNA, 28 bp, synthetic construct
  source 1..28: mol_type = other DNA
cacagcatcatcatctgaggagatctgg

SEQ ID NO: 5368 - DNA, 28 bp, synthetic construct
  source 1..28: mol_type = other DNA
cagatctcctcagatgatgatgctgtgg

SEQ ID NO: 5369 - DNA, 28 bp, synthetic construct
  source 1..28: mol_type = other DNA
aatgacaccacagcatcatcatctgagg

SEQ ID NO: 5370 - DNA, 28 bp, synthetic construct
  source 1..28: mol_type = other DNA
tgctgtggtgtcattgctatgtgaatgg

SEQ ID NO: 5371 - DNA, 28 bp, synthetic construct
  source 1..28: mol_type = other DNA
gctgtggtgtcattgctatgtgaatggg

SEQ ID NO: 5372 - DNA, 28 bp, synthetic construct
  source 1..28: mol_type = other DNA
aatgggctgtcagctgcaagcgttctgg

SEQ ID NO: 5373 - DNA, 28 bp, synthetic construct
  source 1..28: mol_type = other DNA
ggctgtcagctgcaagcgttctggtcgg

SEQ ID NO: 5374 - DNA, 28 bp, synthetic construct
  source 1..28: mol_type = other DNA
aagcgttctggtcggcatcgtgctatgg

SEQ ID NO: 5375 - DNA, 28 bp, synthetic construct
  source 1..28: mol_type = other DNA
cgttctggtcggcatcgtgctatggtgg

SEQ ID NO: 5376 - DNA, 28 bp, synthetic construct
  source 1..28: mol_type = other DNA
cgtgctatggtggtagccaagctcctgg

SEQ ID NO: 5377 - DNA, 28 bp, synthetic construct
  source 1..28: mol_type = other DNA
gtagccaagctcctggagaagagacagg

SEQ ID NO: 5378 - DNA, 28 bp, synthetic construct
  source 1..28: mol_type = other DNA
gccaagctcctggagaagagacaggcgg

SEQ ID NO: 5379 - DNA, 28 bp, synthetic construct
  source 1..28: mol_type = other DNA
tccgcctgtctcttctccaggagcttgg

SEQ ID NO: 5380 - DNA, 28 bp, synthetic construct
  source 1..28: mol_type = other DNA
ctcaatctccgcctgtctcttctccagg

SEQ ID NO: 5381 - DNA, 28 bp, synthetic construct
  source 1..28: mol_type = other DNA
ctggagaagagacaggcggagattgagg

SEQ ID NO: 5382 - DNA, 28 bp, synthetic construct
  source 1..28: mol_type = other DNA
aagagacaggcggagattgaggctgagg

SEQ ID NO: 5383 - DNA, 28 bp, synthetic construct
  source 1..28: mol_type = other DNA
aggcggagattgaggctgaggttagagg

SEQ ID NO: 5384 - DNA, 28 bp, synthetic construct
  source 1..28: mol_type = other DNA
ggcggagattgaggctgaggttagaggg

SEQ ID NO: 5385 - DNA, 28 bp, synthetic construct
  source 1..28: mol_type = other DNA
tttgttctgtcatcttgcagcgttgtgg

SEQ ID NO: 5386 - DNA, 28 bp, synthetic construct
  source 1..28: mol_type = other DNA
ggagaatcagaagccgcagatgagaagg

SEQ ID NO: 5387 - DNA, 28 bp, synthetic construct
  source 1..28: mol_type = other DNA
gagaatcagaagccgcagatgagaaggg

SEQ ID NO: 5388 - DNA, 28 bp, synthetic construct
  source 1..28: mol_type = other DNA
gaggcgatggaacccttctcatctgcgg

SEQ ID NO: 5389 - DNA, 28 bp, synthetic construct
  source 1..28: mol_type = other DNA
cagatgagaagggttccatcgcctctgg

SEQ ID NO: 5390 - DNA, 28 bp, synthetic construct
  source 1..28: mol_type = other DNA
ggagcagaaagggagccagaggcgatgg

SEQ ID NO: 5391 - DNA, 28 bp, synthetic construct
  source 1..28: mol_type = other DNA
gcactgggagcagaaagggagccagagg

SEQ ID NO: 5392 - DNA, 28 bp, synthetic construct
  source 1..28: mol_type = other DNA
aaaatgggagcactgggagcagaaaggg

SEQ ID NO: 5393 - DNA, 28 bp, synthetic construct
  source 1..28: mol_type = other DNA
gaaaatgggagcactgggagcagaaagg

SEQ ID NO: 5394 - DNA, 28 bp, synthetic construct
  source 1..28: mol_type = other DNA
tctgctcccagtgctcccattttccagg

SEQ ID NO: 5395 - DNA, 28 bp, synthetic construct
  source 1..28: mol_type = other DNA
ggacatcctggaaaatgggagcactggg

SEQ ID NO: 5396 - DNA, 28 bp, synthetic construct
  source 1..28: mol_type = other DNA
aggacatcctggaaaatgggagcactgg

SEQ ID NO: 5397 - DNA, 28 bp, synthetic construct
  source 1..28: mol_type = other DNA
actgcaggaggacatcctggaaaatggg

SEQ ID NO: 5398 - DNA, 28 bp, synthetic construct
  source 1..28: mol_type = other DNA
aactgcaggaggacatcctggaaaatgg

SEQ ID NO: 5399 - DNA, 28 bp, synthetic construct
  source 1..28: mol_type = other DNA
ttccaggatgtcctcctgcagtttctgg

SEQ ID NO: 5400 - DNA, 28 bp, synthetic construct
  source 1..28: mol_type = other DNA
atccagaaactgcaggaggacatcctgg

SEQ ID NO: 5401 - DNA, 28 bp, synthetic construct
  source 1..28: mol_type = other DNA
gtcctcctgcagtttctggatacacagg

SEQ ID NO: 5402 - DNA, 28 bp, synthetic construct
  source 1..28: mol_type = other DNA
agcctgtgtatccagaaactgcaggagg

SEQ ID NO: 5403 - DNA, 28 bp, synthetic construct
  source 1..28: mol_type = other DNA
gggagcctgtgtatccagaaactgcagg

SEQ ID NO: 5404 - DNA, 28 bp, synthetic construct
  source 1..28: mol_type = other DNA
gatacacaggctcccatgctgagtacgg

SEQ ID NO: 5405 - DNA, 28 bp, synthetic construct
  source 1..28: mol_type = other DNA
agtggtaggggtccgtactcagcatggg

SEQ ID NO: 5406 - DNA, 28 bp, synthetic construct
  source 1..28: mol_type = other DNA
gagtggtaggggtccgtactcagcatgg

SEQ ID NO: 5407 - DNA, 28 bp, synthetic construct
  source 1..28: mol_type = other DNA
atgtttcctcattcccttcctccagcgg

SEQ ID NO: 5408 - DNA, 28 bp, synthetic construct
  source 1..28: mol_type = other DNA
gagggtccgctggaggaagggaatgagg

SEQ ID NO: 5409 - DNA, 28 bp, synthetic construct
  source 1..28: mol_type = other DNA
tcacttcgagggtccgctggaggaaggg

SEQ ID NO: 5410 - DNA, 28 bp, synthetic construct
  source 1..28: mol_type = other DNA
ctcacttcgagggtccgctggaggaagg

SEQ ID NO: 5411 - DNA, 28 bp, synthetic construct
  source 1..28: mol_type = other DNA
cactctcacttcgagggtccgctggagg

SEQ ID NO: 5412 - DNA, 28 bp, synthetic construct
  source 1..28: mol_type = other DNA
gctcactctcacttcgagggtccgctgg

SEQ ID NO: 5413 - DNA, 28 bp, synthetic construct
  source 1..28: mol_type = other DNA
agcggaccctcgaagtgagagtgagcgg

SEQ ID NO: 5414 - DNA, 28 bp, synthetic construct
  source 1..28: mol_type = other DNA
gcggaccctcgaagtgagagtgagcggg

SEQ ID NO: 5415 - DNA, 28 bp, synthetic construct
  source 1..28: mol_type = other DNA
gaccctcgaagtgagagtgagcgggtgg

SEQ ID NO: 5416 - DNA, 28 bp, synthetic construct
  source 1..28: mol_type = other DNA
ttccacccgctcactctcacttcgaggg

SEQ ID NO: 5417 - DNA, 28 bp, synthetic construct
  source 1..28: mol_type = other DNA
attccacccgctcactctcacttcgagg

SEQ ID NO: 5418 - DNA, 28 bp, synthetic construct
  source 1..28: mol_type = other DNA
atgagagtgcaagtatacatgttgtggg

SEQ ID NO: 5419 - DNA, 28 bp, synthetic construct
  source 1..28: mol_type = other DNA
gatgagagtgcaagtatacatgttgtgg

SEQ ID NO: 5420 - DNA, 28 bp, synthetic construct
  source 1..28: mol_type = other DNA
tgtatacttgcactctcatctcccgagg

SEQ ID NO: 5421 - DNA, 28 bp, synthetic construct
  source 1..28: mol_type = other DNA
gtatacttgcactctcatctcccgaggg

SEQ ID NO: 5422 - DNA, 28 bp, synthetic construct
  source 1..28: mol_type = other DNA
tatacttgcactctcatctcccgagggg

SEQ ID NO: 5423 - DNA, 28 bp, synthetic construct
  source 1..28: mol_type = other DNA
tcatctcccgaggggaccttgcctttgg

SEQ ID NO: 5424 - DNA, 28 bp, synthetic construct
  source 1..28: mol_type = other DNA
ggggctccaaaggcaaggtcccctcggg

SEQ ID NO: 5425 - DNA, 28 bp, synthetic construct
  source 1..28: mol_type = other DNA
aggggctccaaaggcaaggtcccctcgg

SEQ ID NO: 5426 - DNA, 28 bp, synthetic construct
  source 1..28: mol_type = other DNA
gaggggaccttgcctttggagcccctgg

SEQ ID NO: 5427 - DNA, 28 bp, synthetic construct
  source 1..28: mol_type = other DNA
ccttgcctttggagcccctggtccccgg

SEQ ID NO: 5428 - DNA, 28 bp, synthetic construct
  source 1..28: mol_type = other DNA
ggaggccggggaccaggggctccaaagg

SEQ ID NO: 5429 - DNA, 28 bp, synthetic construct
  source 1..28: mol_type = other DNA
aagggagagggaggccggggaccagggg

SEQ ID NO: 5430 - DNA, 28 bp, synthetic construct
  source 1..28: mol_type = other DNA
aaagggagagggaggccggggaccaggg

SEQ ID NO: 5431 - DNA, 28 bp, synthetic construct
  source 1..28: mol_type = other DNA
caaagggagagggaggccggggaccagg

SEQ ID NO: 5432 - DNA, 28 bp, synthetic construct
  source 1..28: mol_type = other DNA
gatcatcaaagggagagggaggccgggg

SEQ ID NO: 5433 - DNA, 28 bp, synthetic construct
  source 1..28: mol_type = other DNA
ggatcatcaaagggagagggaggccggg

SEQ ID NO: 5434 - DNA, 28 bp, synthetic construct
  source 1..28: mol_type = other DNA
aggatcatcaaagggagagggaggccgg

SEQ ID NO: 5435 - DNA, 28 bp, synthetic construct
  source 1..28: mol_type = other DNA
cggcaggatcatcaaagggagagggagg

SEQ ID NO: 5436 - DNA, 28 bp, synthetic construct
  source 1..28: mol_type = other DNA
catcggcaggatcatcaaagggagaggg

SEQ ID NO: 5437 - DNA, 28 bp, synthetic construct
  source 1..28: mol_type = other DNA
tcatcggcaggatcatcaaagggagagg

SEQ ID NO: 5438 - DNA, 28 bp, synthetic construct
  source 1..28: mol_type = other DNA
ctgggtcatcggcaggatcatcaaaggg

SEQ ID NO: 5439 - DNA, 28 bp, synthetic construct
  source 1..28: mol_type = other DNA
tctgggtcatcggcaggatcatcaaagg

SEQ ID NO: 5440 - DNA, 28 bp, synthetic construct
  source 1..28: mol_type = other DNA
gatcctgccgatgacccagagcacaagg

SEQ ID NO: 5441 - DNA, 28 bp, synthetic construct
  source 1..28: mol_type = other DNA
cctgccgatgacccagagcacaaggagg

SEQ ID NO: 5442 - DNA, 28 bp, synthetic construct
  source 1..28: mol_type = other DNA
tcagcctccttgtgctctgggtcatcgg

SEQ ID NO: 5443 - DNA, 28 bp, synthetic construct
  source 1..28: mol_type = other DNA
atgacccagagcacaaggaggctgaagg

SEQ ID NO: 5444 - DNA, 28 bp, synthetic construct
  source 1..28: mol_type = other DNA
gctgccttcagcctccttgtgctctggg

SEQ ID NO: 5445 - DNA, 28 bp, synthetic construct
  source 1..28: mol_type = other DNA
tgctgccttcagcctccttgtgctctgg

SEQ ID NO: 5446 - DNA, 28 bp, synthetic construct
  source 1..28: mol_type = other DNA
gctgaaggcagcagcagcagcaagctgg

SEQ ID NO: 5447 - DNA, 28 bp, synthetic construct
  source 1..28: mol_type = other DNA
gcagcagcagcaagctggaagtgagtgg

SEQ ID NO: 5448 - DNA, 28 bp, synthetic construct
  source 1..28: mol_type = other DNA
cagcagcagcaagctggaagtgagtggg

SEQ ID NO: 5449 - DNA, 28 bp, synthetic construct
  source 1..28: mol_type = other DNA
aacttcgcttatgttctatgccctcagg

SEQ ID NO: 5450 - DNA, 28 bp, synthetic construct
  source 1..28: mol_type = other DNA
cttatgttctatgccctcaggatccagg

SEQ ID NO: 5451 - DNA, 28 bp, synthetic construct
  source 1..28: mol_type = other DNA
ttatgttctatgccctcaggatccaggg

SEQ ID NO: 5452 - DNA, 28 bp, synthetic construct
  source 1..28: mol_type = other DNA
agattctgagagccctggatcctgaggg

SEQ ID NO: 5453 - DNA, 28 bp, synthetic construct
  source 1..28: mol_type = other DNA
tagattctgagagccctggatcctgagg

SEQ ID NO: 5454 - DNA, 28 bp, synthetic construct
  source 1..28: mol_type = other DNA
caggatccagggctctcagaatctatgg

SEQ ID NO: 5455 - DNA, 28 bp, synthetic construct
  source 1..28: mol_type = other DNA
caatgtccatagattctgagagccctgg

SEQ ID NO: 5456 - DNA, 28 bp, synthetic construct
  source 1..28: mol_type = other DNA
gaccctagttccagtgttctctttgagg

SEQ ID NO: 5457 - DNA, 28 bp, synthetic construct
  source 1..28: mol_type = other DNA
gtcctcaaagagaacactggaactaggg

SEQ ID NO: 5458 - DNA, 28 bp, synthetic construct
  source 1..28: mol_type = other DNA
tgtcctcaaagagaacactggaactagg

SEQ ID NO: 5459 - DNA, 28 bp, synthetic construct
  source 1..28: mol_type = other DNA
agttccagtgttctctttgaggacatgg

SEQ ID NO: 5460 - DNA, 28 bp, synthetic construct
  source 1..28: mol_type = other DNA
ttctccatgtcctcaaagagaacactgg

SEQ ID NO: 5461 - DNA, 28 bp, synthetic construct
  source 1..28: mol_type = other DNA
tcaggattgaacttactgagaaatcagg

SEQ ID NO: 5462 - DNA, 28 bp, synthetic construct
  source 1..28: mol_type = other DNA
ttctcagtaagttcaatcctgagcgtgg

SEQ ID NO: 5463 - DNA, 28 bp, synthetic construct
  source 1..28: mol_type = other DNA
tagtaggggagaacaactgagagaaagg

SEQ ID NO: 5464 - DNA, 28 bp, synthetic construct
  source 1..28: mol_type = other DNA
ttgttctcccctactatgccctgtgagg

SEQ ID NO: 5465 - DNA, 28 bp, synthetic construct
  source 1..28: mol_type = other DNA
tgttctcccctactatgccctgtgaggg

SEQ ID NO: 5466 - DNA, 28 bp, synthetic construct
  source 1..28: mol_type = other DNA
gttctcccctactatgccctgtgagggg

SEQ ID NO: 5467 - DNA, 28 bp, synthetic construct
  source 1..28: mol_type = other DNA
tcccctactatgccctgtgaggggaagg

SEQ ID NO: 5468 - DNA, 28 bp, synthetic construct
  source 1..28: mol_type = other DNA
cccctactatgccctgtgaggggaaggg

SEQ ID NO: 5469 - DNA, 28 bp, synthetic construct
  source 1..28: mol_type = other DNA
gcccttcccctcacagggcatagtaggg

SEQ ID NO: 5470 - DNA, 28 bp, synthetic construct
  source 1..28: mol_type = other DNA
tgcccttcccctcacagggcatagtagg

SEQ ID NO: 5471 - DNA, 28 bp, synthetic construct
  source 1..28: mol_type = other DNA
gggatggactgcccttcccctcacaggg

SEQ ID NO: 5472 - DNA, 28 bp, synthetic construct
  source 1..28: mol_type = other DNA
ggggatggactgcccttcccctcacagg

SEQ ID NO: 5473 - DNA, 28 bp, synthetic construct
  source 1..28: mol_type = other DNA
tctcgacatctggcttctcaggggatgg

SEQ ID NO: 5474 - DNA, 28 bp, synthetic construct
  source 1..28: mol_type = other DNA
tcccctgagaagccagatgtcgagaagg

SEQ ID NO: 5475 - DNA, 28 bp, synthetic construct
  source 1..28: mol_type = other DNA
tccttctcgacatctggcttctcagggg

SEQ ID NO: 5476 - DNA, 28 bp, synthetic construct
  source 1..28: mol_type = other DNA
ctccttctcgacatctggcttctcaggg

SEQ ID NO: 5477 - DNA, 28 bp, synthetic construct
  source 1..28: mol_type = other DNA
cctgagaagccagatgtcgagaaggagg

SEQ ID NO: 5478 - DNA, 28 bp, synthetic construct
  source 1..28: mol_type = other DNA
ggggcttcacctccttctcgacatctgg

SEQ ID NO: 5479 - DNA, 28 bp, synthetic construct
  source 1..28: mol_type = other DNA
gagaaggaggtgaagcccccacccaagg

SEQ ID NO: 5480 - DNA, 28 bp, synthetic construct
  source 1..28: mol_type = other DNA
agcccccacccaaggagaagattgaagg

SEQ ID NO: 5481 - DNA, 28 bp, synthetic construct
  source 1..28: mol_type = other DNA
gcccccacccaaggagaagattgaaggg

SEQ ID NO: 5482 - DNA, 28 bp, synthetic construct
  source 1..28: mol_type = other DNA
tcccttcaatcttctccttgggtggggg

SEQ ID NO: 5483 - DNA, 28 bp, synthetic construct
  source 1..28: mol_type = other DNA
gtcccttcaatcttctccttgggtgggg

SEQ ID NO: 5484 - DNA, 28 bp, synthetic construct
  source 1..28: mol_type = other DNA
ggtcccttcaatcttctccttgggtggg

SEQ ID NO: 5485 - DNA, 28 bp, synthetic construct
  source 1..28: mol_type = other DNA
gggtcccttcaatcttctccttgggtgg

SEQ ID NO: 5486 - DNA, 28 bp, synthetic construct
  source 1..28: mol_type = other DNA
caagggtcccttcaatcttctccttggg

SEQ ID NO: 5487 - DNA, 28 bp, synthetic construct
  source 1..28: mol_type = other DNA
ccaaggagaagattgaagggacccttgg

SEQ ID NO: 5488 - DNA, 28 bp, synthetic construct
  source 1..28: mol_type = other DNA
caaggagaagattgaagggacccttggg

SEQ ID NO: 5489 - DNA, 28 bp, synthetic construct
  source 1..28: mol_type = other DNA
aaggagaagattgaagggacccttgggg

SEQ ID NO: 5490 - DNA, 28 bp, synthetic construct
  source 1..28: mol_type = other DNA
cgtggctggtcgtaaagaaccccaaggg

SEQ ID NO: 5491 - DNA, 28 bp, synthetic construct
  source 1..28: mol_type = other DNA
tcgtggctggtcgtaaagaaccccaagg

SEQ ID NO: 5492 - DNA, 28 bp, synthetic construct
  source 1..28: mol_type = other DNA
ggtggcgtactgcacgtgtcgtggctgg

SEQ ID NO: 5493 - DNA, 28 bp, synthetic construct
  source 1..28: mol_type = other DNA
aatgggtggcgtactgcacgtgtcgtgg

SEQ ID NO: 5494 - DNA, 28 bp, synthetic construct
  source 1..28: mol_type = other DNA
tacgccacccattttcccatcccccagg

SEQ ID NO: 5495 - DNA, 28 bp, synthetic construct
  source 1..28: mol_type = other DNA
agtacctgggggatgggaaaatgggtgg

SEQ ID NO: 5496 - DNA, 28 bp, synthetic construct
  source 1..28: mol_type = other DNA
aatagtacctgggggatgggaaaatggg

SEQ ID NO: 5497 - DNA, 28 bp, synthetic construct
  source 1..28: mol_type = other DNA
gaatagtacctgggggatgggaaaatgg

SEQ ID NO: 5498 - DNA, 28 bp, synthetic construct
  source 1..28: mol_type = other DNA
tgctggggaatagtacctgggggatggg

SEQ ID NO: 5499 - DNA, 28 bp, synthetic construct
  source 1..28: mol_type = other DNA
gtgctggggaatagtacctgggggatgg

SEQ ID NO: 5500 - DNA, 28 bp, synthetic construct
  source 1..28: mol_type = other DNA
caaggtgctggggaatagtacctggggg

SEQ ID NO: 5501 - DNA, 28 bp, synthetic construct
  source 1..28: mol_type = other DNA
acaaggtgctggggaatagtacctgggg

SEQ ID NO: 5502 - DNA, 28 bp, synthetic construct
  source 1..28: mol_type = other DNA
cacaaggtgctggggaatagtacctggg

SEQ ID NO: 5503 - DNA, 28 bp, synthetic construct
  source 1..28: mol_type = other DNA
tcacaaggtgctggggaatagtacctgg

SEQ ID NO: 5504 - DNA, 28 bp, synthetic construct
  source 1..28: mol_type = other DNA
gagtctgatggtgctgctgggatgcagg

SEQ ID NO: 5505 - DNA, 28 bp, synthetic construct
  source 1..28: mol_type = other DNA
tctgatggtgctgctgggatgcaggagg

SEQ ID NO: 5506 - DNA, 28 bp, synthetic construct
  source 1..28: mol_type = other DNA
gtcatgcagccatgagtgcaaccagcgg

SEQ ID NO: 5507 - DNA, 28 bp, synthetic construct
  source 1..28: mol_type = other DNA
tgcagccatgagtgcaaccagcggttgg

SEQ ID NO: 5508 - DNA, 28 bp, synthetic construct
  source 1..28: mol_type = other DNA
tacgaccaaccgctggttgcactcatgg

SEQ ID NO: 5509 - DNA, 28 bp, synthetic construct
  source 1..28: mol_type = other DNA
gcaaccagcggttggtcgtactgtttgg

SEQ ID NO: 5510 - DNA, 28 bp, synthetic construct
  source 1..28: mol_type = other DNA
caaccagcggttggtcgtactgtttggg

SEQ ID NO: 5511 - DNA, 28 bp, synthetic construct
  source 1..28: mol_type = other DNA
aaccagcggttggtcgtactgtttgggg

SEQ ID NO: 5512 - DNA, 28 bp, synthetic construct
  source 1..28: mol_type = other DNA
caccccaaacagtacgaccaaccgctgg

SEQ ID NO: 5513 - DNA, 28 bp, synthetic construct
  source 1..28: mol_type = other DNA
cagcggttggtcgtactgtttggggtgg

SEQ ID NO: 5514 - DNA, 28 bp, synthetic construct
  source 1..28: mol_type = other DNA
agcggttggtcgtactgtttggggtggg

SEQ ID NO: 5515 - DNA, 28 bp, synthetic construct
  source 1..28: mol_type = other DNA
ttggtgattttcttgatggcatggcggg

SEQ ID NO: 5516 - DNA, 28 bp, synthetic construct
  source 1..28: mol_type = other DNA
cttggtgattttcttgatggcatggcgg

SEQ ID NO: 5517 - DNA, 28 bp, synthetic construct
  source 1..28: mol_type = other DNA
cgccatgccatcaagaaaatcaccaagg

SEQ ID NO: 5518 - DNA, 28 bp, synthetic construct
  source 1..28: mol_type = other DNA
atccttggtgattttcttgatggcatgg

SEQ ID NO: 5519 - DNA, 28 bp, synthetic construct
  source 1..28: mol_type = other DNA
aagatatccttggtgattttcttgatgg

SEQ ID NO: 5520 - DNA, 28 bp, synthetic construct
  source 1..28: mol_type = other DNA
aagaaaatcaccaaggatatcttgaagg

SEQ ID NO: 5521 - DNA, 28 bp, synthetic construct
  source 1..28: mol_type = other DNA
cggttcagaaccttcaagatatccttgg

SEQ ID NO: 5522 - DNA, 28 bp, synthetic construct
  source 1..28: mol_type = other DNA
atatcttgaaggttctgaaccgcaaagg

SEQ ID NO: 5523 - DNA, 28 bp, synthetic construct
  source 1..28: mol_type = other DNA
tatcttgaaggttctgaaccgcaaaggg

SEQ ID NO: 5524 - DNA, 28 bp, synthetic construct
  source 1..28: mol_type = other DNA
tgaaccgcaaagggacagcagaaactgg

SEQ ID NO: 5525 - DNA, 28 bp, synthetic construct
  source 1..28: mol_type = other DNA
accgcaaagggacagcagaaactggtgg

SEQ ID NO: 5526 - DNA, 28 bp, synthetic construct
  source 1..28: mol_type = other DNA
ccgcaaagggacagcagaaactggtggg

SEQ ID NO: 5527 - DNA, 28 bp, synthetic construct
  source 1..28: mol_type = other DNA
gggacagcagaaactggtgggtttgagg

SEQ ID NO: 5528 - DNA, 28 bp, synthetic construct
  source 1..28: mol_type = other DNA
ggtctgtagagggggggaatgagggggg

SEQ ID NO: 5529 - DNA, 28 bp, synthetic construct
  source 1..28: mol_type = other DNA
tggtctgtagagggggggaatgaggggg

SEQ ID NO: 5530 - DNA, 28 bp, synthetic construct
  source 1..28: mol_type = other DNA
ctggtctgtagagggggggaatgagggg

SEQ ID NO: 5531 - DNA, 28 bp, synthetic construct
  source 1..28: mol_type = other DNA
gctggtctgtagagggggggaatgaggg

SEQ ID NO: 5532 - DNA, 28 bp, synthetic construct
  source 1..28: mol_type = other DNA
agctggtctgtagagggggggaatgagg

SEQ ID NO: 5533 - DNA, 28 bp, synthetic construct
  source 1..28: mol_type = other DNA
aggagcaagctggtctgtagaggggggg

SEQ ID NO: 5534 - DNA, 28 bp, synthetic construct
  source 1..28: mol_type = other DNA
taggagcaagctggtctgtagagggggg

SEQ ID NO: 5535 - DNA, 28 bp, synthetic construct
  source 1..28: mol_type = other DNA
ataggagcaagctggtctgtagaggggg

SEQ ID NO: 5536 - DNA, 28 bp, synthetic construct
  source 1..28: mol_type = other DNA
aataggagcaagctggtctgtagagggg

SEQ ID NO: 5537 - DNA, 28 bp, synthetic construct
  source 1..28: mol_type = other DNA
caataggagcaagctggtctgtagaggg

SEQ ID NO: 5538 - DNA, 28 bp, synthetic construct
  source 1..28: mol_type = other DNA
acaataggagcaagctggtctgtagagg

SEQ ID NO: 5539 - DNA, 28 bp, synthetic construct
  source 1..28: mol_type = other DNA
attcagaggcacaataggagcaagctgg

SEQ ID NO: 5540 - DNA, 28 bp, synthetic construct
  source 1..28: mol_type = other DNA
ttgctcctattgtgcctctgaatcctgg

SEQ ID NO: 5541 - DNA, 28 bp, synthetic construct
  source 1..28: mol_type = other DNA
ggtctccaggattcagaggcacaatagg

SEQ ID NO: 5542 - DNA, 28 bp, synthetic construct
  source 1..28: mol_type = other DNA
agaatgtcaggtctccaggattcagagg

SEQ ID NO: 5543 - DNA, 28 bp, synthetic construct
  source 1..28: mol_type = other DNA
tgaatcctggagacctgacattcttagg

SEQ ID NO: 5544 - DNA, 28 bp, synthetic construct
  source 1..28: mol_type = other DNA
aggtacctaagaatgtcaggtctccagg

SEQ ID NO: 5545 - DNA, 28 bp, synthetic construct
  source 1..28: mol_type = other DNA
ttactgtgaggtacctaagaatgtcagg

SEQ ID NO: 5546 - DNA, 28 bp, synthetic construct
  source 1..28: mol_type = other DNA
actggtccctttcaactgtcccctcagg

SEQ ID NO: 5547 - DNA, 28 bp, synthetic construct
  source 1..28: mol_type = other DNA
ggtccctttcaactgtcccctcaggtgg

SEQ ID NO: 5548 - DNA, 28 bp, synthetic construct
  source 1..28: mol_type = other DNA
gtccctttcaactgtcccctcaggtggg

SEQ ID NO: 5549 - DNA, 28 bp, synthetic construct
  source 1..28: mol_type = other DNA
tccctttcaactgtcccctcaggtgggg

SEQ ID NO: 5550 - DNA, 28 bp, synthetic construct
  source 1..28: mol_type = other DNA
tccccacctgaggggacagttgaaaggg

SEQ ID NO: 5551 - DNA, 28 bp, synthetic construct
  source 1..28: mol_type = other DNA
ctccccacctgaggggacagttgaaagg

SEQ ID NO: 5552 - DNA, 28 bp, synthetic construct
  source 1..28: mol_type = other DNA
ctttcaactgtcccctcaggtggggagg

SEQ ID NO: 5553 - DNA, 28 bp, synthetic construct
  source 1..28: mol_type = other DNA
caactgtcccctcaggtggggaggatgg

SEQ ID NO: 5554 - DNA, 28 bp, synthetic construct
  source 1..28: mol_type = other DNA
aactgtcccctcaggtggggaggatggg

SEQ ID NO: 5555 - DNA, 28 bp, synthetic construct
  source 1..28: mol_type = other DNA
cttctgcccatcctccccacctgagggg

SEQ ID NO: 5556 - DNA, 28 bp, synthetic construct
  source 1..28: mol_type = other DNA
gcttctgcccatcctccccacctgaggg

SEQ ID NO: 5557 - DNA, 28 bp, synthetic construct
  source 1..28: mol_type = other DNA
cgcttctgcccatcctccccacctgagg

SEQ ID NO: 5558 - DNA, 28 bp, synthetic construct
  source 1..28: mol_type = other DNA
ctcaggtggggaggatgggcagaagcgg

SEQ ID NO: 5559 - DNA, 28 bp, synthetic construct
  source 1..28: mol_type = other DNA
ggatgggcagaagcggcgacgcaaccgg

SEQ ID NO: 5560 - DNA, 28 bp, synthetic construct
  source 1..28: mol_type = other DNA
ttcagcagtggggaaggcttcaggccgg

SEQ ID NO: 5561 - DNA, 28 bp, synthetic construct
  source 1..28: mol_type = other DNA
tatcttcagcagtggggaaggcttcagg

SEQ ID NO: 5562 - DNA, 28 bp, synthetic construct
  source 1..28: mol_type = other DNA
gcaaagatatcttcagcagtggggaagg

SEQ ID NO: 5563 - DNA, 28 bp, synthetic construct
  source 1..28: mol_type = other DNA
cttagcaaagatatcttcagcagtgggg

SEQ ID NO: 5564 - DNA, 28 bp, synthetic construct
  source 1..28: mol_type = other DNA
acttagcaaagatatcttcagcagtggg

SEQ ID NO: 5565 - DNA, 28 bp, synthetic construct
  source 1..28: mol_type = other DNA
aacttagcaaagatatcttcagcagtgg

SEQ ID NO: 5566 - DNA, 28 bp, synthetic construct
  source 1..28: mol_type = other DNA
gtgttggtcataatgtgaaaggtgctgg

SEQ ID NO: 5567 - DNA, 28 bp, synthetic construct
  source 1..28: mol_type = other DNA
cacctttcacattatgaccaacaccagg

SEQ ID NO: 5568 - DNA, 28 bp, synthetic construct
  source 1..28: mol_type = other DNA
gacctggtgttggtcataatgtgaaagg

SEQ ID NO: 5569 - DNA, 28 bp, synthetic construct
  source 1..28: mol_type = other DNA
tcacattatgaccaacaccaggtcacgg

SEQ ID NO: 5570 - DNA, 28 bp, synthetic construct
  source 1..28: mol_type = other DNA
tatgaccaacaccaggtcacggctcagg

SEQ ID NO: 5571 - DNA, 28 bp, synthetic construct
  source 1..28: mol_type = other DNA
ccaacaccaggtcacggctcaggtgtgg

SEQ ID NO: 5572 - DNA, 28 bp, synthetic construct
  source 1..28: mol_type = other DNA
caacaccaggtcacggctcaggtgtggg

SEQ ID NO: 5573 - DNA, 28 bp, synthetic construct
  source 1..28: mol_type = other DNA
ttaggcccacacctgagccgtgacctgg

SEQ ID NO: 5574 - DNA, 28 bp, synthetic construct
  source 1..28: mol_type = other DNA
ccatctcactcccactgcccttatcagg

SEQ ID NO: 5575 - DNA, 28 bp, synthetic construct
  source 1..28: mol_type = other DNA
ctcccactgcccttatcaggtctcccgg

SEQ ID NO: 5576 - DNA, 28 bp, synthetic construct
  source 1..28: mol_type = other DNA
ttccgggagacctgataagggcagtggg

SEQ ID NO: 5577 - DNA, 28 bp, synthetic construct
  source 1..28: mol_type = other DNA
attccgggagacctgataagggcagtgg

SEQ ID NO: 5578 - DNA, 28 bp, synthetic construct
  source 1..28: mol_type = other DNA
cagaacattccgggagacctgataaggg

SEQ ID NO: 5579 - DNA, 28 bp, synthetic construct
  source 1..28: mol_type = other DNA
ccttatcaggtctcccggaatgttctgg

SEQ ID NO: 5580 - DNA, 28 bp, synthetic construct
  source 1..28: mol_type = other DNA
ctcgtgatctgctccagaacattccggg

SEQ ID NO: 5581 - DNA, 28 bp, synthetic construct
  source 1..28: mol_type = other DNA
gctcgtgatctgctccagaacattccgg

SEQ ID NO: 5582 - DNA, 28 bp, synthetic construct
  source 1..28: mol_type = other DNA
tggagcagatcacgagctttgcccttgg

SEQ ID NO: 5583 - DNA, 28 bp, synthetic construct
  source 1..28: mol_type = other DNA
agaggcaagtggtatgacatgccaaggg

SEQ ID NO: 5584 - DNA, 28 bp, synthetic construct
  source 1..28: mol_type = other DNA
cagaggcaagtggtatgacatgccaagg

SEQ ID NO: 5585 - DNA, 28 bp, synthetic construct
  source 1..28: mol_type = other DNA
cttggcatgtcataccacttgcctctgg

SEQ ID NO: 5586 - DNA, 28 bp, synthetic construct
  source 1..28: mol_type = other DNA
ctgcacatgctgcaccagaggcaagtgg

SEQ ID NO: 5587 - DNA, 28 bp, synthetic construct
  source 1..28: mol_type = other DNA
agatgaactgcacatgctgcaccagagg

SEQ ID NO: 5588 - DNA, 28 bp, synthetic construct
  source 1..28: mol_type = other DNA
catgtgcagttcatcttcgacctcatgg

SEQ ID NO: 5589 - DNA, 28 bp, synthetic construct
  source 1..28: mol_type = other DNA
actgatgctgagtgaatattccatgagg

SEQ ID NO: 5590 - DNA, 28 bp, synthetic construct
  source 1..28: mol_type = other DNA
tcatggaatattcactcagcatcagtgg

SEQ ID NO: 5591 - DNA, 28 bp, synthetic construct
  source 1..28: mol_type = other DNA
agtggcctcatcgactttgccattcagg

SEQ ID NO: 5592 - DNA, 28 bp, synthetic construct
  source 1..28: mol_type = other DNA
ggcctcatcgactttgccattcaggtgg

SEQ ID NO: 5593 - DNA, 28 bp, synthetic construct
  source 1..28: mol_type = other DNA
gcctcatcgactttgccattcaggtggg

SEQ ID NO: 5594 - DNA, 28 bp, synthetic construct
  source 1..28: mol_type = other DNA
cctcatcgactttgccattcaggtgggg

SEQ ID NO: 5595 - DNA, 28 bp, synthetic construct
  source 1..28: mol_type = other DNA
gactttgccattcaggtggggaagttgg

SEQ ID NO: 5596 - DNA, 28 bp, synthetic construct
  source 1..28: mol_type = other DNA
actttgccattcaggtggggaagttggg

SEQ ID NO: 5597 - DNA, 28 bp, synthetic construct
  source 1..28: mol_type = other DNA
ctttgccattcaggtggggaagttgggg

SEQ ID NO: 5598 - DNA, 28 bp, synthetic construct
  source 1..28: mol_type = other DNA
catctccccaacttccccacctgaatgg

SEQ ID NO: 5599 - DNA, 28 bp, synthetic construct
  source 1..28: mol_type = other DNA
ttcaggtggggaagttggggagatgagg

SEQ ID NO: 5600 - DNA, 28 bp, synthetic construct
  source 1..28: mol_type = other DNA
tcaggtggggaagttggggagatgaggg

SEQ ID NO: 5601 - DNA, 28 bp, synthetic construct
  source 1..28: mol_type = other DNA
ggtggggaagttggggagatgagggtgg

SEQ ID NO: 5602 - DNA, 28 bp, synthetic construct
  source 1..28: mol_type = other DNA
attcagcagctagcagagtaaacggggg

SEQ ID NO: 5603 - DNA, 28 bp, synthetic construct
  source 1..28: mol_type = other DNA
cattcagcagctagcagagtaaacgggg

SEQ ID NO: 5604 - DNA, 28 bp, synthetic construct
  source 1..28: mol_type = other DNA
tcattcagcagctagcagagtaaacggg

SEQ ID NO: 5605 - DNA, 28 bp, synthetic construct
  source 1..28: mol_type = other DNA
ttcattcagcagctagcagagtaaacgg

SEQ ID NO: 5606 - DNA, 28 bp, synthetic construct
  source 1..28: mol_type = other DNA
ctgctgaatgaactgagtgtagttgagg

SEQ ID NO: 5607 - DNA, 28 bp, synthetic construct
  source 1..28: mol_type = other DNA
gaggctgagctgcttctcaaatcctcgg

SEQ ID NO: 5608 - DNA, 28 bp, synthetic construct
  source 1..28: mol_type = other DNA
gagctgcttctcaaatcctcggatctgg

SEQ ID NO: 5609 - DNA, 28 bp, synthetic construct
  source 1..28: mol_type = other DNA
ctgcttctcaaatcctcggatctggtgg

SEQ ID NO: 5610 - DNA, 28 bp, synthetic construct
  source 1..28: mol_type = other DNA
tgcttctcaaatcctcggatctggtggg

SEQ ID NO: 5611 - DNA, 28 bp, synthetic construct
  source 1..28: mol_type = other DNA
gtagtgtagctgcccaccagatccgagg

SEQ ID NO: 5612 - DNA, 28 bp, synthetic construct
  source 1..28: mol_type = other DNA
actactagcctgtgcctgtgcatcgtgg

SEQ ID NO: 5613 - DNA, 28 bp, synthetic construct
  source 1..28: mol_type = other DNA
caggacagccacgatgcacaggcacagg

SEQ ID NO: 5614 - DNA, 28 bp, synthetic construct
  source 1..28: mol_type = other DNA
gtgcctgtgcatcgtggctgtcctgcgg

SEQ ID NO: 5615 - DNA, 28 bp, synthetic construct
  source 1..28: mol_type = other DNA
gtgccgcaggacagccacgatgcacagg

SEQ ID NO: 5616 - DNA, 28 bp, synthetic construct
  source 1..28: mol_type = other DNA
gatgaggcaggcatgatagtgccgcagg

SEQ ID NO: 5617 - DNA, 28 bp, synthetic construct
  source 1..28: mol_type = other DNA
tatcatgcctgcctcatcctcaaccagg

SEQ ID NO: 5618 - DNA, 28 bp, synthetic construct
  source 1..28: mol_type = other DNA
atctggtcctggttgaggatgaggcagg

SEQ ID NO: 5619 - DNA, 28 bp, synthetic construct
  source 1..28: mol_type = other DNA
tgcctcatcctcaaccaggaccagatgg

SEQ ID NO: 5620 - DNA, 28 bp, synthetic construct
  source 1..28: mol_type = other DNA
tgccatctggtcctggttgaggatgagg

SEQ ID NO: 5621 - DNA, 28 bp, synthetic construct
  source 1..28: mol_type = other DNA
atcctcaaccaggaccagatggcacagg

SEQ ID NO: 5622 - DNA, 28 bp, synthetic construct
  source 1..28: mol_type = other DNA
gacctgtgccatctggtcctggttgagg

SEQ ID NO: 5623 - DNA, 28 bp, synthetic construct
  source 1..28: mol_type = other DNA
ctcaaagacctgtgccatctggtcctgg

SEQ ID NO: 5624 - DNA, 28 bp, synthetic construct
  source 1..28: mol_type = other DNA
caggaccagatggcacaggtctttgagg

SEQ ID NO: 5625 - DNA, 28 bp, synthetic construct
  source 1..28: mol_type = other DNA
aggaccagatggcacaggtctttgaggg

SEQ ID NO: 5626 - DNA, 28 bp, synthetic construct
  source 1..28: mol_type = other DNA
ggaccagatggcacaggtctttgagggg

SEQ ID NO: 5627 - DNA, 28 bp, synthetic construct
  source 1..28: mol_type = other DNA
ttacccctcaaagacctgtgccatctgg

SEQ ID NO: 5628 - DNA, 28 bp, synthetic construct
  source 1..28: mol_type = other DNA
ggtctttgaggggtaagcagagcttcgg

SEQ ID NO: 5629 - DNA, 28 bp, synthetic construct
  source 1..28: mol_type = other DNA
ccctcccaaccttgcttcttcatgcagg

SEQ ID NO: 5630 - DNA, 28 bp, synthetic construct
  source 1..28: mol_type = other DNA
gcctgcatgaagaagcaaggttgggagg

SEQ ID NO: 5631 - DNA, 28 bp, synthetic construct
  source 1..28: mol_type = other DNA
acagcctgcatgaagaagcaaggttggg

SEQ ID NO: 5632 - DNA, 28 bp, synthetic construct
  source 1..28: mol_type = other DNA
cacagcctgcatgaagaagcaaggttgg

SEQ ID NO: 5633 - DNA, 28 bp, synthetic construct
  source 1..28: mol_type = other DNA
accttgcttcttcatgcaggctgtgtgg

SEQ ID NO: 5634 - DNA, 28 bp, synthetic construct
  source 1..28: mol_type = other DNA
gccacacagcctgcatgaagaagcaagg

SEQ ID NO: 5635 - DNA, 28 bp, synthetic construct
  source 1..28: mol_type = other DNA
gcaggctgtgtggcgtcgtgaagcatgg

SEQ ID NO: 5636 - DNA, 28 bp, synthetic construct
  source 1..28: mol_type = other DNA
caggctgtgtggcgtcgtgaagcatggg

SEQ ID NO: 5637 - DNA, 28 bp, synthetic construct
  source 1..28: mol_type = other DNA
tggcgtcgtgaagcatgggatgaaccgg

SEQ ID NO: 5638 - DNA, 28 bp, synthetic construct
  source 1..28: mol_type = other DNA
tgaagcatgggatgaaccggtccgatgg

SEQ ID NO: 5639 - DNA, 28 bp, synthetic construct
  source 1..28: mol_type = other DNA
gcgctctgcagaggagccatcggaccgg

SEQ ID NO: 5640 - DNA, 28 bp, synthetic construct
  source 1..28: mol_type = other DNA
atacagcgctctgcagaggagccatcgg

SEQ ID NO: 5641 - DNA, 28 bp, synthetic construct
  source 1..28: mol_type = other DNA
taagcaaggatacagcgctctgcagagg

SEQ ID NO: 5642 - DNA, 28 bp, synthetic construct
  source 1..28: mol_type = other DNA
ggtgtacagatcatagagataagcaagg

SEQ ID NO: 5643 - DNA, 28 bp, synthetic construct
  source 1..28: mol_type = other DNA
aatttgttctttaaatggctacaggagg

SEQ ID NO: 5644 - DNA, 28 bp, synthetic construct
  source 1..28: mol_type = other DNA
cctgtagccatttaaagaacaaatttgg

SEQ ID NO: 5645 - DNA, 28 bp, synthetic construct
  source 1..28: mol_type = other DNA
ctgtagccatttaaagaacaaatttggg

SEQ ID NO: 5646 - DNA, 28 bp, synthetic construct
  source 1..28: mol_type = other DNA
tgtagccatttaaagaacaaatttgggg

SEQ ID NO: 5647 - DNA, 28 bp, synthetic construct
  source 1..28: mol_type = other DNA
gagctccccaaatttgttctttaaatgg

SEQ ID NO: 5648 - DNA, 28 bp, synthetic construct
  source 1..28: mol_type = other DNA
aaagaacaaatttggggagctcttcagg

SEQ ID NO: 5649 - DNA, 28 bp, synthetic construct
  source 1..28: mol_type = other DNA
atttggggagctcttcaggtaagagagg

SEQ ID NO: 5650 - DNA, 28 bp, synthetic construct
  source 1..28: mol_type = other DNA
tggggagctcttcaggtaagagaggtgg

SEQ ID NO: 5651 - DNA, 28 bp, synthetic construct
  source 1..28: mol_type = other DNA
gagctcttcaggtaagagaggtggaagg

SEQ ID NO: 5652 - DNA, 28 bp, synthetic construct
  source 1..28: mol_type = other DNA
cttcaggtaagagaggtggaaggtaagg

SEQ ID NO: 5653 - DNA, 28 bp, synthetic construct
  source 1..28: mol_type = other DNA
ttcaggtaagagaggtggaaggtaaggg

SEQ ID NO: 5654 - DNA, 28 bp, synthetic construct
  source 1..28: mol_type = other DNA
tcaggtaagagaggtggaaggtaagggg

SEQ ID NO: 5655 - DNA, 28 bp, synthetic construct
  source 1..28: mol_type = other DNA
aaaagtcgctgcagggatggaggaaagg

SEQ ID NO: 5656 - DNA, 28 bp, synthetic construct
  source 1..28: mol_type = other DNA
tgagcaaaagtcgctgcagggatggagg

SEQ ID NO: 5657 - DNA, 28 bp, synthetic construct
  source 1..28: mol_type = other DNA
ctttgagcaaaagtcgctgcagggatgg

SEQ ID NO: 5658 - DNA, 28 bp, synthetic construct
  source 1..28: mol_type = other DNA
catccctgcagcgacttttgctcaaagg

SEQ ID NO: 5659 - DNA, 28 bp, synthetic construct
  source 1..28: mol_type = other DNA
tcacctttgagcaaaagtcgctgcaggg

SEQ ID NO: 5660 - DNA, 28 bp, synthetic construct
  source 1..28: mol_type = other DNA
ttcacctttgagcaaaagtcgctgcagg

SEQ ID NO: 5661 - DNA, 28 bp, synthetic construct
  source 1..28: mol_type = other DNA
gtgaagaacaccatctactgcaacgtgg

SEQ ID NO: 5662 - DNA, 28 bp, synthetic construct
  source 1..28: mol_type = other DNA
accatctactgcaacgtggagccatcgg

SEQ ID NO: 5663 - DNA, 28 bp, synthetic construct
  source 1..28: mol_type = other DNA
tccgatggctccacgttgcagtagatgg

SEQ ID NO: 5664 - DNA, 28 bp, synthetic construct
  source 1..28: mol_type = other DNA
ggagccatcggaatcaaatatgcgctgg

SEQ ID NO: 5665 - DNA, 28 bp, synthetic construct
  source 1..28: mol_type = other DNA
gagccatcggaatcaaatatgcgctggg

SEQ ID NO: 5666 - DNA, 28 bp, synthetic construct
  source 1..28: mol_type = other DNA
gtgcccagcgcatatttgattccgatgg

SEQ ID NO: 5667 - DNA, 28 bp, synthetic construct
  source 1..28: mol_type = other DNA
tctctagagtgtcgatcatgaactcagg

SEQ ID NO: 5668 - DNA, 28 bp, synthetic construct
  source 1..28: mol_type = other DNA
cgtgtaggtgaaggtgtgagctgcaggg

SEQ ID NO: 5669 - DNA, 28 bp, synthetic construct
  source 1..28: mol_type = other DNA
cctgcagctcacaccttcacctacacgg

SEQ ID NO: 5670 - DNA, 28 bp, synthetic construct
  source 1..28: mol_type = other DNA
ctgcagctcacaccttcacctacacggg

SEQ ID NO: 5671 - DNA, 28 bp, synthetic construct
  source 1..28: mol_type = other DNA
tgcagctcacaccttcacctacacgggg

SEQ ID NO: 5672 - DNA, 28 bp, synthetic construct
  source 1..28: mol_type = other DNA
ctcacaccttcacctacacggggctagg

SEQ ID NO: 5673 - DNA, 28 bp, synthetic construct
  source 1..28: mol_type = other DNA
ctcttgcctagccccgtgtaggtgaagg

SEQ ID NO: 5674 - DNA, 28 bp, synthetic construct
  source 1..28: mol_type = other DNA
ctaagactcttgcctagccccgtgtagg

SEQ ID NO: 5675 - DNA, 28 bp, synthetic construct
  source 1..28: mol_type = other DNA
gcagacaaagctgtagcggttagcaggg

SEQ ID NO: 5676 - DNA, 28 bp, synthetic construct
  source 1..28: mol_type = other DNA
tgcagacaaagctgtagcggttagcagg

SEQ ID NO: 5677 - DNA, 28 bp, synthetic construct
  source 1..28: mol_type = other DNA
aagggcattgcagacaaagctgtagcgg

SEQ ID NO: 5678 - DNA, 28 bp, synthetic construct
  source 1..28: mol_type = other DNA
tgcaatgcccttatgcacgtctgtgtgg

SEQ ID NO: 5679 - DNA, 28 bp, synthetic construct
  source 1..28: mol_type = other DNA
gcaatgcccttatgcacgtctgtgtggg

SEQ ID NO: 5680 - DNA, 28 bp, synthetic construct
  source 1..28: mol_type = other DNA
caatgcccttatgcacgtctgtgtgggg

SEQ ID NO: 5681 - DNA, 28 bp, synthetic construct
  source 1..28: mol_type = other DNA
tggtgccccacacagacgtgcataaggg

SEQ ID NO: 5682 - DNA, 28 bp, synthetic construct
  source 1..28: mol_type = other DNA
atggtgccccacacagacgtgcataagg

SEQ ID NO: 5683 - DNA, 28 bp, synthetic construct
  source 1..28: mol_type = other DNA
ctgtgtggggcaccatgatcccgatagg

SEQ ID NO: 5684 - DNA, 28 bp, synthetic construct
  source 1..28: mol_type = other DNA
tggggcaccatgatcccgataggtatgg

SEQ ID NO: 5685 - DNA, 28 bp, synthetic construct
  source 1..28: mol_type = other DNA
ggggcaccatgatcccgataggtatggg

SEQ ID NO: 5686 - DNA, 28 bp, synthetic construct
  source 1..28: mol_type = other DNA
gggcaccatgatcccgataggtatgggg

SEQ ID NO: 5687 - DNA, 28 bp, synthetic construct
  source 1..28: mol_type = other DNA
gtacaccccatacctatcgggatcatgg

SEQ ID NO: 5688 - DNA, 28 bp, synthetic construct
  source 1..28: mol_type = other DNA
tcactcagtacaccccatacctatcggg

SEQ ID NO: 5689 - DNA, 28 bp, synthetic construct
  source 1..28: mol_type = other DNA
ctcactcagtacaccccatacctatcgg

SEQ ID NO: 5690 - DNA, 28 bp, synthetic construct
  source 1..28: mol_type = other DNA
cgataggtatggggtgtactgagtgagg

SEQ ID NO: 5691 - DNA, 28 bp, synthetic construct
  source 1..28: mol_type = other DNA
aggtatggggtgtactgagtgaggaagg

SEQ ID NO: 5692 - DNA, 28 bp, synthetic construct
  source 1..28: mol_type = other DNA
ggtatggggtgtactgagtgaggaaggg

SEQ ID NO: 5693 - DNA, 28 bp, synthetic construct
  source 1..28: mol_type = other DNA
cctgagggcatttgtacttttccctagg

SEQ ID NO: 5694 - DNA, 28 bp, synthetic construct
  source 1..28: mol_type = other DNA
ctgagggcatttgtacttttccctaggg

SEQ ID NO: 5695 - DNA, 28 bp, synthetic construct
  source 1..28: mol_type = other DNA
caggattgcgatgtcattcaccctaggg

SEQ ID NO: 5696 - DNA, 28 bp, synthetic construct
  source 1..28: mol_type = other DNA
acaggattgcgatgtcattcaccctagg

SEQ ID NO: 5697 - DNA, 28 bp, synthetic construct
  source 1..28: mol_type = other DNA
tcgcaatcctgtgtgcagagctgaccgg

SEQ ID NO: 5698 - DNA, 28 bp, synthetic construct
  source 1..28: mol_type = other DNA
gcaatagccggtcagctctgcacacagg

SEQ ID NO: 5699 - DNA, 28 bp, synthetic construct
  source 1..28: mol_type = other DNA
tctgcactcagtgacttgcaatagccgg

SEQ ID NO: 5700 - DNA, 28 bp, synthetic construct
  source 1..28: mol_type = other DNA
ctattgcaagtcactgagtgcagaatgg

SEQ ID NO: 5701 - DNA, 28 bp, synthetic construct
  source 1..28: mol_type = other DNA
gcaagtcactgagtgcagaatggctagg

SEQ ID NO: 5702 - DNA, 28 bp, synthetic construct
  source 1..28: mol_type = other DNA
agtgcagaatggctaggagtgcttaagg

SEQ ID NO: 5703 - DNA, 28 bp, synthetic construct
  source 1..28: mol_type = other DNA
aggccttgtgctgctcctctaacaatgg

SEQ ID NO: 5704 - DNA, 28 bp, synthetic construct
  source 1..28: mol_type = other DNA
gtgccattgttagaggagcagcacaagg

SEQ ID NO: 5705 - DNA, 28 bp, synthetic construct
  source 1..28: mol_type = other DNA
gctgctcctctaacaatggcacttgtgg

SEQ ID NO: 5706 - DNA, 28 bp, synthetic construct
  source 1..28: mol_type = other DNA
ttgaaaccacaagtgccattgttagagg

SEQ ID NO: 5707 - DNA, 28 bp, synthetic construct
  source 1..28: mol_type = other DNA
tcctctgcaatgttgatgtgagacttgg

SEQ ID NO: 5708 - DNA, 28 bp, synthetic construct
  source 1..28: mol_type = other DNA
cctctgcaatgttgatgtgagacttggg

SEQ ID NO: 5709 - DNA, 28 bp, synthetic construct
  source 1..28: mol_type = other DNA
ctctgcaatgttgatgtgagacttgggg

SEQ ID NO: 5710 - DNA, 28 bp, synthetic construct
  source 1..28: mol_type = other DNA
tgcaatgttgatgtgagacttggggtgg

SEQ ID NO: 5711 - DNA, 28 bp, synthetic construct
  source 1..28: mol_type = other DNA
gcaatgttgatgtgagacttggggtggg

SEQ ID NO: 5712 - DNA, 28 bp, synthetic construct
  source 1..28: mol_type = other DNA
caatgttgatgtgagacttggggtgggg

SEQ ID NO: 5713 - DNA, 28 bp, synthetic construct
  source 1..28: mol_type = other DNA
atggtgtctgtctgttttttcctccagg

SEQ ID NO: 5714 - DNA, 28 bp, synthetic construct
  source 1..28: mol_type = other DNA
atgaaaagataggtcactgacctggagg

SEQ ID NO: 5715 - DNA, 28 bp, synthetic construct
  source 1..28: mol_type = other DNA
gtcatgaaaagataggtcactgacctgg

SEQ ID NO: 5716 - DNA, 28 bp, synthetic construct
  source 1..28: mol_type = other DNA
agtgacctatcttttcatgactcgctgg

SEQ ID NO: 5717 - DNA, 28 bp, synthetic construct
  source 1..28: mol_type = other DNA
agtagccagcgagtcatgaaaagatagg

SEQ ID NO: 5718 - DNA, 28 bp, synthetic construct
  source 1..28: mol_type = other DNA
tacttttgttgccatcctcatcgctcgg

SEQ ID NO: 5719 - DNA, 28 bp, synthetic construct
  source 1..28: mol_type = other DNA
agcaaacactgccgagcgatgaggatgg

SEQ ID NO: 5720 - DNA, 28 bp, synthetic construct
  source 1..28: mol_type = other DNA
caggagcaaacactgccgagcgatgagg

SEQ ID NO: 5721 - DNA, 28 bp, synthetic construct
  source 1..28: mol_type = other DNA
ctcatcgctcggcagtgtttgctcctgg

SEQ ID NO: 5722 - DNA, 28 bp, synthetic construct
  source 1..28: mol_type = other DNA
ggcagcacagcgaatcagatcttccagg

SEQ ID NO: 5723 - DNA, 28 bp, synthetic construct
  source 1..28: mol_type = other DNA
ctgccatcccttcactccttaatgctgg

SEQ ID NO: 5724 - DNA, 28 bp, synthetic construct
  source 1..28: mol_type = other DNA
tcaccagcattaaggagtgaagggatgg

SEQ ID NO: 5725 - DNA, 28 bp, synthetic construct
  source 1..28: mol_type = other DNA
tagttcaccagcattaaggagtgaaggg

SEQ ID NO: 5726 - DNA, 28 bp, synthetic construct
  source 1..28: mol_type = other DNA
gtagttcaccagcattaaggagtgaagg

SEQ ID NO: 5727 - DNA, 28 bp, synthetic construct
  source 1..28: mol_type = other DNA
acagattggtagttcaccagcattaagg

SEQ ID NO: 5728 - DNA, 28 bp, synthetic construct
  source 1..28: mol_type = other DNA
agctaaaaggaagacaaaacagatctgg

SEQ ID NO: 5729 - DNA, 28 bp, synthetic construct
  source 1..28: mol_type = other DNA
gtcttccttttagcttgtagtgaacagg

SEQ ID NO: 5730 - DNA, 28 bp, synthetic construct
  source 1..28: mol_type = other DNA
agagtcctgttcactacaagctaaaagg

SEQ ID NO: 5731 - DNA, 28 bp, synthetic construct
  source 1..28: mol_type = other DNA
cttgtagtgaacaggactctgagccagg

SEQ ID NO: 5732 - DNA, 28 bp, synthetic construct
  source 1..28: mol_type = other DNA
ttgtagtgaacaggactctgagccaggg

SEQ ID NO: 5733 - DNA, 28 bp, synthetic construct
  source 1..28: mol_type = other DNA
tgtagtgaacaggactctgagccagggg

SEQ ID NO: 5734 - DNA, 28 bp, synthetic construct
  source 1..28: mol_type = other DNA
tgaacaggactctgagccaggggcccgg

SEQ ID NO: 5735 - DNA, 28 bp, synthetic construct
  source 1..28: mol_type = other DNA
ggatgcggcaggtaagccgggcccctgg

SEQ ID NO: 5736 - DNA, 28 bp, synthetic construct
  source 1..28: mol_type = other DNA
tgaaggaggatgcggcaggtaagccggg

SEQ ID NO: 5737 - DNA, 28 bp, synthetic construct
  source 1..28: mol_type = other DNA
gtgaaggaggatgcggcaggtaagccgg

SEQ ID NO: 5738 - DNA, 28 bp, synthetic construct
  source 1..28: mol_type = other DNA
ttgaaaaggtgaaggaggatgcggcagg

SEQ ID NO: 5739 - DNA, 28 bp, synthetic construct
  source 1..28: mol_type = other DNA
tgtcttgaaaaggtgaaggaggatgcgg

SEQ ID NO: 5740 - DNA, 28 bp, synthetic construct
  source 1..28: mol_type = other DNA
ctgcggtgtcttgaaaaggtgaaggagg

SEQ ID NO: 5741 - DNA, 28 bp, synthetic construct
  source 1..28: mol_type = other DNA
gagctgcggtgtcttgaaaaggtgaagg

SEQ ID NO: 5742 - DNA, 28 bp, synthetic construct
  source 1..28: mol_type = other DNA
aggattgagctgcggtgtcttgaaaagg

SEQ ID NO: 5743 - DNA, 28 bp, synthetic construct
  source 1..28: mol_type = other DNA
catcagactggcaaggattgagctgcgg

SEQ ID NO: 5744 - DNA, 28 bp, synthetic construct
  source 1..28: mol_type = other DNA
cgcagctcaatccttgccagtctgatgg

SEQ ID NO: 5745 - DNA, 28 bp, synthetic construct
  source 1..28: mol_type = other DNA
gtcacttacttccatcagactggcaagg

SEQ ID NO: 5746 - DNA, 28 bp, synthetic construct
  source 1..28: mol_type = other DNA
tcagggtcacttacttccatcagactgg

SEQ ID NO: 5747 - DNA, 28 bp, synthetic construct
  source 1..28: mol_type = other DNA
tgtctggggaaggcgatgaagtcagggg

SEQ ID NO: 5748 - DNA, 28 bp, synthetic construct
  source 1..28: mol_type = other DNA
ttgtctggggaaggcgatgaagtcaggg

SEQ ID NO: 5749 - DNA, 28 bp, synthetic construct
  source 1..28: mol_type = other DNA
cttgtctggggaaggcgatgaagtcagg

SEQ ID NO: 5750 - DNA, 28 bp, synthetic construct
  source 1..28: mol_type = other DNA
cgccttccccagacaagcctacagtagg

SEQ ID NO: 5751 - DNA, 28 bp, synthetic construct
  source 1..28: mol_type = other DNA
ttcctactgtaggcttgtctggggaagg

SEQ ID NO: 5752 - DNA, 28 bp, synthetic construct
  source 1..28: mol_type = other DNA
cggattcctactgtaggcttgtctgggg

SEQ ID NO: 5753 - DNA, 28 bp, synthetic construct
  source 1..28: mol_type = other DNA
gcggattcctactgtaggcttgtctggg

SEQ ID NO: 5754 - DNA, 28 bp, synthetic construct
  source 1..28: mol_type = other DNA
agcggattcctactgtaggcttgtctgg

SEQ ID NO: 5755 - DNA, 28 bp, synthetic construct
  source 1..28: mol_type = other DNA
cgcaggaggagcggattcctactgtagg

SEQ ID NO: 5756 - DNA, 28 bp, synthetic construct
  source 1..28: mol_type = other DNA
cagcaggtggcggtcgcaggaggagcgg

SEQ ID NO: 5757 - DNA, 28 bp, synthetic construct
  source 1..28: mol_type = other DNA
cgctcctcctgcgaccgccacctgctgg

SEQ ID NO: 5758 - DNA, 28 bp, synthetic construct
  source 1..28: mol_type = other DNA
gcagccagcaggtggcggtcgcaggagg

SEQ ID NO: 5759 - DNA, 28 bp, synthetic construct
  source 1..28: mol_type = other DNA
gaggcagccagcaggtggcggtcgcagg

SEQ ID NO: 5760 - DNA, 28 bp, synthetic construct
  source 1..28: mol_type = other DNA
gttctgggaggcagccagcaggtggcgg

SEQ ID NO: 5761 - DNA, 28 bp, synthetic construct
  source 1..28: mol_type = other DNA
gcggttctgggaggcagccagcaggtgg

SEQ ID NO: 5762 - DNA, 28 bp, synthetic construct
  source 1..28: mol_type = other DNA
gatgcggttctgggaggcagccagcagg

SEQ ID NO: 5763 - DNA, 28 bp, synthetic construct
  source 1..28: mol_type = other DNA
ctggctgcctcccagaaccgcatcgtgg

SEQ ID NO: 5764 - DNA, 28 bp, synthetic construct
  source 1..28: mol_type = other DNA
ctgcctcccagaaccgcatcgtggatgg

SEQ ID NO: 5765 - DNA, 28 bp, synthetic construct
  source 1..28: mol_type = other DNA
gctccatccacgatgcggttctgggagg

SEQ ID NO: 5766 - DNA, 28 bp, synthetic construct
  source 1..28: mol_type = other DNA
acggctccatccacgatgcggttctggg

SEQ ID NO: 5767 - DNA, 28 bp, synthetic construct
  source 1..28: mol_type = other DNA
cacggctccatccacgatgcggttctgg

SEQ ID NO: 5768 - DNA, 28 bp, synthetic construct
  source 1..28: mol_type = other DNA
agcaaacacggctccatccacgatgcgg

SEQ ID NO: 5769 - DNA, 28 bp, synthetic construct
  source 1..28: mol_type = other DNA
gatggagccgtgtttgctgttctcaagg

SEQ ID NO: 5770 - DNA, 28 bp, synthetic construct
  source 1..28: mol_type = other DNA
aacacagccttgagaacagcaaacacgg

SEQ ID NO: 5771 - DNA, 28 bp, synthetic construct
  source 1..28: mol_type = other DNA
ctgttctcaaggctgtgtttgtacttgg

SEQ ID NO: 5772 - DNA, 28 bp, synthetic construct
  source 1..28: mol_type = other DNA
ctcaaggctgtgtttgtacttggtacgg

SEQ ID NO: 5773 - DNA, 28 bp, synthetic construct
  source 1..28: mol_type = other DNA
tcaaggctgtgtttgtacttggtacggg

SEQ ID NO: 5774 - DNA, 28 bp, synthetic construct
  source 1..28: mol_type = other DNA
caaggctgtgtttgtacttggtacgggg

SEQ ID NO: 5775 - DNA, 28 bp, synthetic construct
  source 1..28: mol_type = other DNA
aaggctgtgtttgtacttggtacggggg

SEQ ID NO: 5776 - DNA, 28 bp, synthetic construct
  source 1..28: mol_type = other DNA
ctgtgtttgtacttggtacgggggtagg

SEQ ID NO: 5777 - DNA, 28 bp, synthetic construct
  source 1..28: mol_type = other DNA
gtttgtacttggtacgggggtaggaagg

SEQ ID NO: 5778 - DNA, 28 bp, synthetic construct
  source 1..28: mol_type = other DNA
tttgtacttggtacgggggtaggaaggg

SEQ ID NO: 5779 - DNA, 28 bp, synthetic construct
  source 1..28: mol_type = other DNA
acttggtacgggggtaggaagggagtgg

SEQ ID NO: 5780 - DNA, 28 bp, synthetic construct
  source 1..28: mol_type = other DNA
tccctatctcccacccgtgaaccacagg

SEQ ID NO: 5781 - DNA, 28 bp, synthetic construct
  source 1..28: mol_type = other DNA
ccctatctcccacccgtgaaccacaggg

SEQ ID NO: 5782 - DNA, 28 bp, synthetic construct
  source 1..28: mol_type = other DNA
cctatctcccacccgtgaaccacagggg

SEQ ID NO: 5783 - DNA, 28 bp, synthetic construct
  source 1..28: mol_type = other DNA
tcccacccgtgaaccacaggggatgcgg

SEQ ID NO: 5784 - DNA, 28 bp, synthetic construct
  source 1..28: mol_type = other DNA
tccgcatcccctgtggttcacgggtggg

SEQ ID NO: 5785 - DNA, 28 bp, synthetic construct
  source 1..28: mol_type = other DNA
ttccgcatcccctgtggttcacgggtgg

SEQ ID NO: 5786 - DNA, 28 bp, synthetic construct
  source 1..28: mol_type = other DNA
cagttccgcatcccctgtggttcacggg

SEQ ID NO: 5787 - DNA, 28 bp, synthetic construct
  source 1..28: mol_type = other DNA
tcagttccgcatcccctgtggttcacgg

SEQ ID NO: 5788 - DNA, 28 bp, synthetic construct
  source 1..28: mol_type = other DNA
gaaccacaggggatgcggaactgaaagg

SEQ ID NO: 5789 - DNA, 28 bp, synthetic construct
  source 1..28: mol_type = other DNA
gaacctttcagttccgcatcccctgtgg

SEQ ID NO: 5790 - DNA, 28 bp, synthetic construct
  source 1..28: mol_type = other DNA
caggggatgcggaactgaaaggttcagg

SEQ ID NO: 5791 - DNA, 28 bp, synthetic construct
  source 1..28: mol_type = other DNA
tgaaaggttcaggcttcactgtgacagg

SEQ ID NO: 5792 - DNA, 28 bp, synthetic construct
  source 1..28: mol_type = other DNA
aaggttcaggcttcactgtgacaggagg

SEQ ID NO: 5793 - DNA, 28 bp, synthetic construct
  source 1..28: mol_type = other DNA
acaggaggaacagaagaacttccagagg

SEQ ID NO: 5794 - DNA, 28 bp, synthetic construct
  source 1..28: mol_type = other DNA
ggaggaacagaagaacttccagaggagg

SEQ ID NO: 5795 - DNA, 28 bp, synthetic construct
  source 1..28: mol_type = other DNA
ggaacagaagaacttccagaggaggagg

SEQ ID NO: 5796 - DNA, 28 bp, synthetic construct
  source 1..28: mol_type = other DNA
gaacagaagaacttccagaggaggaggg

SEQ ID NO: 5797 - DNA, 28 bp, synthetic construct
  source 1..28: mol_type = other DNA
cagaagaacttccagaggaggagggagg

SEQ ID NO: 5798 - DNA, 28 bp, synthetic construct
  source 1..28: mol_type = other DNA
aagaacttccagaggaggagggaggagg

SEQ ID NO: 5799 - DNA, 28 bp, synthetic construct
  source 1..28: mol_type = other DNA
aacttccagaggaggagggaggaggtgg

SEQ ID NO: 5800 - DNA, 28 bp, synthetic construct
  source 1..28: mol_type = other DNA
cactgccacctcctccctcctcctctgg

SEQ ID NO: 5801 - DNA, 28 bp, synthetic construct
  source 1..28: mol_type = other DNA
cagaggaggagggaggaggtggcagtgg

SEQ ID NO: 5802 - DNA, 28 bp, synthetic construct
  source 1..28: mol_type = other DNA
aggaggagggaggaggtggcagtggtgg

SEQ ID NO: 5803 - DNA, 28 bp, synthetic construct
  source 1..28: mol_type = other DNA
ggagggaggaggtggcagtggtggtcgg

SEQ ID NO: 5804 - DNA, 28 bp, synthetic construct
  source 1..28: mol_type = other DNA
gggaggaggtggcagtggtggtcggagg

SEQ ID NO: 5805 - DNA, 28 bp, synthetic construct
  source 1..28: mol_type = other DNA
ggaggtggcagtggtggtcggaggcagg

SEQ ID NO: 5806 - DNA, 28 bp, synthetic construct
  source 1..28: mol_type = other DNA
gaggtggcagtggtggtcggaggcaggg

SEQ ID NO: 5807 - DNA, 28 bp, synthetic construct
  source 1..28: mol_type = other DNA
gtggcagtggtggtcggaggcagggtgg

SEQ ID NO: 5808 - DNA, 28 bp, synthetic construct
  source 1..28: mol_type = other DNA
aggcagggtggccgcaacatctctgtgg

SEQ ID NO: 5809 - DNA, 28 bp, synthetic construct
  source 1..28: mol_type = other DNA
actggctgtctccacagagatgttgcgg

SEQ ID NO: 5810 - DNA, 28 bp, synthetic construct
  source 1..28: mol_type = other DNA
aacatctctgtggagacagccagtctgg

SEQ ID NO: 5811 - DNA, 28 bp, synthetic construct
  source 1..28: mol_type = other DNA
acgtacttggcatagacatccagactgg

SEQ ID NO: 5812 - DNA, 28 bp, synthetic construct
  source 1..28: mol_type = other DNA
tggcagatgctgcgcagcacgtacttgg

SEQ ID NO: 5813 - DNA, 28 bp, synthetic construct
  source 1..28: mol_type = other DNA
tacgtgctgcgcagcatctgccaacagg

SEQ ID NO: 5814 - DNA, 28 bp, synthetic construct
  source 1..28: mol_type = other DNA
tgggaggaaggtgaaactgacctgttgg

SEQ ID NO: 5815 - DNA, 28 bp, synthetic construct
  source 1..28: mol_type = other DNA
ccagtccctgattgtcagcttcctcagg

SEQ ID NO: 5816 - DNA, 28 bp, synthetic construct
  source 1..28: mol_type = other DNA
ccctgattgtcagcttcctcaggaatgg

SEQ ID NO: 5817 - DNA, 28 bp, synthetic construct
  source 1..28: mol_type = other DNA
cctgattgtcagcttcctcaggaatggg

SEQ ID NO: 5818 - DNA, 28 bp, synthetic construct
  source 1..28: mol_type = other DNA
attgtcagcttcctcaggaatgggtagg

SEQ ID NO: 5819 - DNA, 28 bp, synthetic construct
  source 1..28: mol_type = other DNA
ggcaacgttctcctacccattcctgagg

SEQ ID NO: 5820 - DNA, 28 bp, synthetic construct
  source 1..28: mol_type = other DNA
gaacgttgccttaagtctctgtgtgagg

SEQ ID NO: 5821 - DNA, 28 bp, synthetic construct
  source 1..28: mol_type = other DNA
attgctgtcctcacacagagacttaagg

SEQ ID NO: 5822 - DNA, 28 bp, synthetic construct
  source 1..28: mol_type = other DNA
ggcactactcaacactgggtcttgcagg

SEQ ID NO: 5823 - DNA, 28 bp, synthetic construct
  source 1..28: mol_type = other DNA
caagacccagtgttgagtagtgcccagg

SEQ ID NO: 5824 - DNA, 28 bp, synthetic construct
  source 1..28: mol_type = other DNA
ctgcgcctgggcactactcaacactggg

SEQ ID NO: 5825 - DNA, 28 bp, synthetic construct
  source 1..28: mol_type = other DNA
gctgcgcctgggcactactcaacactgg

SEQ ID NO: 5826 - DNA, 28 bp, synthetic construct
  source 1..28: mol_type = other DNA
atgagctgcatgaggcgctgcgcctggg

SEQ ID NO: 5827 - DNA, 28 bp, synthetic construct
  source 1..28: mol_type = other DNA
aatgagctgcatgaggcgctgcgcctgg

SEQ ID NO: 5828 - DNA, 28 bp, synthetic construct
  source 1..28: mol_type = other DNA
atgtggatagcaaatgagctgcatgagg

SEQ ID NO: 5829 - DNA, 28 bp, synthetic construct
  source 1..28: mol_type = other DNA
ctcatttgctatccacatcgactgctgg

SEQ ID NO: 5830 - DNA, 28 bp, synthetic construct
  source 1..28: mol_type = other DNA
tatccacatcgactgctggacaatgagg

SEQ ID NO: 5831 - DNA, 28 bp, synthetic construct
  source 1..28: mol_type = other DNA
catcctcattgtccagcagtcgatgtgg

SEQ ID NO: 5832 - DNA, 28 bp, synthetic construct
  source 1..28: mol_type = other DNA
cacatcgactgctggacaatgaggatgg

SEQ ID NO: 5833 - DNA, 28 bp, synthetic construct
  source 1..28: mol_type = other DNA
acatcgactgctggacaatgaggatggg

SEQ ID NO: 5834 - DNA, 28 bp, synthetic construct
  source 1..28: mol_type = other DNA
catcgactgctggacaatgaggatgggg

SEQ ID NO: 5835 - DNA, 28 bp, synthetic construct
  source 1..28: mol_type = other DNA
caatgaggatggggaaaacccccagcgg

SEQ ID NO: 5836 - DNA, 28 bp, synthetic construct
  source 1..28: mol_type = other DNA
aatgcgctttatgcgctgccgctggggg

SEQ ID NO: 5837 - DNA, 28 bp, synthetic construct
  source 1..28: mol_type = other DNA
gaatgcgctttatgcgctgccgctgggg

SEQ ID NO: 5838 - DNA, 28 bp, synthetic construct
  source 1..28: mol_type = other DNA
agaatgcgctttatgcgctgccgctggg

SEQ ID NO: 5839 - DNA, 28 bp, synthetic construct
  source 1..28: mol_type = other DNA
gagaatgcgctttatgcgctgccgctgg

SEQ ID NO: 5840 - DNA, 28 bp, synthetic construct
  source 1..28: mol_type = other DNA
cggcagcgcataaagcgcattctccagg

SEQ ID NO: 5841 - DNA, 28 bp, synthetic construct
  source 1..28: mol_type = other DNA
agcgcataaagcgcattctccaggtagg

SEQ ID NO: 5842 - DNA, 28 bp, synthetic construct
  source 1..28: mol_type = other DNA
taaagcgcattctccaggtaggccaagg

SEQ ID NO: 5843 - DNA, 28 bp, synthetic construct
  source 1..28: mol_type = other DNA
gcattctccaggtaggccaaggccgtgg

SEQ ID NO: 5844 - DNA, 28 bp, synthetic construct
  source 1..28: mol_type = other DNA
cattctccaggtaggccaaggccgtggg

SEQ ID NO: 5845 - DNA, 28 bp, synthetic construct
  source 1..28: mol_type = other DNA
attctccaggtaggccaaggccgtgggg

SEQ ID NO: 5846 - DNA, 28 bp, synthetic construct
  source 1..28: mol_type = other DNA
ttctccaggtaggccaaggccgtggggg

SEQ ID NO: 5847 - DNA, 28 bp, synthetic construct
  source 1..28: mol_type = other DNA
acagcccccacggccttggcctacctgg

SEQ ID NO: 5848 - DNA, 28 bp, synthetic construct
  source 1..28: mol_type = other DNA
aggtaggccaaggccgtgggggctgtgg

SEQ ID NO: 5849 - DNA, 28 bp, synthetic construct
  source 1..28: mol_type = other DNA
gttctgtgatagaggccccacacccagg

SEQ ID NO: 5850 - DNA, 28 bp, synthetic construct
  source 1..28: mol_type = other DNA
ggtgtggggcctctatcacagaacttgg

SEQ ID NO: 5851 - DNA, 28 bp, synthetic construct
  source 1..28: mol_type = other DNA
gcctctatcacagaacttggaccagtgg

SEQ ID NO: 5852 - DNA, 28 bp, synthetic construct
  source 1..28: mol_type = other DNA
tccactggtccaagttctgtgatagagg

SEQ ID NO: 5853 - DNA, 28 bp, synthetic construct
  source 1..28: mol_type = other DNA
caaggaagactggcgcatggtccactgg

SEQ ID NO: 5854 - DNA, 28 bp, synthetic construct
  source 1..28: mol_type = other DNA
cagtggaccatgcgccagtcttccttgg

SEQ ID NO: 5855 - DNA, 28 bp, synthetic construct
  source 1..28: mol_type = other DNA
tgcagctccaaggaagactggcgcatgg

SEQ ID NO: 5856 - DNA, 28 bp, synthetic construct
  source 1..28: mol_type = other DNA
catgagctgcagctccaaggaagactgg

SEQ ID NO: 5857 - DNA, 28 bp, synthetic construct
  source 1..28: mol_type = other DNA
tgcttgatcatgagctgcagctccaagg

SEQ ID NO: 5858 - DNA, 28 bp, synthetic construct
  source 1..28: mol_type = other DNA
gacccctaacaatgtgagtagtgcctgg

SEQ ID NO: 5859 - DNA, 28 bp, synthetic construct
  source 1..28: mol_type = other DNA
gtccaggcactactcacattgttagggg

SEQ ID NO: 5860 - DNA, 28 bp, synthetic construct
  source 1..28: mol_type = other DNA
ggtccaggcactactcacattgttaggg

SEQ ID NO: 5861 - DNA, 28 bp, synthetic construct
  source 1..28: mol_type = other DNA
gggtccaggcactactcacattgttagg

SEQ ID NO: 5862 - DNA, 28 bp, synthetic construct
  source 1..28: mol_type = other DNA
cacttctgtgcctttcatcctccccagg

SEQ ID NO: 5863 - DNA, 28 bp, synthetic construct
  source 1..28: mol_type = other DNA
gagttcatctcctggggaggatgaaagg

SEQ ID NO: 5864 - DNA, 28 bp, synthetic construct
  source 1..28: mol_type = other DNA
cctccccaggagatgaactccctcttgg

SEQ ID NO: 5865 - DNA, 28 bp, synthetic construct
  source 1..28: mol_type = other DNA
tctccaagagggagttcatctcctgggg

SEQ ID NO: 5866 - DNA, 28 bp, synthetic construct
  source 1..28: mol_type = other DNA
ttctccaagagggagttcatctcctggg

SEQ ID NO: 5867 - DNA, 28 bp, synthetic construct
  source 1..28: mol_type = other DNA
gttctccaagagggagttcatctcctgg

SEQ ID NO: 5868 - DNA, 28 bp, synthetic construct
  source 1..28: mol_type = other DNA
aactccctcttggagaacatcgccaagg

SEQ ID NO: 5869 - DNA, 28 bp, synthetic construct
  source 1..28: mol_type = other DNA
gtggccttggcgatgttctccaagaggg

SEQ ID NO: 5870 - DNA, 28 bp, synthetic construct
  source 1..28: mol_type = other DNA
tgtggccttggcgatgttctccaagagg

SEQ ID NO: 5871 - DNA, 28 bp, synthetic construct
  source 1..28: mol_type = other DNA
gagaacatcgccaaggccacaatcgagg

SEQ ID NO: 5872 - DNA, 28 bp, synthetic construct
  source 1..28: mol_type = other DNA
tgttggaaaacctcgattgtggccttgg

SEQ ID NO: 5873 - DNA, 28 bp, synthetic construct
  source 1..28: mol_type = other DNA
gctgactgttggaaaacctcgattgtgg

SEQ ID NO: 5874 - DNA, 28 bp, synthetic construct
  source 1..28: mol_type = other DNA
aggttttccaacagtcagcagagacagg

SEQ ID NO: 5875 - DNA, 28 bp, synthetic construct
  source 1..28: mol_type = other DNA
ggttttccaacagtcagcagagacaggg

SEQ ID NO: 5876 - DNA, 28 bp, synthetic construct
  source 1..28: mol_type = other DNA
agatgaccctgtctctgctgactgttgg

SEQ ID NO: 5877 - DNA, 28 bp, synthetic construct
  source 1..28: mol_type = other DNA
agtcagcagagacagggtcatcttctgg

SEQ ID NO: 5878 - DNA, 28 bp, synthetic construct
  source 1..28: mol_type = other DNA
gcacaggcttggtcttgctgctgctggg

SEQ ID NO: 5879 - DNA, 28 bp, synthetic construct
  source 1..28: mol_type = other DNA
agcacaggcttggtcttgctgctgctgg

SEQ ID NO: 5880 - DNA, 28 bp, synthetic construct
  source 1..28: mol_type = other DNA
cagcagcaagaccaagcctgtgctcagg

SEQ ID NO: 5881 - DNA, 28 bp, synthetic construct
  source 1..28: mol_type = other DNA
agcaagaccaagcctgtgctcaggtcgg

SEQ ID NO: 5882 - DNA, 28 bp, synthetic construct
  source 1..28: mol_type = other DNA
tttctatccgacctgagcacaggcttgg

SEQ ID NO: 5883 - DNA, 28 bp, synthetic construct
  source 1..28: mol_type = other DNA
acatgtttctatccgacctgagcacagg

SEQ ID NO: 5884 - DNA, 28 bp, synthetic construct
  source 1..28: mol_type = other DNA
tgctcaggtcggatagaaacatgttagg

SEQ ID NO: 5885 - DNA, 28 bp, synthetic construct
  source 1..28: mol_type = other DNA
agctggagaacagacagaggacacaggg

SEQ ID NO: 5886 - DNA, 28 bp, synthetic construct
  source 1..28: mol_type = other DNA
gagctggagaacagacagaggacacagg

SEQ ID NO: 5887 - DNA, 28 bp, synthetic construct
  source 1..28: mol_type = other DNA
ctctagagagctggagaacagacagagg

SEQ ID NO: 5888 - DNA, 28 bp, synthetic construct
  source 1..28: mol_type = other DNA
tgttctccagctctctagagcgctctgg

SEQ ID NO: 5889 - DNA, 28 bp, synthetic construct
  source 1..28: mol_type = other DNA
catacaccagagcgctctagagagctgg

SEQ ID NO: 5890 - DNA, 28 bp, synthetic construct
  source 1..28: mol_type = other DNA
cagctctctagagcgctctggtgtatgg

SEQ ID NO: 5891 - DNA, 28 bp, synthetic construct
  source 1..28: mol_type = other DNA
tctctagagcgctctggtgtatggctgg

SEQ ID NO: 5892 - DNA, 28 bp, synthetic construct
  source 1..28: mol_type = other DNA
ctagagcgctctggtgtatggctggtgg

SEQ ID NO: 5893 - DNA, 28 bp, synthetic construct
  source 1..28: mol_type = other DNA
gaggtgggcagtttagcaatgagggggg

SEQ ID NO: 5894 - DNA, 28 bp, synthetic construct
  source 1..28: mol_type = other DNA
tgaggtgggcagtttagcaatgaggggg

SEQ ID NO: 5895 - DNA, 28 bp, synthetic construct
  source 1..28: mol_type = other DNA
ctgaggtgggcagtttagcaatgagggg

SEQ ID NO: 5896 - DNA, 28 bp, synthetic construct
  source 1..28: mol_type = other DNA
actgaggtgggcagtttagcaatgaggg

SEQ ID NO: 5897 - DNA, 28 bp, synthetic construct
  source 1..28: mol_type = other DNA
gactgaggtgggcagtttagcaatgagg

SEQ ID NO: 5898 - DNA, 28 bp, synthetic construct
  source 1..28: mol_type = other DNA
attgctaaactgcccacctcagtccagg

SEQ ID NO: 5899 - DNA, 28 bp, synthetic construct
  source 1..28: mol_type = other DNA
ttgctaaactgcccacctcagtccaggg

SEQ ID NO: 5900 - DNA, 28 bp, synthetic construct
  source 1..28: mol_type = other DNA
ttaacacatgtccctggactgaggtggg

SEQ ID NO: 5901 - DNA, 28 bp, synthetic construct
  source 1..28: mol_type = other DNA
tttaacacatgtccctggactgaggtgg

SEQ ID NO: 5902 - DNA, 28 bp, synthetic construct
  source 1..28: mol_type = other DNA
acctcagtccagggacatgtgttaaagg

SEQ ID NO: 5903 - DNA, 28 bp, synthetic construct
  source 1..28: mol_type = other DNA
gcctttaacacatgtccctggactgagg

SEQ ID NO: 5904 - DNA, 28 bp, synthetic construct
  source 1..28: mol_type = other DNA
tccagggacatgtgttaaaggctgctgg

SEQ ID NO: 5905 - DNA, 28 bp, synthetic construct
  source 1..28: mol_type = other DNA
ccagggacatgtgttaaaggctgctggg

SEQ ID NO: 5906 - DNA, 28 bp, synthetic construct
  source 1..28: mol_type = other DNA
cagggacatgtgttaaaggctgctgggg

SEQ ID NO: 5907 - DNA, 28 bp, synthetic construct
  source 1..28: mol_type = other DNA
gtgttaaaggctgctggggaagaattgg

SEQ ID NO: 5908 - DNA, 28 bp, synthetic construct
  source 1..28: mol_type = other DNA
aaggctgctggggaagaattggagaagg

SEQ ID NO: 5909 - DNA, 28 bp, synthetic construct
  source 1..28: mol_type = other DNA
aggctgctggggaagaattggagaaggg

SEQ ID NO: 5910 - DNA, 28 bp, synthetic construct
  source 1..28: mol_type = other DNA
gaagaattggagaagggtcagcacctgg

SEQ ID NO: 5911 - DNA, 28 bp, synthetic construct
  source 1..28: mol_type = other DNA
aagaattggagaagggtcagcacctggg

SEQ ID NO: 5912 - DNA, 28 bp, synthetic construct
  source 1..28: mol_type = other DNA
acgttctttgcgtgaagaggaacccagg

SEQ ID NO: 5913 - DNA, 28 bp, synthetic construct
  source 1..28: mol_type = other DNA
tgtcgatcacgttctttgcgtgaagagg

SEQ ID NO: 5914 - DNA, 28 bp, synthetic construct
  source 1..28: mol_type = other DNA
agaacgtgatcgacaaaagcagaagagg

SEQ ID NO: 5915 - DNA, 28 bp, synthetic construct
  source 1..28: mol_type = other DNA
tgatcgacaaaagcagaagaggtaaagg

SEQ ID NO: 5916 - DNA, 28 bp, synthetic construct
  source 1..28: mol_type = other DNA
gatcgacaaaagcagaagaggtaaaggg

SEQ ID NO: 5917 - DNA, 28 bp, synthetic construct
  source 1..28: mol_type = other DNA
atcgacaaaagcagaagaggtaaagggg

SEQ ID NO: 5918 - DNA, 28 bp, synthetic construct
  source 1..28: mol_type = other DNA
aaaagcagaagaggtaaaggggcttagg

SEQ ID NO: 5919 - DNA, 28 bp, synthetic construct
  source 1..28: mol_type = other DNA
aaagcagaagaggtaaaggggcttaggg

SEQ ID NO: 5920 - DNA, 28 bp, synthetic construct
  source 1..28: mol_type = other DNA
agaagaggtaaaggggcttagggagtgg

SEQ ID NO: 5921 - DNA, 28 bp, synthetic construct
  source 1..28: mol_type = other DNA
gataagaagggctgctggctcaataggg

SEQ ID NO: 5922 - DNA, 28 bp, synthetic construct
  source 1..28: mol_type = other DNA
cgataagaagggctgctggctcaatagg

SEQ ID NO: 5923 - DNA, 28 bp, synthetic construct
  source 1..28: mol_type = other DNA
ttgagccagcagcccttcttatcgctgg

SEQ ID NO: 5924 - DNA, 28 bp, synthetic construct
  source 1..28: mol_type = other DNA
tagcaccagcgataagaagggctgctgg

SEQ ID NO: 5925 - DNA, 28 bp, synthetic construct
  source 1..28: mol_type = other DNA
gacatgttagcaccagcgataagaaggg

SEQ ID NO: 5926 - DNA, 28 bp, synthetic construct
  source 1..28: mol_type = other DNA
agacatgttagcaccagcgataagaagg

SEQ ID NO: 5927 - DNA, 28 bp, synthetic construct
  source 1..28: mol_type = other DNA
tatcgctggtgctaacatgtctgaaagg

SEQ ID NO: 5928 - DNA, 28 bp, synthetic construct
  source 1..28: mol_type = other DNA
atcgctggtgctaacatgtctgaaaggg

SEQ ID NO: 5929 - DNA, 28 bp, synthetic construct
  source 1..28: mol_type = other DNA
ctggtgctaacatgtctgaaagggcagg

SEQ ID NO: 5930 - DNA, 28 bp, synthetic construct
  source 1..28: mol_type = other DNA
ctgaaagggcaggatgaacaacgcgagg

SEQ ID NO: 5931 - DNA, 28 bp, synthetic construct
  source 1..28: mol_type = other DNA
tgaaagggcaggatgaacaacgcgaggg

SEQ ID NO: 5932 - DNA, 28 bp, synthetic construct
  source 1..28: mol_type = other DNA
ggactccttacctccctctacagccagg

SEQ ID NO: 5933 - DNA, 28 bp, synthetic construct
  source 1..28: mol_type = other DNA
gtgcacctggctgtagagggaggtaagg

SEQ ID NO: 5934 - DNA, 28 bp, synthetic construct
  source 1..28: mol_type = other DNA
acctccctctacagccaggtgcaccagg

SEQ ID NO: 5935 - DNA, 28 bp, synthetic construct
  source 1..28: mol_type = other DNA
acctggtgcacctggctgtagagggagg

SEQ ID NO: 5936 - DNA, 28 bp, synthetic construct
  source 1..28: mol_type = other DNA
tgtacctggtgcacctggctgtagaggg

SEQ ID NO: 5937 - DNA, 28 bp, synthetic construct
  source 1..28: mol_type = other DNA
ctgtacctggtgcacctggctgtagagg

SEQ ID NO: 5938 - DNA, 28 bp, synthetic construct
  source 1..28: mol_type = other DNA
gccaggtgcaccaggtacagatctctgg

SEQ ID NO: 5939 - DNA, 28 bp, synthetic construct
  source 1..28: mol_type = other DNA
ccaggtgcaccaggtacagatctctggg

SEQ ID NO: 5940 - DNA, 28 bp, synthetic construct
  source 1..28: mol_type = other DNA
gcaccaggtacagatctctgggccatgg

SEQ ID NO: 5941 - DNA, 28 bp, synthetic construct
  source 1..28: mol_type = other DNA
ccaggtacagatctctgggccatggagg

SEQ ID NO: 5942 - DNA, 28 bp, synthetic construct
  source 1..28: mol_type = other DNA
ggtacagatctctgggccatggaggtgg

SEQ ID NO: 5943 - DNA, 28 bp, synthetic construct
  source 1..28: mol_type = other DNA
gtttctattctagattgtgaataattgg

SEQ ID NO: 5944 - DNA, 28 bp, synthetic construct
  source 1..28: mol_type = other DNA
ctttggtttgcaatcatctaagtactgg

SEQ ID NO: 5945 - DNA, 28 bp, synthetic construct
  source 1..28: mol_type = other DNA
tgcaaaccaaagcagcttatgcatgagg

SEQ ID NO: 5946 - DNA, 28 bp, synthetic construct
  source 1..28: mol_type = other DNA
tgagtgcctcatgcataagctgctttgg

SEQ ID NO: 5947 - DNA, 28 bp, synthetic construct
  source 1..28: mol_type = other DNA
gcttatgcatgaggcactcaaactgcgg

SEQ ID NO: 5948 - DNA, 28 bp, synthetic construct
  source 1..28: mol_type = other DNA
gaggcactcaaactgcggctcaacctgg

SEQ ID NO: 5949 - DNA, 28 bp, synthetic construct
  source 1..28: mol_type = other DNA
caaactgcggctcaacctggtgagaagg

SEQ ID NO: 5950 - DNA, 28 bp, synthetic construct
  source 1..28: mol_type = other DNA
ggctcaacctggtgagaaggccagctgg

SEQ ID NO: 5951 - DNA, 28 bp, synthetic construct
  source 1..28: mol_type = other DNA
gctcaacctggtgagaaggccagctggg

SEQ ID NO: 5952 - DNA, 28 bp, synthetic construct
  source 1..28: mol_type = other DNA
ctcaacctggtgagaaggccagctgggg

SEQ ID NO: 5953 - DNA, 28 bp, synthetic construct
  source 1..28: mol_type = other DNA
cttctccccagctggccttctcaccagg

SEQ ID NO: 5954 - DNA, 28 bp, synthetic construct
  source 1..28: mol_type = other DNA
ctgactgacttgttgtggccctggcagg

SEQ ID NO: 5955 - DNA, 28 bp, synthetic construct
  source 1..28: mol_type = other DNA
actgacttgttgtggccctggcaggtgg

SEQ ID NO: 5956 - DNA, 28 bp, synthetic construct
  source 1..28: mol_type = other DNA
ctgacttgttgtggccctggcaggtggg

SEQ ID NO: 5957 - DNA, 28 bp, synthetic construct
  source 1..28: mol_type = other DNA
tgacttgttgtggccctggcaggtgggg

SEQ ID NO: 5958 - DNA, 28 bp, synthetic construct
  source 1..28: mol_type = other DNA
gacttgttgtggccctggcaggtggggg

SEQ ID NO: 5959 - DNA, 28 bp, synthetic construct
  source 1..28: mol_type = other DNA
acttgttgtggccctggcaggtgggggg

SEQ ID NO: 5960 - DNA, 28 bp, synthetic construct
  source 1..28: mol_type = other DNA
tgtcaaacatgccccccacctgccaggg

SEQ ID NO: 5961 - DNA, 28 bp, synthetic construct
  source 1..28: mol_type = other DNA
gtgtcaaacatgccccccacctgccagg

SEQ ID NO: 5962 - DNA, 28 bp, synthetic construct
  source 1..28: mol_type = other DNA
tggcaggtggggggcatgtttgacacgg

SEQ ID NO: 5963 - DNA, 28 bp, synthetic construct
  source 1..28: mol_type = other DNA
gtgcagcgcagcacccagcagaccacgg

SEQ ID NO: 5964 - DNA, 28 bp, synthetic construct
  source 1..28: mol_type = other DNA
gcgcagcacccagcagaccacggagtgg

SEQ ID NO: 5965 - DNA, 28 bp, synthetic construct
  source 1..28: mol_type = other DNA
cgcagcacccagcagaccacggagtggg

SEQ ID NO: 5966 - DNA, 28 bp, synthetic construct
  source 1..28: mol_type = other DNA
agcatggcccactccgtggtctgctggg

SEQ ID NO: 5967 - DNA, 28 bp, synthetic construct
  source 1..28: mol_type = other DNA
gagcatggcccactccgtggtctgctgg

SEQ ID NO: 5968 - DNA, 28 bp, synthetic construct
  source 1..28: mol_type = other DNA
accacggagtgggccatgctcctcctgg

SEQ ID NO: 5969 - DNA, 28 bp, synthetic construct
  source 1..28: mol_type = other DNA
tccaggaggagcatggcccactccgtgg

SEQ ID NO: 5970 - DNA, 28 bp, synthetic construct
  source 1..28: mol_type = other DNA
ctgatgatgatctccaggaggagcatgg

SEQ ID NO: 5971 - DNA, 28 bp, synthetic construct
  source 1..28: mol_type = other DNA
tgctcctcctggagatcatcatcagcgg

SEQ ID NO: 5972 - DNA, 28 bp, synthetic construct
  source 1..28: mol_type = other DNA
agtgccgctgatgatgatctccaggagg

SEQ ID NO: 5973 - DNA, 28 bp, synthetic construct
  source 1..28: mol_type = other DNA
gacagtgccgctgatgatgatctccagg

SEQ ID NO: 5974 - DNA, 28 bp, synthetic construct
  source 1..28: mol_type = other DNA
gagcgggtggggatgctttacttgttgg

SEQ ID NO: 5975 - DNA, 28 bp, synthetic construct
  source 1..28: mol_type = other DNA
acagtagtgaagagctcactgagacagg

SEQ ID NO: 5976 - DNA, 28 bp, synthetic construct
  source 1..28: mol_type = other DNA
ctcagtgagctcttcactactgtgttgg

SEQ ID NO: 5977 - DNA, 28 bp, synthetic construct
  source 1..28: mol_type = other DNA
tggacatgctgagcgtgctcatcaatgg

SEQ ID NO: 5978 - DNA, 28 bp, synthetic construct
  source 1..28: mol_type = other DNA
ggacatgctgagcgtgctcatcaatggg

SEQ ID NO: 5979 - DNA, 28 bp, synthetic construct
  source 1..28: mol_type = other DNA
ctgagcgtgctcatcaatgggacattgg

SEQ ID NO: 5980 - DNA, 28 bp, synthetic construct
  source 1..28: mol_type = other DNA
ctgcagacatgtctagcatctcgcaagg

SEQ ID NO: 5981 - DNA, 28 bp, synthetic construct
  source 1..28: mol_type = other DNA
atgtctagcatctcgcaaggtagcatgg

SEQ ID NO: 5982 - DNA, 28 bp, synthetic construct
  source 1..28: mol_type = other DNA
tctagcatctcgcaaggtagcatggagg

SEQ ID NO: 5983 - DNA, 28 bp, synthetic construct
  source 1..28: mol_type = other DNA
gaaaacaagcgtgcatacatgaacctgg

SEQ ID NO: 5984 - DNA, 28 bp, synthetic construct
  source 1..28: mol_type = other DNA
tacatgaacctggcgaagaagttgcagg

SEQ ID NO: 5985 - DNA, 28 bp, synthetic construct
  source 1..28: mol_type = other DNA
tctgcttacctgcaacttcttcgccagg

SEQ ID NO: 5986 - DNA, 28 bp, synthetic construct
  source 1..28: mol_type = other DNA
tggcgaagaagttgcaggtaagcagagg

SEQ ID NO: 5987 - DNA, 28 bp, synthetic construct
  source 1..28: mol_type = other DNA
agaagttgcaggtaagcagaggaagcgg

SEQ ID NO: 5988 - DNA, 28 bp, synthetic construct
  source 1..28: mol_type = other DNA
gaagttgcaggtaagcagaggaagcggg

SEQ ID NO: 5989 - DNA, 28 bp, synthetic construct
  source 1..28: mol_type = other DNA
aagttgcaggtaagcagaggaagcgggg

SEQ ID NO: 5990 - DNA, 28 bp, synthetic construct
  source 1..28: mol_type = other DNA
agttgcaggtaagcagaggaagcggggg

SEQ ID NO: 5991 - DNA, 28 bp, synthetic construct
  source 1..28: mol_type = other DNA
caggtaagcagaggaagcgggggcaagg

SEQ ID NO: 5992 - DNA, 28 bp, synthetic construct
  source 1..28: mol_type = other DNA
tgtcccatcttcctgtgcctgcagaagg

SEQ ID NO: 5993 - DNA, 28 bp, synthetic construct
  source 1..28: mol_type = other DNA
actccttctgcaggcacaggaagatggg

SEQ ID NO: 5994 - DNA, 28 bp, synthetic construct
  source 1..28: mol_type = other DNA
aactccttctgcaggcacaggaagatgg

SEQ ID NO: 5995 - DNA, 28 bp, synthetic construct
  source 1..28: mol_type = other DNA
atcttcctgtgcctgcagaaggagttgg

SEQ ID NO: 5996 - DNA, 28 bp, synthetic construct
  source 1..28: mol_type = other DNA
tcttcctgtgcctgcagaaggagttggg

SEQ ID NO: 5997 - DNA, 28 bp, synthetic construct
  source 1..28: mol_type = other DNA
cttcctgtgcctgcagaaggagttgggg

SEQ ID NO: 5998 - DNA, 28 bp, synthetic construct
  source 1..28: mol_type = other DNA
ttcctgtgcctgcagaaggagttggggg

SEQ ID NO: 5999 - DNA, 28 bp, synthetic construct
  source 1..28: mol_type = other DNA
ctcccccaactccttctgcaggcacagg

SEQ ID NO: 6000 - DNA, 28 bp, synthetic construct
  source 1..28: mol_type = other DNA
ctggcgctcccccaactccttctgcagg

SEQ ID NO: 6001 - DNA, 28 bp, synthetic construct
  source 1..28: mol_type = other DNA
ttgggggagcgccagtcagacagtctgg

SEQ ID NO: 6002 - DNA, 28 bp, synthetic construct
  source 1..28: mol_type = other DNA
gagcgccagtcagacagtctggaaaagg

SEQ ID NO: 6003 - DNA, 28 bp, synthetic construct
  source 1..28: mol_type = other DNA
gcgaaccttttccagactgtctgactgg

SEQ ID NO: 6004 - DNA, 28 bp, synthetic construct
  source 1..28: mol_type = other DNA
ggtctgcttgggcagtggcagcagctgg

SEQ ID NO: 6005 - DNA, 28 bp, synthetic construct
  source 1..28: mol_type = other DNA
tgacatctcgggtctgcttgggcagtgg

SEQ ID NO: 6006 - DNA, 28 bp, synthetic construct
  source 1..28: mol_type = other DNA
acgtgatgacatctcgggtctgcttggg

SEQ ID NO: 6007 - DNA, 28 bp, synthetic construct
  source 1..28: mol_type = other DNA
cacgtgatgacatctcgggtctgcttgg

SEQ ID NO: 6008 - DNA, 28 bp, synthetic construct
  source 1..28: mol_type = other DNA
tgtggctcacacgtgatgacatctcggg

SEQ ID NO: 6009 - DNA, 28 bp, synthetic construct
  source 1..28: mol_type = other DNA
ctgtggctcacacgtgatgacatctcgg

SEQ ID NO: 6010 - DNA, 28 bp, synthetic construct
  source 1..28: mol_type = other DNA
cgagatgtcatcacgtgtgagccacagg

SEQ ID NO: 6011 - DNA, 28 bp, synthetic construct
  source 1..28: mol_type = other DNA
gagatgtcatcacgtgtgagccacaggg

SEQ ID NO: 6012 - DNA, 28 bp, synthetic construct
  source 1..28: mol_type = other DNA
ccacagggctcccttatcgataccaagg

SEQ ID NO: 6013 - DNA, 28 bp, synthetic construct
  source 1..28: mol_type = other DNA
cacagggctcccttatcgataccaaggg

SEQ ID NO: 6014 - DNA, 28 bp, synthetic construct
  source 1..28: mol_type = other DNA
atcttgttgcccttggtatcgataaggg

SEQ ID NO: 6015 - DNA, 28 bp, synthetic construct
  source 1..28: mol_type = other DNA
aatcttgttgcccttggtatcgataagg

SEQ ID NO: 6016 - DNA, 28 bp, synthetic construct
  source 1..28: mol_type = other DNA
tcgataccaagggcaacaagattgctgg

SEQ ID NO: 6017 - DNA, 28 bp, synthetic construct
  source 1..28: mol_type = other DNA
tcgaagccagcaatcttgttgcccttgg

SEQ ID NO: 6018 - DNA, 28 bp, synthetic construct
  source 1..28: mol_type = other DNA
gctggcttcgattccatcttcaagaagg

SEQ ID NO: 6019 - DNA, 28 bp, synthetic construct
  source 1..28: mol_type = other DNA
ggcttcgattccatcttcaagaaggagg

SEQ ID NO: 6020 - DNA, 28 bp, synthetic construct
  source 1..28: mol_type = other DNA
atggaacatgcctccttcttgaagatgg

SEQ ID NO: 6021 - DNA, 28 bp, synthetic construct
  source 1..28: mol_type = other DNA
cttattgtttttcattttctggagcagg

SEQ ID NO: 6022 - DNA, 28 bp, synthetic construct
  source 1..28: mol_type = other DNA
ttattgtttttcattttctggagcaggg

SEQ ID NO: 6023 - DNA, 28 bp, synthetic construct
  source 1..28: mol_type = other DNA
tttcattttctggagcagggtctacagg

SEQ ID NO: 6024 - DNA, 28 bp, synthetic construct
  source 1..28: mol_type = other DNA
ttccaccaaacagaagatctcgccctgg

SEQ ID NO: 6025 - DNA, 28 bp, synthetic construct
  source 1..28: mol_type = other DNA
tccaccaaacagaagatctcgccctggg

SEQ ID NO: 6026 - DNA, 28 bp, synthetic construct
  source 1..28: mol_type = other DNA
tcccagggcgagatcttctgtttggtgg

SEQ ID NO: 6027 - DNA, 28 bp, synthetic construct
  source 1..28: mol_type = other DNA
agatcccagggcgagatcttctgtttgg

SEQ ID NO: 6028 - DNA, 28 bp, synthetic construct
  source 1..28: mol_type = other DNA
aagatctcgccctgggatctttttgagg

SEQ ID NO: 6029 - DNA, 28 bp, synthetic construct
  source 1..28: mol_type = other DNA
agatctcgccctgggatctttttgaggg

SEQ ID NO: 6030 - DNA, 28 bp, synthetic construct
  source 1..28: mol_type = other DNA
gatctcgccctgggatctttttgagggg

SEQ ID NO: 6031 - DNA, 28 bp, synthetic construct
  source 1..28: mol_type = other DNA
gcttcaacccctcaaaaagatcccaggg

SEQ ID NO: 6032 - DNA, 28 bp, synthetic construct
  source 1..28: mol_type = other DNA
ggcttcaacccctcaaaaagatcccagg

SEQ ID NO: 6033 - DNA, 28 bp, synthetic construct
  source 1..28: mol_type = other DNA
gttgaagccgtcagcaccactctcttgg

SEQ ID NO: 6034 - DNA, 28 bp, synthetic construct
  source 1..28: mol_type = other DNA
ttgaagccgtcagcaccactctcttggg

SEQ ID NO: 6035 - DNA, 28 bp, synthetic construct
  source 1..28: mol_type = other DNA
tgaagccgtcagcaccactctcttgggg

SEQ ID NO: 6036 - DNA, 28 bp, synthetic construct
  source 1..28: mol_type = other DNA
gccgtcagcaccactctcttggggctgg

SEQ ID NO: 6037 - DNA, 28 bp, synthetic construct
  source 1..28: mol_type = other DNA
accagccccaagagagtggtgctgacgg

SEQ ID NO: 6038 - DNA, 28 bp, synthetic construct
  source 1..28: mol_type = other DNA
cagcaccactctcttggggctggtttgg

SEQ ID NO: 6039 - DNA, 28 bp, synthetic construct
  source 1..28: mol_type = other DNA
ctgttccaaaccagccccaagagagtgg

SEQ ID NO: 6040 - DNA, 28 bp, synthetic construct
  source 1..28: mol_type = other DNA
tggggctggtttggaacagtccgagtgg

SEQ ID NO: 6041 - DNA, 28 bp, synthetic construct
  source 1..28: mol_type = other DNA
ctggtttggaacagtccgagtggaccgg

SEQ ID NO: 6042 - DNA, 28 bp, synthetic construct
  source 1..28: mol_type = other DNA
ggaacagtccgagtggaccggcgagtgg

SEQ ID NO: 6043 - DNA, 28 bp, synthetic construct
  source 1..28: mol_type = other DNA
tccgagtggaccggcgagtggctcgagg

SEQ ID NO: 6044 - DNA, 28 bp, synthetic construct
  source 1..28: mol_type = other DNA
tcctcgagccactcgccggtccactcgg

SEQ ID NO: 6045 - DNA, 28 bp, synthetic construct
  source 1..28: mol_type = other DNA
gtggaccggcgagtggctcgaggagagg

SEQ ID NO: 6046 - DNA, 28 bp, synthetic construct
  source 1..28: mol_type = other DNA
ctgctcctctcctcgagccactcgccgg

SEQ ID NO: 6047 - DNA, 28 bp, synthetic construct
  source 1..28: mol_type = other DNA
agtggctcgaggagaggagcagcagcgg

SEQ ID NO: 6048 - DNA, 28 bp, synthetic construct
  source 1..28: mol_type = other DNA
gttgctgctctaccacacacacctgagg

SEQ ID NO: 6049 - DNA, 28 bp, synthetic construct
  source 1..28: mol_type = other DNA
gctctaccacacacacctgaggccccgg

SEQ ID NO: 6050 - DNA, 28 bp, synthetic construct
  source 1..28: mol_type = other DNA
gcggggccggggcctcaggtgtgtgtgg

SEQ ID NO: 6051 - DNA, 28 bp, synthetic construct
  source 1..28: mol_type = other DNA
gtaataggcgcggggccggggcctcagg

SEQ ID NO: 6052 - DNA, 28 bp, synthetic construct
  source 1..28: mol_type = other DNA
aggccccggccccgcgcctattacctgg

SEQ ID NO: 6053 - DNA, 28 bp, synthetic construct
  source 1..28: mol_type = other DNA
gctccaggtaataggcgcggggccgggg

SEQ ID NO: 6054 - DNA, 28 bp, synthetic construct
  source 1..28: mol_type = other DNA
ggctccaggtaataggcgcggggccggg

SEQ ID NO: 6055 - DNA, 28 bp, synthetic construct
  source 1..28: mol_type = other DNA
tggctccaggtaataggcgcggggccgg

SEQ ID NO: 6056 - DNA, 28 bp, synthetic construct
  source 1..28: mol_type = other DNA
gcagtggctccaggtaataggcgcgggg

SEQ ID NO: 6057 - DNA, 28 bp, synthetic construct
  source 1..28: mol_type = other DNA
ggcagtggctccaggtaataggcgcggg

SEQ ID NO: 6058 - DNA, 28 bp, synthetic construct
  source 1..28: mol_type = other DNA
tggcagtggctccaggtaataggcgcgg

SEQ ID NO: 6059 - DNA, 28 bp, synthetic construct
  source 1..28: mol_type = other DNA
ggcagtggcagtggctccaggtaatagg

SEQ ID NO: 6060 - DNA, 28 bp, synthetic construct
  source 1..28: mol_type = other DNA
ttctgggggcagtggcagtggctccagg

SEQ ID NO: 6061 - DNA, 28 bp, synthetic construct
  source 1..28: mol_type = other DNA
ccactgccactgcccccagaagatgagg

SEQ ID NO: 6062 - DNA, 28 bp, synthetic construct
  source 1..28: mol_type = other DNA
gcggctcctcatcttctgggggcagtgg

SEQ ID NO: 6063 - DNA, 28 bp, synthetic construct
  source 1..28: mol_type = other DNA
gagcaggcggctcctcatcttctggggg

SEQ ID NO: 6064 - DNA, 28 bp, synthetic construct
  source 1..28: mol_type = other DNA
ggagcaggcggctcctcatcttctgggg

SEQ ID NO: 6065 - DNA, 28 bp, synthetic construct
  source 1..28: mol_type = other DNA
aggagcaggcggctcctcatcttctggg

SEQ ID NO: 6066 - DNA, 28 bp, synthetic construct
  source 1..28: mol_type = other DNA
taggagcaggcggctcctcatcttctgg

SEQ ID NO: 6067 - DNA, 28 bp, synthetic construct
  source 1..28: mol_type = other DNA
caggctctagcagggtaggagcaggcgg

SEQ ID NO: 6068 - DNA, 28 bp, synthetic construct
  source 1..28: mol_type = other DNA
tctcaggctctagcagggtaggagcagg

SEQ ID NO: 6069 - DNA, 28 bp, synthetic construct
  source 1..28: mol_type = other DNA
cctaccctgctagagcctgagaaaaagg

SEQ ID NO: 6070 - DNA, 28 bp, synthetic construct
  source 1..28: mol_type = other DNA
ggagcctttttctcaggctctagcaggg

SEQ ID NO: 6071 - DNA, 28 bp, synthetic construct
  source 1..28: mol_type = other DNA
tggagcctttttctcaggctctagcagg

SEQ ID NO: 6072 - DNA, 28 bp, synthetic construct
  source 1..28: mol_type = other DNA
tggggggctctggagcctttttctcagg

SEQ ID NO: 6073 - DNA, 28 bp, synthetic construct
  source 1..28: mol_type = other DNA
ccagagccccccaaaactgacaaaccgg

SEQ ID NO: 6074 - DNA, 28 bp, synthetic construct
  source 1..28: mol_type = other DNA
cagagccccccaaaactgacaaaccggg

SEQ ID NO: 6075 - DNA, 28 bp, synthetic construct
  source 1..28: mol_type = other DNA
agagccccccaaaactgacaaaccgggg

SEQ ID NO: 6076 - DNA, 28 bp, synthetic construct
  source 1..28: mol_type = other DNA
gagccccccaaaactgacaaaccggggg

SEQ ID NO: 6077 - DNA, 28 bp, synthetic construct
  source 1..28: mol_type = other DNA
cagcccccggtttgtcagttttgggggg

SEQ ID NO: 6078 - DNA, 28 bp, synthetic construct
  source 1..28: mol_type = other DNA
gcagcccccggtttgtcagttttggggg

SEQ ID NO: 6079 - DNA, 28 bp, synthetic construct
  source 1..28: mol_type = other DNA
agcagcccccggtttgtcagttttgggg

SEQ ID NO: 6080 - DNA, 28 bp, synthetic construct
  source 1..28: mol_type = other DNA
gagcagcccccggtttgtcagttttggg

SEQ ID NO: 6081 - DNA, 28 bp, synthetic construct
  source 1..28: mol_type = other DNA
ggagcagcccccggtttgtcagttttgg

SEQ ID NO: 6082 - DNA, 28 bp, synthetic construct
  source 1..28: mol_type = other DNA
ccgggggctgctccacccagtactgagg

SEQ ID NO: 6083 - DNA, 28 bp, synthetic construct
  source 1..28: mol_type = other DNA
tcttcttgcgttcctcagtactgggtgg

SEQ ID NO: 6084 - DNA, 28 bp, synthetic construct
  source 1..28: mol_type = other DNA
acttcttcttgcgttcctcagtactggg

SEQ ID NO: 6085 - DNA, 28 bp, synthetic construct
  source 1..28: mol_type = other DNA
gacttcttcttgcgttcctcagtactgg

SEQ ID NO: 6086 - DNA, 28 bp, synthetic construct
  source 1..28: mol_type = other DNA
gaggaacgcaagaagaagtccaccaagg

SEQ ID NO: 6087 - DNA, 28 bp, synthetic construct
  source 1..28: mol_type = other DNA
aggaacgcaagaagaagtccaccaaggg

SEQ ID NO: 6088 - DNA, 28 bp, synthetic construct
  source 1..28: mol_type = other DNA
ggctggctgcgtttcttgcccttggtgg

SEQ ID NO: 6089 - DNA, 28 bp, synthetic construct
  source 1..28: mol_type = other DNA
gctggctggctgcgtttcttgcccttgg

SEQ ID NO: 6090 - DNA, 28 bp, synthetic construct
  source 1..28: mol_type = other DNA
cgcagccagccagctaccaagacagagg

SEQ ID NO: 6091 - DNA, 28 bp, synthetic construct
  source 1..28: mol_type = other DNA
gctcacctctgtcttggtagctggctgg

SEQ ID NO: 6092 - DNA, 28 bp, synthetic construct
  source 1..28: mol_type = other DNA
aggcgctcacctctgtcttggtagctgg

SEQ ID NO: 6093 - DNA, 28 bp, synthetic construct
  source 1..28: mol_type = other DNA
acgggggaggcgctcacctctgtcttgg

SEQ ID NO: 6094 - DNA, 28 bp, synthetic construct
  source 1..28: mol_type = other DNA
caccctcttcctctgccactcacacagg

SEQ ID NO: 6095 - DNA, 28 bp, synthetic construct
  source 1..28: mol_type = other DNA
gtcctgtgtgagtggcagaggaagaggg

SEQ ID NO: 6096 - DNA, 28 bp, synthetic construct
  source 1..28: mol_type = other DNA
agtcctgtgtgagtggcagaggaagagg

SEQ ID NO: 6097 - DNA, 28 bp, synthetic construct
  source 1..28: mol_type = other DNA
ttcctctgccactcacacaggactatgg

SEQ ID NO: 6098 - DNA, 28 bp, synthetic construct
  source 1..28: mol_type = other DNA
ttccatagtcctgtgtgagtggcagagg

SEQ ID NO: 6099 - DNA, 28 bp, synthetic construct
  source 1..28: mol_type = other DNA
ctgccactcacacaggactatggaatgg

SEQ ID NO: 6100 - DNA, 28 bp, synthetic construct
  source 1..28: mol_type = other DNA
tgccactcacacaggactatggaatggg

SEQ ID NO: 6101 - DNA, 28 bp, synthetic construct
  source 1..28: mol_type = other DNA
ggcccattccatagtcctgtgtgagtgg

SEQ ID NO: 6102 - DNA, 28 bp, synthetic construct
  source 1..28: mol_type = other DNA
ctcacacaggactatggaatgggcccgg

SEQ ID NO: 6103 - DNA, 28 bp, synthetic construct
  source 1..28: mol_type = other DNA
tcacacaggactatggaatgggcccggg

SEQ ID NO: 6104 - DNA, 28 bp, synthetic construct
  source 1..28: mol_type = other DNA
acaggactatggaatgggcccgggtcgg

SEQ ID NO: 6105 - DNA, 28 bp, synthetic construct
  source 1..28: mol_type = other DNA
actatggaatgggcccgggtcggagcgg

SEQ ID NO: 6106 - DNA, 28 bp, synthetic construct
  source 1..28: mol_type = other DNA
tgggcccgggtcggagcggcccttatgg

SEQ ID NO: 6107 - DNA, 28 bp, synthetic construct
  source 1..28: mol_type = other DNA
cacaccataagggccgctccgacccggg

SEQ ID NO: 6108 - DNA, 28 bp, synthetic construct
  source 1..28: mol_type = other DNA
tcacaccataagggccgctccgacccgg

SEQ ID NO: 6109 - DNA, 28 bp, synthetic construct
  source 1..28: mol_type = other DNA
ggcccttatggtgtgacagtgcctccgg

SEQ ID NO: 6110 - DNA, 28 bp, synthetic construct
  source 1..28: mol_type = other DNA
gtccggaggcactgtcacaccataaggg

SEQ ID NO: 6111 - DNA, 28 bp, synthetic construct
  source 1..28: mol_type = other DNA
ggtccggaggcactgtcacaccataagg

SEQ ID NO: 6112 - DNA, 28 bp, synthetic construct
  source 1..28: mol_type = other DNA
ggtttgggtggtgcaggaggtccggagg

SEQ ID NO: 6113 - DNA, 28 bp, synthetic construct
  source 1..28: mol_type = other DNA
cagggtttgggtggtgcaggaggtccgg

SEQ ID NO: 6114 - DNA, 28 bp, synthetic construct
  source 1..28: mol_type = other DNA
cggacctcctgcaccacccaaaccctgg

SEQ ID NO: 6115 - DNA, 28 bp, synthetic construct
  source 1..28: mol_type = other DNA
agaaccagggtttgggtggtgcaggagg

SEQ ID NO: 6116 - DNA, 28 bp, synthetic construct
  source 1..28: mol_type = other DNA
tatagaaccagggtttgggtggtgcagg

SEQ ID NO: 6117 - DNA, 28 bp, synthetic construct
  source 1..28: mol_type = other DNA
gtgtgttatagaaccagggtttgggtgg

SEQ ID NO: 6118 - DNA, 28 bp, synthetic construct
  source 1..28: mol_type = other DNA
aaggtgtgttatagaaccagggtttggg

SEQ ID NO: 6119 - DNA, 28 bp, synthetic construct
  source 1..28: mol_type = other DNA
taaggtgtgttatagaaccagggtttgg

SEQ ID NO: 6120 - DNA, 28 bp, synthetic construct
  source 1..28: mol_type = other DNA
gtagttaaggtgtgttatagaaccaggg

SEQ ID NO: 6121 - DNA, 28 bp, synthetic construct
  source 1..28: mol_type = other DNA
tgtagttaaggtgtgttatagaaccagg

SEQ ID NO: 6122 - DNA, 28 bp, synthetic construct
  source 1..28: mol_type = other DNA
tggttctataacacaccttaactacagg

SEQ ID NO: 6123 - DNA, 28 bp, synthetic construct
  source 1..28: mol_type = other DNA
ctataacacaccttaactacaggcaagg

SEQ ID NO: 6124 - DNA, 28 bp, synthetic construct
  source 1..28: mol_type = other DNA
accttaactacaggcaaggctccatagg

SEQ ID NO: 6125 - DNA, 28 bp, synthetic construct
  source 1..28: mol_type = other DNA
gcctatggagccttgcctgtagttaagg

SEQ ID NO: 6126 - DNA, 28 bp, synthetic construct
  source 1..28: mol_type = other DNA
ggctggttctgggtgtacaggcctatgg

SEQ ID NO: 6127 - DNA, 28 bp, synthetic construct
  source 1..28: mol_type = other DNA
aggtagtggctggttctgggtgtacagg

SEQ ID NO: 6128 - DNA, 28 bp, synthetic construct
  source 1..28: mol_type = other DNA
acacccagaaccagccactacctgcagg

SEQ ID NO: 6129 - DNA, 28 bp, synthetic construct
  source 1..28: mol_type = other DNA
tcacctgcaggtagtggctggttctggg

SEQ ID NO: 6130 - DNA, 28 bp, synthetic construct
  source 1..28: mol_type = other DNA
ctcacctgcaggtagtggctggttctgg

SEQ ID NO: 6131 - DNA, 28 bp, synthetic construct
  source 1..28: mol_type = other DNA
ctggcactcacctgcaggtagtggctgg

SEQ ID NO: 6132 - DNA, 28 bp, synthetic construct
  source 1..28: mol_type = other DNA
gtggctggcactcacctgcaggtagtgg

SEQ ID NO: 6133 - DNA, 28 bp, synthetic construct
  source 1..28: mol_type = other DNA
tacctgcaggtgagtgccagccactagg

SEQ ID NO: 6134 - DNA, 28 bp, synthetic construct
  source 1..28: mol_type = other DNA
ttcctagtggctggcactcacctgcagg

SEQ ID NO: 6135 - DNA, 28 bp, synthetic construct
  source 1..28: mol_type = other DNA
ggtgagtgccagccactaggaatgctgg

SEQ ID NO: 6136 - DNA, 28 bp, synthetic construct
  source 1..28: mol_type = other DNA
tagaggtcagcccactctccttttcagg

SEQ ID NO: 6137 - DNA, 28 bp, synthetic construct
  source 1..28: mol_type = other DNA
aggtcagcccactctccttttcaggtgg

SEQ ID NO: 6138 - DNA, 28 bp, synthetic construct
  source 1..28: mol_type = other DNA
acgagggccacctgaaaaggagagtggg

SEQ ID NO: 6139 - DNA, 28 bp, synthetic construct
  source 1..28: mol_type = other DNA
cacgagggccacctgaaaaggagagtgg

SEQ ID NO: 6140 - DNA, 28 bp, synthetic construct
  source 1..28: mol_type = other DNA
ctctccttttcaggtggccctcgtgtgg

SEQ ID NO: 6141 - DNA, 28 bp, synthetic construct
  source 1..28: mol_type = other DNA
gggtccacacgagggccacctgaaaagg

SEQ ID NO: 6142 - DNA, 28 bp, synthetic construct
  source 1..28: mol_type = other DNA
cacaggacggtatgggtccacacgaggg

SEQ ID NO: 6143 - DNA, 28 bp, synthetic construct
  source 1..28: mol_type = other DNA
gcacaggacggtatgggtccacacgagg

SEQ ID NO: 6144 - DNA, 28 bp, synthetic construct
  source 1..28: mol_type = other DNA
cattggtaagcgcacaggacggtatggg

SEQ ID NO: 6145 - DNA, 28 bp, synthetic construct
  source 1..28: mol_type = other DNA
gcattggtaagcgcacaggacggtatgg

SEQ ID NO: 6146 - DNA, 28 bp, synthetic construct
  source 1..28: mol_type = other DNA
cttctgcattggtaagcgcacaggacgg

SEQ ID NO: 6147 - DNA, 28 bp, synthetic construct
  source 1..28: mol_type = other DNA
gcagcttctgcattggtaagcgcacagg

SEQ ID NO: 6148 - DNA, 28 bp, synthetic construct
  source 1..28: mol_type = other DNA
ttggtcgggtgggcagcttctgcattgg

SEQ ID NO: 6149 - DNA, 28 bp, synthetic construct
  source 1..28: mol_type = other DNA
agctgcccacccgaccaacttaccctgg

SEQ ID NO: 6150 - DNA, 28 bp, synthetic construct
  source 1..28: mol_type = other DNA
gcactccagggtaagttggtcgggtggg

SEQ ID NO: 6151 - DNA, 28 bp, synthetic construct
  source 1..28: mol_type = other DNA
agcactccagggtaagttggtcgggtgg

SEQ ID NO: 6152 - DNA, 28 bp, synthetic construct
  source 1..28: mol_type = other DNA
ggcagcactccagggtaagttggtcggg

SEQ ID NO: 6153 - DNA, 28 bp, synthetic construct
  source 1..28: mol_type = other DNA
gggcagcactccagggtaagttggtcgg

SEQ ID NO: 6154 - DNA, 28 bp, synthetic construct
  source 1..28: mol_type = other DNA
ttgtgggcagcactccagggtaagttgg

SEQ ID NO: 6155 - DNA, 28 bp, synthetic construct
  source 1..28: mol_type = other DNA
agtcatggttgtgggcagcactccaggg

SEQ ID NO: 6156 - DNA, 28 bp, synthetic construct
  source 1..28: mol_type = other DNA
cagtcatggttgtgggcagcactccagg

SEQ ID NO: 6157 - DNA, 28 bp, synthetic construct
  source 1..28: mol_type = other DNA
ctggagtgctgcccacaaccatgactgg

SEQ ID NO: 6158 - DNA, 28 bp, synthetic construct
  source 1..28: mol_type = other DNA
ctgcccacaaccatgactggcgtcatgg

SEQ ID NO: 6159 - DNA, 28 bp, synthetic construct
  source 1..28: mol_type = other DNA
tgcccacaaccatgactggcgtcatggg

SEQ ID NO: 6160 - DNA, 28 bp, synthetic construct
  source 1..28: mol_type = other DNA
aacccatgacgccagtcatggttgtggg

SEQ ID NO: 6161 - DNA, 28 bp, synthetic construct
  source 1..28: mol_type = other DNA
aaacccatgacgccagtcatggttgtgg

SEQ ID NO: 6162 - DNA, 28 bp, synthetic construct
  source 1..28: mol_type = other DNA
ggttctaaacccatgacgccagtcatgg

SEQ ID NO: 6163 - DNA, 28 bp, synthetic construct
  source 1..28: mol_type = other DNA
ggtacacagaggtcttataagaggaggg

SEQ ID NO: 6164 - DNA, 28 bp, synthetic construct
  source 1..28: mol_type = other DNA
cggtacacagaggtcttataagaggagg

SEQ ID NO: 6165 - DNA, 28 bp, synthetic construct
  source 1..28: mol_type = other DNA
ctcctcttataagacctctgtgtaccgg

SEQ ID NO: 6166 - DNA, 28 bp, synthetic construct
  source 1..28: mol_type = other DNA
tgccggtacacagaggtcttataagagg

SEQ ID NO: 6167 - DNA, 28 bp, synthetic construct
  source 1..28: mol_type = other DNA
gcaggttgctgctgccggtacacagagg

SEQ ID NO: 6168 - DNA, 28 bp, synthetic construct
  source 1..28: mol_type = other DNA
tctgtgtaccggcagcagcaacctgcgg

SEQ ID NO: 6169 - DNA, 28 bp, synthetic construct
  source 1..28: mol_type = other DNA
ttggggcaccgcaggttgctgctgccgg

SEQ ID NO: 6170 - DNA, 28 bp, synthetic construct
  source 1..28: mol_type = other DNA
ggcagcagcaacctgcggtgccccaagg

SEQ ID NO: 6171 - DNA, 28 bp, synthetic construct
  source 1..28: mol_type = other DNA
gaaggcgctgtccttggggcaccgcagg

SEQ ID NO: 6172 - DNA, 28 bp, synthetic construct
  source 1..28: mol_type = other DNA
gctgttggcgaaggcgctgtccttgggg

SEQ ID NO: 6173 - DNA, 28 bp, synthetic construct
  source 1..28: mol_type = other DNA
agctgttggcgaaggcgctgtccttggg

SEQ ID NO: 6174 - DNA, 28 bp, synthetic construct
  source 1..28: mol_type = other DNA
gagctgttggcgaaggcgctgtccttgg

SEQ ID NO: 6175 - DNA, 28 bp, synthetic construct
  source 1..28: mol_type = other DNA
ggacagcgccttcgccaacagctccagg

SEQ ID NO: 6176 - DNA, 28 bp, synthetic construct
  source 1..28: mol_type = other DNA
tatctttgcctggagctgttggcgaagg

SEQ ID NO: 6177 - DNA, 28 bp, synthetic construct
  source 1..28: mol_type = other DNA
tctcactatctttgcctggagctgttgg

SEQ ID NO: 6178 - DNA, 28 bp, synthetic construct
  source 1..28: mol_type = other DNA
aacagctccaggcaaagatagtgagagg

SEQ ID NO: 6179 - DNA, 28 bp, synthetic construct
  source 1..28: mol_type = other DNA
acagctccaggcaaagatagtgagaggg

SEQ ID NO: 6180 - DNA, 28 bp, synthetic construct
  source 1..28: mol_type = other DNA
cagctccaggcaaagatagtgagagggg

SEQ ID NO: 6181 - DNA, 28 bp, synthetic construct
  source 1..28: mol_type = other DNA
tactgcccctctcactatctttgcctgg

SEQ ID NO: 6182 - DNA, 28 bp, synthetic construct
  source 1..28: mol_type = other DNA
aggcaaagatagtgagaggggcagtagg

SEQ ID NO: 6183 - DNA, 28 bp, synthetic construct
  source 1..28: mol_type = other DNA
ggcaaagatagtgagaggggcagtaggg

SEQ ID NO: 6184 - DNA, 28 bp, synthetic construct
  source 1..28: mol_type = other DNA
aaagatagtgagaggggcagtagggagg

SEQ ID NO: 6185 - DNA, 28 bp, synthetic construct
  source 1..28: mol_type = other DNA
aagatagtgagaggggcagtagggaggg

SEQ ID NO: 6186 - DNA, 28 bp, synthetic construct
  source 1..28: mol_type = other DNA
tctcttttctccctttagcagagtcagg

SEQ ID NO: 6187 - DNA, 28 bp, synthetic construct
  source 1..28: mol_type = other DNA
ctcttttctccctttagcagagtcaggg

SEQ ID NO: 6188 - DNA, 28 bp, synthetic construct
  source 1..28: mol_type = other DNA
tccctttagcagagtcagggcatgttgg

SEQ ID NO: 6189 - DNA, 28 bp, synthetic construct
  source 1..28: mol_type = other DNA
ccctttagcagagtcagggcatgttggg

SEQ ID NO: 6190 - DNA, 28 bp, synthetic construct
  source 1..28: mol_type = other DNA
tcccaacatgccctgactctgctaaagg

SEQ ID NO: 6191 - DNA, 28 bp, synthetic construct
  source 1..28: mol_type = other DNA
gtaggaagagctgggagtcatctgatgg

SEQ ID NO: 6192 - DNA, 28 bp, synthetic construct
  source 1..28: mol_type = other DNA
atcagatgactcccagctcttcctacgg

SEQ ID NO: 6193 - DNA, 28 bp, synthetic construct
  source 1..28: mol_type = other DNA
aagtctgcaaaccgtaggaagagctggg

SEQ ID NO: 6194 - DNA, 28 bp, synthetic construct
  source 1..28: mol_type = other DNA
gaagtctgcaaaccgtaggaagagctgg

SEQ ID NO: 6195 - DNA, 28 bp, synthetic construct
  source 1..28: mol_type = other DNA
tcttcctacggtttgcagacttcccagg

SEQ ID NO: 6196 - DNA, 28 bp, synthetic construct
  source 1..28: mol_type = other DNA
cttacctgggaagtctgcaaaccgtagg

SEQ ID NO: 6197 - DNA, 28 bp, synthetic construct
  source 1..28: mol_type = other DNA
tttgcagacttcccaggtaagagcctgg

SEQ ID NO: 6198 - DNA, 28 bp, synthetic construct
  source 1..28: mol_type = other DNA
ttgcagacttcccaggtaagagcctggg

SEQ ID NO: 6199 - DNA, 28 bp, synthetic construct
  source 1..28: mol_type = other DNA
gtctcacaatcccaggctcttacctggg

SEQ ID NO: 6200 - DNA, 28 bp, synthetic construct
  source 1..28: mol_type = other DNA
agtctcacaatcccaggctcttacctgg

SEQ ID NO: 6201 - DNA, 28 bp, synthetic construct
  source 1..28: mol_type = other DNA
ggtaagagcctgggattgtgagactagg

SEQ ID NO: 6202 - DNA, 28 bp, synthetic construct
  source 1..28: mol_type = other DNA
gtaagagcctgggattgtgagactaggg

SEQ ID NO: 6203 - DNA, 28 bp, synthetic construct
  source 1..28: mol_type = other DNA
taagagcctgggattgtgagactagggg

SEQ ID NO: 6204 - DNA, 28 bp, synthetic construct
  source 1..28: mol_type = other DNA
aagagcctgggattgtgagactaggggg

SEQ ID NO: 6205 - DNA, 28 bp, synthetic construct
  source 1..28: mol_type = other DNA
ctcatccccctagtctcacaatcccagg

SEQ ID NO: 6206 - DNA, 28 bp, synthetic construct
  source 1..28: mol_type = other DNA
ctgggattgtgagactagggggatgagg

SEQ ID NO: 6207 - DNA, 28 bp, synthetic construct
  source 1..28: mol_type = other DNA
tgaggcaagctgctctgcatactctcgg

SEQ ID NO: 6208 - DNA, 28 bp, synthetic construct
  source 1..28: mol_type = other DNA
gagggaagaaggagagagggaatcaggg

SEQ ID NO: 6209 - DNA, 28 bp, synthetic construct
  source 1..28: mol_type = other DNA
ggagggaagaaggagagagggaatcagg

SEQ ID NO: 6210 - DNA, 28 bp, synthetic construct
  source 1..28: mol_type = other DNA
gattccctctctccttcttccctccagg

SEQ ID NO: 6211 - DNA, 28 bp, synthetic construct
  source 1..28: mol_type = other DNA
attccctctctccttcttccctccaggg

SEQ ID NO: 6212 - DNA, 28 bp, synthetic construct
  source 1..28: mol_type = other DNA
tagccctggagggaagaaggagagaggg

SEQ ID NO: 6213 - DNA, 28 bp, synthetic construct
  source 1..28: mol_type = other DNA
atagccctggagggaagaaggagagagg

SEQ ID NO: 6214 - DNA, 28 bp, synthetic construct
  source 1..28: mol_type = other DNA
aaggagtatagccctggagggaagaagg

SEQ ID NO: 6215 - DNA, 28 bp, synthetic construct
  source 1..28: mol_type = other DNA
gaaacataaggagtatagccctggaggg

SEQ ID NO: 6216 - DNA, 28 bp, synthetic construct
  source 1..28: mol_type = other DNA
agaaacataaggagtatagccctggagg

SEQ ID NO: 6217 - DNA, 28 bp, synthetic construct
  source 1..28: mol_type = other DNA
atgagaaacataaggagtatagccctgg

SEQ ID NO: 6218 - DNA, 28 bp, synthetic construct
  source 1..28: mol_type = other DNA
ggctatactccttatgtttctcatgtgg

SEQ ID NO: 6219 - DNA, 28 bp, synthetic construct
  source 1..28: mol_type = other DNA
gctatactccttatgtttctcatgtggg

SEQ ID NO: 6220 - DNA, 28 bp, synthetic construct
  source 1..28: mol_type = other DNA
gctgcaatcccacatgagaaacataagg

SEQ ID NO: 6221 - DNA, 28 bp, synthetic construct
  source 1..28: mol_type = other DNA
ctcatgtgggattgcagcaacacacagg

SEQ ID NO: 6222 - DNA, 28 bp, synthetic construct
  source 1..28: mol_type = other DNA
gattgcagcaacacacaggccctgcagg

SEQ ID NO: 6223 - DNA, 28 bp, synthetic construct
  source 1..28: mol_type = other DNA
caacacacaggccctgcaggtaccatgg

SEQ ID NO: 6224 - DNA, 28 bp, synthetic construct
  source 1..28: mol_type = other DNA
gctggggggcaccatggtacctgcaggg

SEQ ID NO: 6225 - DNA, 28 bp, synthetic construct
  source 1..28: mol_type = other DNA
agctggggggcaccatggtacctgcagg

SEQ ID NO: 6226 - DNA, 28 bp, synthetic construct
  source 1..28: mol_type = other DNA
tggctggagtagctggggggcaccatgg

SEQ ID NO: 6227 - DNA, 28 bp, synthetic construct
  source 1..28: mol_type = other DNA
ggtaaggctggctggagtagctgggggg

SEQ ID NO: 6228 - DNA, 28 bp, synthetic construct
  source 1..28: mol_type = other DNA
tggtaaggctggctggagtagctggggg

SEQ ID NO: 6229 - DNA, 28 bp, synthetic construct
  source 1..28: mol_type = other DNA
ctggtaaggctggctggagtagctgggg

SEQ ID NO: 6230 - DNA, 28 bp, synthetic construct
  source 1..28: mol_type = other DNA
tctggtaaggctggctggagtagctggg

SEQ ID NO: 6231 - DNA, 28 bp, synthetic construct
  source 1..28: mol_type = other DNA
ctctggtaaggctggctggagtagctgg

SEQ ID NO: 6232 - DNA, 28 bp, synthetic construct
  source 1..28: mol_type = other DNA
gggtgggtgctctggtaaggctggctgg

SEQ ID NO: 6233 - DNA, 28 bp, synthetic construct
  source 1..28: mol_type = other DNA
agaagggtgggtgctctggtaaggctgg

SEQ ID NO: 6234 - DNA, 28 bp, synthetic construct
  source 1..28: mol_type = other DNA
tggtagaagggtgggtgctctggtaagg

SEQ ID NO: 6235 - DNA, 28 bp, synthetic construct
  source 1..28: mol_type = other DNA
aggattggtagaagggtgggtgctctgg

SEQ ID NO: 6236 - DNA, 28 bp, synthetic construct
  source 1..28: mol_type = other DNA
acaagagtaggattggtagaagggtggg

SEQ ID NO: 6237 - DNA, 28 bp, synthetic construct
  source 1..28: mol_type = other DNA
tacaagagtaggattggtagaagggtgg

SEQ ID NO: 6238 - DNA, 28 bp, synthetic construct
  source 1..28: mol_type = other DNA
atctacaagagtaggattggtagaaggg

SEQ ID NO: 6239 - DNA, 28 bp, synthetic construct
  source 1..28: mol_type = other DNA
gatctacaagagtaggattggtagaagg

SEQ ID NO: 6240 - DNA, 28 bp, synthetic construct
  source 1..28: mol_type = other DNA
cgggtaggatctacaagagtaggattgg

SEQ ID NO: 6241 - DNA, 28 bp, synthetic construct
  source 1..28: mol_type = other DNA
ggtggcgggtaggatctacaagagtagg

SEQ ID NO: 6242 - DNA, 28 bp, synthetic construct
  source 1..28: mol_type = other DNA
agatcctacccgccacctgcaacagcgg

SEQ ID NO: 6243 - DNA, 28 bp, synthetic construct
  source 1..28: mol_type = other DNA
tgggccgctgttgcaggtggcgggtagg

SEQ ID NO: 6244 - DNA, 28 bp, synthetic construct
  source 1..28: mol_type = other DNA
cccgccacctgcaacagcggcccagtgg

SEQ ID NO: 6245 - DNA, 28 bp, synthetic construct
  source 1..28: mol_type = other DNA
gccactgggccgctgttgcaggtggcgg

SEQ ID NO: 6246 - DNA, 28 bp, synthetic construct
  source 1..28: mol_type = other DNA
atagccactgggccgctgttgcaggtgg

SEQ ID NO: 6247 - DNA, 28 bp, synthetic construct
  source 1..28: mol_type = other DNA
cacatagccactgggccgctgttgcagg

SEQ ID NO: 6248 - DNA, 28 bp, synthetic construct
  source 1..28: mol_type = other DNA
cggcccagtggctatgtgcaccagcagg

SEQ ID NO: 6249 - DNA, 28 bp, synthetic construct
  source 1..28: mol_type = other DNA
gggcctgctggtgcacatagccactggg

SEQ ID NO: 6250 - DNA, 28 bp, synthetic construct
  source 1..28: mol_type = other DNA
ggggcctgctggtgcacatagccactgg

SEQ ID NO: 6251 - DNA, 28 bp, synthetic construct
  source 1..28: mol_type = other DNA
atgtgcaccagcaggcccccacctatgg

SEQ ID NO: 6252 - DNA, 28 bp, synthetic construct
  source 1..28: mol_type = other DNA
accagcaggcccccacctatggacatgg

SEQ ID NO: 6253 - DNA, 28 bp, synthetic construct
  source 1..28: mol_type = other DNA
tccatgtccataggtgggggcctgctgg

SEQ ID NO: 6254 - DNA, 28 bp, synthetic construct
  source 1..28: mol_type = other DNA
gaggtcagtccatgtccataggtggggg

SEQ ID NO: 6255 - DNA, 28 bp, synthetic construct
  source 1..28: mol_type = other DNA
ggaggtcagtccatgtccataggtgggg

SEQ ID NO: 6256 - DNA, 28 bp, synthetic construct
  source 1..28: mol_type = other DNA
tggaggtcagtccatgtccataggtggg

SEQ ID NO: 6257 - DNA, 28 bp, synthetic construct
  source 1..28: mol_type = other DNA
gtggaggtcagtccatgtccataggtgg

SEQ ID NO: 6258 - DNA, 28 bp, synthetic construct
  source 1..28: mol_type = other DNA
tgagtggaggtcagtccatgtccatagg

SEQ ID NO: 6259 - DNA, 28 bp, synthetic construct
  source 1..28: mol_type = other DNA
tggacatggactgacctccactcaaagg

SEQ ID NO: 6260 - DNA, 28 bp, synthetic construct
  source 1..28: mol_type = other DNA
cactactttgggtacctttgagtggagg

SEQ ID NO: 6261 - DNA, 28 bp, synthetic construct
  source 1..28: mol_type = other DNA
ctccactcaaaggtacccaaagtagtgg

SEQ ID NO: 6262 - DNA, 28 bp, synthetic construct
  source 1..28: mol_type = other DNA
caccactactttgggtacctttgagtgg

SEQ ID NO: 6263 - DNA, 28 bp, synthetic construct
  source 1..28: mol_type = other DNA
aaggtacccaaagtagtggtgagctagg

SEQ ID NO: 6264 - DNA, 28 bp, synthetic construct
  source 1..28: mol_type = other DNA
tgacctctgaccctcttatctttggagg

SEQ ID NO: 6265 - DNA, 28 bp, synthetic construct
  source 1..28: mol_type = other DNA
aaacctccaaagataagagggtcagagg

SEQ ID NO: 6266 - DNA, 28 bp, synthetic construct
  source 1..28: mol_type = other DNA
ggtgtgaaaacctccaaagataagaggg

SEQ ID NO: 6267 - DNA, 28 bp, synthetic construct
  source 1..28: mol_type = other DNA
tggtgtgaaaacctccaaagataagagg

SEQ ID NO: 6268 - DNA, 28 bp, synthetic construct
  source 1..28: mol_type = other DNA
tatcatgggtgtctgctgcagtgtctgg

SEQ ID NO: 6269 - DNA, 28 bp, synthetic construct
  source 1..28: mol_type = other DNA
tcattggagtcatggtacttatcatggg

SEQ ID NO: 6270 - DNA, 28 bp, synthetic construct
  source 1..28: mol_type = other DNA
ctcattggagtcatggtacttatcatgg

SEQ ID NO: 6271 - DNA, 28 bp, synthetic construct
  source 1..28: mol_type = other DNA
agtaccatgactccaatgagtgcccagg

SEQ ID NO: 6272 - DNA, 28 bp, synthetic construct
  source 1..28: mol_type = other DNA
gtaccatgactccaatgagtgcccaggg

SEQ ID NO: 6273 - DNA, 28 bp, synthetic construct
  source 1..28: mol_type = other DNA
acgccctgggcactcattggagtcatgg

SEQ ID NO: 6274 - DNA, 28 bp, synthetic construct
  source 1..28: mol_type = other DNA
actccaatgagtgcccagggcgtccagg

SEQ ID NO: 6275 - DNA, 28 bp, synthetic construct
  source 1..28: mol_type = other DNA
ctgcctggacgccctgggcactcattgg

SEQ ID NO: 6276 - DNA, 28 bp, synthetic construct
  source 1..28: mol_type = other DNA
caatgagtgcccagggcgtccaggcagg

SEQ ID NO: 6277 - DNA, 28 bp, synthetic construct
  source 1..28: mol_type = other DNA
gaacggacgcctgcctggacgccctggg

SEQ ID NO: 6278 - DNA, 28 bp, synthetic construct
  source 1..28: mol_type = other DNA
tgaacggacgcctgcctggacgccctgg

SEQ ID NO: 6279 - DNA, 28 bp, synthetic construct
  source 1..28: mol_type = other DNA
gatggctgttgaacggacgcctgcctgg

SEQ ID NO: 6280 - DNA, 28 bp, synthetic construct
  source 1..28: mol_type = other DNA
ctgctcaggtaggatggctgttgaacgg

SEQ ID NO: 6281 - DNA, 28 bp, synthetic construct
  source 1..28: mol_type = other DNA
tgctgctgctgctgctcaggtaggatgg

SEQ ID NO: 6282 - DNA, 28 bp, synthetic construct
  source 1..28: mol_type = other DNA
ttgctgctgctgctgctgctcaggtagg

SEQ ID NO: 6283 - DNA, 28 bp, synthetic construct
  source 1..28: mol_type = other DNA
gctgttgctgctgctgctgctgctcagg

SEQ ID NO: 6284 - DNA, 28 bp, synthetic construct
  source 1..28: mol_type = other DNA
gcagcagcagcagcagtaccacatccgg

SEQ ID NO: 6285 - DNA, 28 bp, synthetic construct
  source 1..28: mol_type = other DNA
ctgctgctgctgctgctgccggatgtgg

SEQ ID NO: 6286 - DNA, 28 bp, synthetic construct
  source 1..28: mol_type = other DNA
caggatctgctgctgctgctgctgccgg

SEQ ID NO: 6287 - DNA, 28 bp, synthetic construct
  source 1..28: mol_type = other DNA
gcagcagcagcagcagcagatcctgcgg

SEQ ID NO: 6288 - DNA, 28 bp, synthetic construct
  source 1..28: mol_type = other DNA
cagcagcagcagcagcagatcctgcggg

SEQ ID NO: 6289 - DNA, 28 bp, synthetic construct
  source 1..28: mol_type = other DNA
gcagcagcagcagatcctgcgggtaagg

SEQ ID NO: 6290 - DNA, 28 bp, synthetic construct
  source 1..28: mol_type = other DNA
gcagcagatcctgcgggtaaggcactgg

SEQ ID NO: 6291 - DNA, 28 bp, synthetic construct
  source 1..28: mol_type = other DNA
cagcagatcctgcgggtaaggcactggg

SEQ ID NO: 6292 - DNA, 28 bp, synthetic construct
  source 1..28: mol_type = other DNA
gatgaaatcccagtgccttacccgcagg

SEQ ID NO: 6293 - DNA, 28 bp, synthetic construct
  source 1..28: mol_type = other DNA
gcgggtaaggcactgggatttcatctgg

SEQ ID NO: 6294 - DNA, 28 bp, synthetic construct
  source 1..28: mol_type = other DNA
cgggtaaggcactgggatttcatctggg

SEQ ID NO: 6295 - DNA, 28 bp, synthetic construct
  source 1..28: mol_type = other DNA
aggcactgggatttcatctgggacctgg

SEQ ID NO: 6296 - DNA, 28 bp, synthetic construct
  source 1..28: mol_type = other DNA
ggcactgggatttcatctgggacctggg

SEQ ID NO: 6297 - DNA, 28 bp, synthetic construct
  source 1..28: mol_type = other DNA
gatttcatctgggacctgggagcccagg

SEQ ID NO: 6298 - DNA, 28 bp, synthetic construct
  source 1..28: mol_type = other DNA
atttcatctgggacctgggagcccaggg

SEQ ID NO: 6299 - DNA, 28 bp, synthetic construct
  source 1..28: mol_type = other DNA
tcatctgggacctgggagcccagggagg

SEQ ID NO: 6300 - DNA, 28 bp, synthetic construct
  source 1..28: mol_type = other DNA
gacctgggagcccagggaggaagagagg

SEQ ID NO: 6301 - DNA, 28 bp, synthetic construct
  source 1..28: mol_type = other DNA
tgcctctcttcctccctgggctcccagg

SEQ ID NO: 6302 - DNA, 28 bp, synthetic construct
  source 1..28: mol_type = other DNA
agaacttgtgcctctcttcctccctggg

SEQ ID NO: 6303 - DNA, 28 bp, synthetic construct
  source 1..28: mol_type = other DNA
aagaacttgtgcctctcttcctccctgg

SEQ ID NO: 6304 - DNA, 28 bp, synthetic construct
  source 1..28: mol_type = other DNA
cccacacagttaccgagactaaacaagg

SEQ ID NO: 6305 - DNA, 28 bp, synthetic construct
  source 1..28: mol_type = other DNA
gccttgtttagtctcggtaactgtgtgg

SEQ ID NO: 6306 - DNA, 28 bp, synthetic construct
  source 1..28: mol_type = other DNA
tttggtacactgccttgtttagtctcgg

SEQ ID NO: 6307 - DNA, 28 bp, synthetic construct
  source 1..28: mol_type = other DNA
cagtgtaccaaaacacctagcagagcgg

SEQ ID NO: 6308 - DNA, 28 bp, synthetic construct
  source 1..28: mol_type = other DNA
gtaccaaaacacctagcagagcggctgg

SEQ ID NO: 6309 - DNA, 28 bp, synthetic construct
  source 1..28: mol_type = other DNA
aggccagccgctctgctaggtgttttgg

SEQ ID NO: 6310 - DNA, 28 bp, synthetic construct
  source 1..28: mol_type = other DNA
acctagcagagcggctggcctctagtgg

SEQ ID NO: 6311 - DNA, 28 bp, synthetic construct
  source 1..28: mol_type = other DNA
accactagaggccagccgctctgctagg

SEQ ID NO: 6312 - DNA, 28 bp, synthetic construct
  source 1..28: mol_type = other DNA
cagagcggctggcctctagtggtgctgg

SEQ ID NO: 6313 - DNA, 28 bp, synthetic construct
  source 1..28: mol_type = other DNA
tagaaaacttctccagcaccactagagg

SEQ ID NO: 6314 - DNA, 28 bp, synthetic construct
  source 1..28: mol_type = other DNA
ttctaccctccccctttttgttttctgg

SEQ ID NO: 6315 - DNA, 28 bp, synthetic construct
  source 1..28: mol_type = other DNA
tctaccctccccctttttgttttctggg

SEQ ID NO: 6316 - DNA, 28 bp, synthetic construct
  source 1..28: mol_type = other DNA
ctaccctccccctttttgttttctgggg

SEQ ID NO: 6317 - DNA, 28 bp, synthetic construct
  source 1..28: mol_type = other DNA
gatccccagaaaacaaaaagggggaggg

SEQ ID NO: 6318 - DNA, 28 bp, synthetic construct
  source 1..28: mol_type = other DNA
tgatccccagaaaacaaaaagggggagg

SEQ ID NO: 6319 - DNA, 28 bp, synthetic construct
  source 1..28: mol_type = other DNA
ctatgatccccagaaaacaaaaaggggg

SEQ ID NO: 6320 - DNA, 28 bp, synthetic construct
  source 1..28: mol_type = other DNA
actatgatccccagaaaacaaaaagggg

SEQ ID NO: 6321 - DNA, 28 bp, synthetic construct
  source 1..28: mol_type = other DNA
cactatgatccccagaaaacaaaaaggg

SEQ ID NO: 6322 - DNA, 28 bp, synthetic construct
  source 1..28: mol_type = other DNA
cctttttgttttctggggatcatagtgg

SEQ ID NO: 6323 - DNA, 28 bp, synthetic construct
  source 1..28: mol_type = other DNA
ctttttgttttctggggatcatagtggg

SEQ ID NO: 6324 - DNA, 28 bp, synthetic construct
  source 1..28: mol_type = other DNA
tctggggatcatagtgggagagagttgg

SEQ ID NO: 6325 - DNA, 28 bp, synthetic construct
  source 1..28: mol_type = other DNA
tgggagagagttggacattgtctgctgg

SEQ ID NO: 6326 - DNA, 28 bp, synthetic construct
  source 1..28: mol_type = other DNA
gggagagagttggacattgtctgctggg

SEQ ID NO: 6327 - DNA, 28 bp, synthetic construct
  source 1..28: mol_type = other DNA
cattgtctgctgggtaccctagatttgg

SEQ ID NO: 6328 - DNA, 28 bp, synthetic construct
  source 1..28: mol_type = other DNA
gctgcacagaaagaaaccaaatctaggg

SEQ ID NO: 6329 - DNA, 28 bp, synthetic construct
  source 1..28: mol_type = other DNA
agctgcacagaaagaaaccaaatctagg

SEQ ID NO: 6330 - DNA, 28 bp, synthetic construct
  source 1..28: mol_type = other DNA
tttctttctgtgcagctgtctaaaaagg

SEQ ID NO: 6331 - DNA, 28 bp, synthetic construct
  source 1..28: mol_type = other DNA
ttctttctgtgcagctgtctaaaaaggg

SEQ ID NO: 6332 - DNA, 28 bp, synthetic construct
  source 1..28: mol_type = other DNA
ttctgtgcagctgtctaaaaagggaagg

SEQ ID NO: 6333 - DNA, 28 bp, synthetic construct
  source 1..28: mol_type = other DNA
gatgaggaagcagggtgggagctcgggg

SEQ ID NO: 6334 - DNA, 28 bp, synthetic construct
  source 1..28: mol_type = other DNA
ggatgaggaagcagggtgggagctcggg

SEQ ID NO: 6335 - DNA, 28 bp, synthetic construct
  source 1..28: mol_type = other DNA
gggatgaggaagcagggtgggagctcgg

SEQ ID NO: 6336 - DNA, 28 bp, synthetic construct
  source 1..28: mol_type = other DNA
agggcaggggatgaggaagcagggtggg

SEQ ID NO: 6337 - DNA, 28 bp, synthetic construct
  source 1..28: mol_type = other DNA
gagggcaggggatgaggaagcagggtgg

SEQ ID NO: 6338 - DNA, 28 bp, synthetic construct
  source 1..28: mol_type = other DNA
gctgagggcaggggatgaggaagcaggg

SEQ ID NO: 6339 - DNA, 28 bp, synthetic construct
  source 1..28: mol_type = other DNA
ggctgagggcaggggatgaggaagcagg

SEQ ID NO: 6340 - DNA, 28 bp, synthetic construct
  source 1..28: mol_type = other DNA
actaaagggctgagggcaggggatgagg

SEQ ID NO: 6341 - DNA, 28 bp, synthetic construct
  source 1..28: mol_type = other DNA
ctcagaactaaagggctgagggcagggg

SEQ ID NO: 6342 - DNA, 28 bp, synthetic construct
  source 1..28: mol_type = other DNA
ccctgccctcagccctttagttctgagg

SEQ ID NO: 6343 - DNA, 28 bp, synthetic construct
  source 1..28: mol_type = other DNA
gcctcagaactaaagggctgagggcagg

SEQ ID NO: 6344 - DNA, 28 bp, synthetic construct
  source 1..28: mol_type = other DNA
ctaagcctcagaactaaagggctgaggg

SEQ ID NO: 6345 - DNA, 28 bp, synthetic construct
  source 1..28: mol_type = other DNA
gctaagcctcagaactaaagggctgagg

SEQ ID NO: 6346 - DNA, 28 bp, synthetic construct
  source 1..28: mol_type = other DNA
gaggaagctaagcctcagaactaaaggg

SEQ ID NO: 6347 - DNA, 28 bp, synthetic construct
  source 1..28: mol_type = other DNA
ggaggaagctaagcctcagaactaaagg

SEQ ID NO: 6348 - DNA, 28 bp, synthetic construct
  source 1..28: mol_type = other DNA
aagatacttcagaaggagcagagggagg

SEQ ID NO: 6349 - DNA, 28 bp, synthetic construct
  source 1..28: mol_type = other DNA
caaaagatacttcagaaggagcagaggg

SEQ ID NO: 6350 - DNA, 28 bp, synthetic construct
  source 1..28: mol_type = other DNA
acaaaagatacttcagaaggagcagagg

SEQ ID NO: 6351 - DNA, 28 bp, synthetic construct
  source 1..28: mol_type = other DNA
ataagaacacaaaagatacttcagaagg

SEQ ID NO: 6352 - DNA, 28 bp, synthetic construct
  source 1..28: mol_type = other DNA
caacaccagcagcaacagcagcaacagg

SEQ ID NO: 6353 - DNA, 28 bp, synthetic construct
  source 1..28: mol_type = other DNA
caccagcagcaacagcagcaacaggcgg

SEQ ID NO: 6354 - DNA, 28 bp, synthetic construct
  source 1..28: mol_type = other DNA
agccgcctgttgctgctgttgctgctgg

SEQ ID NO: 6355 - DNA, 28 bp, synthetic construct
  source 1..28: mol_type = other DNA
gctgggactggggctggggttggggagg

SEQ ID NO: 6356 - DNA, 28 bp, synthetic construct
  source 1..28: mol_type = other DNA
ggggctgggactggggctggggttgggg

SEQ ID NO: 6357 - DNA, 28 bp, synthetic construct
  source 1..28: mol_type = other DNA
tggggctgggactggggctggggttggg

SEQ ID NO: 6358 - DNA, 28 bp, synthetic construct
  source 1..28: mol_type = other DNA
ctggggctgggactggggctggggttgg

SEQ ID NO: 6359 - DNA, 28 bp, synthetic construct
  source 1..28: mol_type = other DNA
caaccccagccccagtcccagccccagg

SEQ ID NO: 6360 - DNA, 28 bp, synthetic construct
  source 1..28: mol_type = other DNA
ctacctggggctgggactggggctgggg

SEQ ID NO: 6361 - DNA, 28 bp, synthetic construct
  source 1..28: mol_type = other DNA
gctacctggggctgggactggggctggg

SEQ ID NO: 6362 - DNA, 28 bp, synthetic construct
  source 1..28: mol_type = other DNA
agctacctggggctgggactggggctgg

SEQ ID NO: 6363 - DNA, 28 bp, synthetic construct
  source 1..28: mol_type = other DNA
cagcagctacctggggctgggactgggg

SEQ ID NO: 6364 - DNA, 28 bp, synthetic construct
  source 1..28: mol_type = other DNA
cccagtcccagccccaggtagctgctgg

SEQ ID NO: 6365 - DNA, 28 bp, synthetic construct
  source 1..28: mol_type = other DNA
tccagcagctacctggggctgggactgg

SEQ ID NO: 6366 - DNA, 28 bp, synthetic construct
  source 1..28: mol_type = other DNA
tgtagtccagcagctacctggggctggg

SEQ ID NO: 6367 - DNA, 28 bp, synthetic construct
  source 1..28: mol_type = other DNA
ctgtagtccagcagctacctggggctgg

SEQ ID NO: 6368 - DNA, 28 bp, synthetic construct
  source 1..28: mol_type = other DNA
ggggctgtagtccagcagctacctgggg

SEQ ID NO: 6369 - DNA, 28 bp, synthetic construct
  source 1..28: mol_type = other DNA
tggggctgtagtccagcagctacctggg

SEQ ID NO: 6370 - DNA, 28 bp, synthetic construct
  source 1..28: mol_type = other DNA
ctggggctgtagtccagcagctacctgg

SEQ ID NO: 6371 - DNA, 28 bp, synthetic construct
  source 1..28: mol_type = other DNA
caggtagctgctggactacagccccagg

SEQ ID NO: 6372 - DNA, 28 bp, synthetic construct
  source 1..28: mol_type = other DNA
gctggaactgggtggaaataggaagtgg

SEQ ID NO: 6373 - DNA, 28 bp, synthetic construct
  source 1..28: mol_type = other DNA
cctatttccacccagttccagcgccagg

SEQ ID NO: 6374 - DNA, 28 bp, synthetic construct
  source 1..28: mol_type = other DNA
ctatttccacccagttccagcgccaggg

SEQ ID NO: 6375 - DNA, 28 bp, synthetic construct
  source 1..28: mol_type = other DNA
tatttccacccagttccagcgccagggg

SEQ ID NO: 6376 - DNA, 28 bp, synthetic construct
  source 1..28: mol_type = other DNA
tgaagcccctggcgctggaactgggtgg

SEQ ID NO: 6377 - DNA, 28 bp, synthetic construct
  source 1..28: mol_type = other DNA
tgctgaagcccctggcgctggaactggg

SEQ ID NO: 6378 - DNA, 28 bp, synthetic construct
  source 1..28: mol_type = other DNA
ctgctgaagcccctggcgctggaactgg

SEQ ID NO: 6379 - DNA, 28 bp, synthetic construct
  source 1..28: mol_type = other DNA
ctgggtctgctgaagcccctggcgctgg

SEQ ID NO: 6380 - DNA, 28 bp, synthetic construct
  source 1..28: mol_type = other DNA
ctgctgctgggtctgctgaagcccctgg

SEQ ID NO: 6381 - DNA, 28 bp, synthetic construct
  source 1..28: mol_type = other DNA
aaagctgctgtctgttgctgctgctggg

SEQ ID NO: 6382 - DNA, 28 bp, synthetic construct
  source 1..28: mol_type = other DNA
caaagctgctgtctgttgctgctgctgg

SEQ ID NO: 6383 - DNA, 28 bp, synthetic construct
  source 1..28: mol_type = other DNA
cagcagcagcaacagacagcagctttgg

SEQ ID NO: 6384 - DNA, 28 bp, synthetic construct
  source 1..28: mol_type = other DNA
gcagcaacagacagcagctttggtccgg

SEQ ID NO: 6385 - DNA, 28 bp, synthetic construct
  source 1..28: mol_type = other DNA
actagagagctgttgttgaagttgccgg

SEQ ID NO: 6386 - DNA, 28 bp, synthetic construct
  source 1..28: mol_type = other DNA
tctagtaagcctgcctgccttcccaagg

SEQ ID NO: 6387 - DNA, 28 bp, synthetic construct
  source 1..28: mol_type = other DNA
atctgtgaaaaaccagagattatcaggg

SEQ ID NO: 6388 - DNA, 28 bp, synthetic construct
  source 1..28: mol_type = other DNA
tatctgtgaaaaaccagagattatcagg

SEQ ID NO: 6389 - DNA, 28 bp, synthetic construct
  source 1..28: mol_type = other DNA
aatatgttggtactgggctgtggctggg

SEQ ID NO: 6390 - DNA, 28 bp, synthetic construct
  source 1..28: mol_type = other DNA
aaatatgttggtactgggctgtggctgg

SEQ ID NO: 6391 - DNA, 28 bp, synthetic construct
  source 1..28: mol_type = other DNA
agccacagcccagtaccaacatatttgg

SEQ ID NO: 6392 - DNA, 28 bp, synthetic construct
  source 1..28: mol_type = other DNA
gtccaaatatgttggtactgggctgtgg

SEQ ID NO: 6393 - DNA, 28 bp, synthetic construct
  source 1..28: mol_type = other DNA
agtagcgtccaaatatgttggtactggg

SEQ ID NO: 6394 - DNA, 28 bp, synthetic construct
  source 1..28: mol_type = other DNA
cagtagcgtccaaatatgttggtactgg

SEQ ID NO: 6395 - DNA, 28 bp, synthetic construct
  source 1..28: mol_type = other DNA
gtggctcagtagcgtccaaatatgttgg

SEQ ID NO: 6396 - DNA, 28 bp, synthetic construct
  source 1..28: mol_type = other DNA
catatttggacgctactgagccacctgg

SEQ ID NO: 6397 - DNA, 28 bp, synthetic construct
  source 1..28: mol_type = other DNA
atttggacgctactgagccacctggagg

SEQ ID NO: 6398 - DNA, 28 bp, synthetic construct
  source 1..28: mol_type = other DNA
ccacctggaggaactgcttgtgcactgg

SEQ ID NO: 6399 - DNA, 28 bp, synthetic construct
  source 1..28: mol_type = other DNA
catccagtgcacaagcagttcctccagg

SEQ ID NO: 6400 - DNA, 28 bp, synthetic construct
  source 1..28: mol_type = other DNA
ggaggaactgcttgtgcactggatgtgg

SEQ ID NO: 6401 - DNA, 28 bp, synthetic construct
  source 1..28: mol_type = other DNA
gattgggaattaagaggaaagggtgggg

SEQ ID NO: 6402 - DNA, 28 bp, synthetic construct
  source 1..28: mol_type = other DNA
ggattgggaattaagaggaaagggtggg

SEQ ID NO: 6403 - DNA, 28 bp, synthetic construct
  source 1..28: mol_type = other DNA
gggattgggaattaagaggaaagggtgg

SEQ ID NO: 6404 - DNA, 28 bp, synthetic construct
  source 1..28: mol_type = other DNA
aatgggattgggaattaagaggaaaggg

SEQ ID NO: 6405 - DNA, 28 bp, synthetic construct
  source 1..28: mol_type = other DNA
gaatgggattgggaattaagaggaaagg

SEQ ID NO: 6406 - DNA, 28 bp, synthetic construct
  source 1..28: mol_type = other DNA
tcctcttaattcccaatcccattcctgg

SEQ ID NO: 6407 - DNA, 28 bp, synthetic construct
  source 1..28: mol_type = other DNA
cctcttaattcccaatcccattcctggg

SEQ ID NO: 6408 - DNA, 28 bp, synthetic construct
  source 1..28: mol_type = other DNA
ctggtgctagcccaggaatgggattggg

SEQ ID NO: 6409 - DNA, 28 bp, synthetic construct
  source 1..28: mol_type = other DNA
actggtgctagcccaggaatgggattgg

SEQ ID NO: 6410 - DNA, 28 bp, synthetic construct
  source 1..28: mol_type = other DNA
cccattcctgggctagcaccagtagtgg

SEQ ID NO: 6411 - DNA, 28 bp, synthetic construct
  source 1..28: mol_type = other DNA
accactactggtgctagcccaggaatgg

SEQ ID NO: 6412 - DNA, 28 bp, synthetic construct
  source 1..28: mol_type = other DNA
ttcctgggctagcaccagtagtggttgg

SEQ ID NO: 6413 - DNA, 28 bp, synthetic construct
  source 1..28: mol_type = other DNA
tcctgggctagcaccagtagtggttggg

SEQ ID NO: 6414 - DNA, 28 bp, synthetic construct
  source 1..28: mol_type = other DNA
cctgggctagcaccagtagtggttgggg

SEQ ID NO: 6415 - DNA, 28 bp, synthetic construct
  source 1..28: mol_type = other DNA
ctgaggggagggccccaaccactactgg

SEQ ID NO: 6416 - DNA, 28 bp, synthetic construct
  source 1..28: mol_type = other DNA
cagtagtggttggggccctcccctcagg

SEQ ID NO: 6417 - DNA, 28 bp, synthetic construct
  source 1..28: mol_type = other DNA
ttattaaaaatggagcctgaggggaggg

SEQ ID NO: 6418 - DNA, 28 bp, synthetic construct
  source 1..28: mol_type = other DNA
cttattaaaaatggagcctgaggggagg

SEQ ID NO: 6419 - DNA, 28 bp, synthetic construct
  source 1..28: mol_type = other DNA
aaacttattaaaaatggagcctgagggg

SEQ ID NO: 6420 - DNA, 28 bp, synthetic construct
  source 1..28: mol_type = other DNA
aaaacttattaaaaatggagcctgaggg

SEQ ID NO: 6421 - DNA, 28 bp, synthetic construct
  source 1..28: mol_type = other DNA
aaaaacttattaaaaatggagcctgagg

SEQ ID NO: 6422 - DNA, 28 bp, synthetic construct
  source 1..28: mol_type = other DNA
aaaaatactaaaaacttattaaaaatgg

SEQ ID NO: 6423 - DNA, 28 bp, synthetic construct
  source 1..28: mol_type = other DNA
agtttttagtatttttgttaatgtgagg

SEQ ID NO: 6424 - DNA, 28 bp, synthetic construct
  source 1..28: mol_type = other DNA
ttgttaatgtgaggcattgagctgttgg

SEQ ID NO: 6425 - DNA, 28 bp, synthetic construct
  source 1..28: mol_type = other DNA
tgttaatgtgaggcattgagctgttggg

SEQ ID NO: 6426 - DNA, 28 bp, synthetic construct
  source 1..28: mol_type = other DNA
ctgtgtattgggtgcaacagctctgggg

SEQ ID NO: 6427 - DNA, 28 bp, synthetic construct
  source 1..28: mol_type = other DNA
tctgtgtattgggtgcaacagctctggg

SEQ ID NO: 6428 - DNA, 28 bp, synthetic construct
  source 1..28: mol_type = other DNA
ctctgtgtattgggtgcaacagctctgg

SEQ ID NO: 6429 - DNA, 28 bp, synthetic construct
  source 1..28: mol_type = other DNA
cctttgcaaagaagctctgtgtattggg

SEQ ID NO: 6430 - DNA, 28 bp, synthetic construct
  source 1..28: mol_type = other DNA
ccctttgcaaagaagctctgtgtattgg

SEQ ID NO: 6431 - RNA, 20 nt, synthetic construct
  source 1..20: mol_type = other RNA
ctagtcccactagctgctct

SEQ ID NO: 6432 - RNA, 20 nt, synthetic construct
  source 1..20: mol_type = other RNA
cagggccaagagcagctagt

SEQ ID NO: 6433 - RNA, 20 nt, synthetic construct
  source 1..20: mol_type = other RNA
gcagggccaagagcagctag

SEQ ID NO: 6434 - RNA, 20 nt, synthetic construct
  source 1..20: mol_type = other RNA
gctcttggccctgccactcc

SEQ ID NO: 6435 - RNA, 20 nt, synthetic construct
  source 1..20: mol_type = other RNA
ccctgccactcctggctccc

SEQ ID NO: 6436 - RNA, 20 nt, synthetic construct
  source 1..20: mol_type = other RNA
ccggggagccaggagtggca

SEQ ID NO: 6437 - RNA, 20 nt, synthetic construct
  source 1..20: mol_type = other RNA
gccggggagccaggagtggc

SEQ ID NO: 6438 - RNA, 20 nt, synthetic construct
  source 1..20: mol_type = other RNA
taaggccggggagccaggag

SEQ ID NO: 6439 - RNA, 20 nt, synthetic construct
  source 1..20: mol_type = other RNA
ctccccggccttagtgagtt

SEQ ID NO: 6440 - RNA, 20 nt, synthetic construct
  source 1..20: mol_type = other RNA
tccccggccttagtgagttt

SEQ ID NO: 6441 - RNA, 20 nt, synthetic construct
  source 1..20: mol_type = other RNA
tcccaaactcactaaggccg

SEQ ID NO: 6442 - RNA, 20 nt, synthetic construct
  source 1..20: mol_type = other RNA
ttcccaaactcactaaggcc

SEQ ID NO: 6443 - RNA, 20 nt, synthetic construct
  source 1..20: mol_type = other RNA
tttcccaaactcactaaggc

SEQ ID NO: 6444 - RNA, 20 nt, synthetic construct
  source 1..20: mol_type = other RNA
gatgtttcccaaactcacta

SEQ ID NO: 6445 - RNA, 20 nt, synthetic construct
  source 1..20: mol_type = other RNA
acatccctccagttcaacct

SEQ ID NO: 6446 - RNA, 20 nt, synthetic construct
  source 1..20: mol_type = other RNA
ggtgccaaggttgaactgga

SEQ ID NO: 6447 - RNA, 20 nt, synthetic construct
  source 1..20: mol_type = other RNA
aggtgccaaggttgaactgg

SEQ ID NO: 6448 - RNA, 20 nt, synthetic construct
  source 1..20: mol_type = other RNA
tcaaccttggcaccttccct

SEQ ID NO: 6449 - RNA, 20 nt, synthetic construct
  source 1..20: mol_type = other RNA
gtgtccaagggaaggtgcca

SEQ ID NO: 6450 - RNA, 20 nt, synthetic construct
  source 1..20: mol_type = other RNA
ccttcccttggacacacatt

SEQ ID NO: 6451 - RNA, 20 nt, synthetic construct
  source 1..20: mol_type = other RNA
cctaatgtgtgtccaaggga

SEQ ID NO: 6452 - RNA, 20 nt, synthetic construct
  source 1..20: mol_type = other RNA
aatacctaatgtgtgtccaa

SEQ ID NO: 6453 - RNA, 20 nt, synthetic construct
  source 1..20: mol_type = other RNA
taatacctaatgtgtgtcca

SEQ ID NO: 6454 - RNA, 20 nt, synthetic construct
  source 1..20: mol_type = other RNA
attatttctccttcagctga

SEQ ID NO: 6455 - RNA, 20 nt, synthetic construct
  source 1..20: mol_type = other RNA
gctacaaagccttcagctga

SEQ ID NO: 6456 - RNA, 20 nt, synthetic construct
  source 1..20: mol_type = other RNA
aaggctttgtagctattgaa

SEQ ID NO: 6457 - RNA, 20 nt, synthetic construct
  source 1..20: mol_type = other RNA
tttgtagctattgaaaggca

SEQ ID NO: 6458 - RNA, 20 nt, synthetic construct
  source 1..20: mol_type = other RNA
tctcttgatgtgagccttga

SEQ ID NO: 6459 - RNA, 20 nt, synthetic construct
  source 1..20: mol_type = other RNA
tgatgtgagccttgaaggac

SEQ ID NO: 6460 - RNA, 20 nt, synthetic construct
  source 1..20: mol_type = other RNA
ccttgaaggacaggttgctt

SEQ ID NO: 6461 - RNA, 20 nt, synthetic construct
  source 1..20: mol_type = other RNA
cttgaaggacaggttgcttt

SEQ ID NO: 6462 - RNA, 20 nt, synthetic construct
  source 1..20: mol_type = other RNA
aaggacaggttgctttgggt

SEQ ID NO: 6463 - RNA, 20 nt, synthetic construct
  source 1..20: mol_type = other RNA
ttgggtaggcagagagaagc

SEQ ID NO: 6464 - RNA, 20 nt, synthetic construct
  source 1..20: mol_type = other RNA
taggcagagagaagctggta

SEQ ID NO: 6465 - RNA, 20 nt, synthetic construct
  source 1..20: mol_type = other RNA
ggtaaggcgtatattgtcta

SEQ ID NO: 6466 - RNA, 20 nt, synthetic construct
  source 1..20: mol_type = other RNA
gtaaggcgtatattgtctaa

SEQ ID NO: 6467 - RNA, 20 nt, synthetic construct
  source 1..20: mol_type = other RNA
gcgtatattgtctaagggtc

SEQ ID NO: 6468 - RNA, 20 nt, synthetic construct
  source 1..20: mol_type = other RNA
tatattgtctaagggtctgg

SEQ ID NO: 6469 - RNA, 20 nt, synthetic construct
  source 1..20: mol_type = other RNA
attgtctaagggtctggagg

SEQ ID NO: 6470 - RNA, 20 nt, synthetic construct
  source 1..20: mol_type = other RNA
ttgtctaagggtctggaggt

SEQ ID NO: 6471 - RNA, 20 nt, synthetic construct
  source 1..20: mol_type = other RNA
tgtctaagggtctggaggtg

SEQ ID NO: 6472 - RNA, 20 nt, synthetic construct
  source 1..20: mol_type = other RNA
gggtctggaggtggggtata

SEQ ID NO: 6473 - RNA, 20 nt, synthetic construct
  source 1..20: mol_type = other RNA
ggtctggaggtggggtataa

SEQ ID NO: 6474 - RNA, 20 nt, synthetic construct
  source 1..20: mol_type = other RNA
gtctggaggtggggtataag

SEQ ID NO: 6475 - RNA, 20 nt, synthetic construct
  source 1..20: mol_type = other RNA
gggtatacaagtcatagagt

SEQ ID NO: 6476 - RNA, 20 nt, synthetic construct
  source 1..20: mol_type = other RNA
ggtatacaagtcatagagtt

SEQ ID NO: 6477 - RNA, 20 nt, synthetic construct
  source 1..20: mol_type = other RNA
gtatacaagtcatagagttg

SEQ ID NO: 6478 - RNA, 20 nt, synthetic construct
  source 1..20: mol_type = other RNA
caagtcatagagttggggat

SEQ ID NO: 6479 - RNA, 20 nt, synthetic construct
  source 1..20: mol_type = other RNA
gggataggcagaacccagag

SEQ ID NO: 6480 - RNA, 20 nt, synthetic construct
  source 1..20: mol_type = other RNA
ggataggcagaacccagaga

SEQ ID NO: 6481 - RNA, 20 nt, synthetic construct
  source 1..20: mol_type = other RNA
gataggcagaacccagagag

SEQ ID NO: 6482 - RNA, 20 nt, synthetic construct
  source 1..20: mol_type = other RNA
acccagagaggggagaaaac

SEQ ID NO: 6483 - RNA, 20 nt, synthetic construct
  source 1..20: mol_type = other RNA
gccagttttctcccctctct

SEQ ID NO: 6484 - RNA, 20 nt, synthetic construct
  source 1..20: mol_type = other RNA
ggccagttttctcccctctc

SEQ ID NO: 6485 - RNA, 20 nt, synthetic construct
  source 1..20: mol_type = other RNA
ctgagatagaagaccttgca

SEQ ID NO: 6486 - RNA, 20 nt, synthetic construct
  source 1..20: mol_type = other RNA
tgagatagaagaccttgcaa

SEQ ID NO: 6487 - RNA, 20 nt, synthetic construct
  source 1..20: mol_type = other RNA
cttgcaaggtcttctatctc

SEQ ID NO: 6488 - RNA, 20 nt, synthetic construct
  source 1..20: mol_type = other RNA
agaagaccttgcaagggaga

SEQ ID NO: 6489 - RNA, 20 nt, synthetic construct
  source 1..20: mol_type = other RNA
agaccttgcaagggagaagg

SEQ ID NO: 6490 - RNA, 20 nt, synthetic construct
  source 1..20: mol_type = other RNA
gaccttgcaagggagaagga

SEQ ID NO: 6491 - RNA, 20 nt, synthetic construct
  source 1..20: mol_type = other RNA
ttgcaagggagaaggagggt

SEQ ID NO: 6492 - RNA, 20 nt, synthetic construct
  source 1..20: mol_type = other RNA
taccctccttctcccttgca

SEQ ID NO: 6493 - RNA, 20 nt, synthetic construct
  source 1..20: mol_type = other RNA
ggagaaggagggtaggagcc

SEQ ID NO: 6494 - RNA, 20 nt, synthetic construct
  source 1..20: mol_type = other RNA
aaggagggtaggagcctgga

SEQ ID NO: 6495 - RNA, 20 nt, synthetic construct
  source 1..20: mol_type = other RNA
tggatggtgtgaaatgctag

SEQ ID NO: 6496 - RNA, 20 nt, synthetic construct
  source 1..20: mol_type = other RNA
tctagcatttcacaccatcc

SEQ ID NO: 6497 - RNA, 20 nt, synthetic construct
  source 1..20: mol_type = other RNA
tgtgaaatgctagaggtgca

SEQ ID NO: 6498 - RNA, 20 nt, synthetic construct
  source 1..20: mol_type = other RNA
aaatgctagaggtgcatggc

SEQ ID NO: 6499 - RNA, 20 nt, synthetic construct
  source 1..20: mol_type = other RNA
ctagaggtgcatggctggaa

SEQ ID NO: 6500 - RNA, 20 nt, synthetic construct
  source 1..20: mol_type = other RNA
gaggtgcatggctggaatgg

SEQ ID NO: 6501 - RNA, 20 nt, synthetic construct
  source 1..20: mol_type = other RNA
aggtgcatggctggaatgga

SEQ ID NO: 6502 - RNA, 20 nt, synthetic construct
  source 1..20: mol_type = other RNA
ggtgcatggctggaatggag

SEQ ID NO: 6503 - RNA, 20 nt, synthetic construct
  source 1..20: mol_type = other RNA
gtgcatggctggaatggagg

SEQ ID NO: 6504 - RNA, 20 nt, synthetic construct
  source 1..20: mol_type = other RNA
catggctggaatggaggggg

SEQ ID NO: 6505 - RNA, 20 nt, synthetic construct
  source 1..20: mol_type = other RNA
atggctggaatggagggggt

SEQ ID NO: 6506 - RNA, 20 nt, synthetic construct
  source 1..20: mol_type = other RNA
tggctggaatggagggggtg

SEQ ID NO: 6507 - RNA, 20 nt, synthetic construct
  source 1..20: mol_type = other RNA
aatggagggggtggggcacc

SEQ ID NO: 6508 - RNA, 20 nt, synthetic construct
  source 1..20: mol_type = other RNA
caccaggcttcagatgcttc

SEQ ID NO: 6509 - RNA, 20 nt, synthetic construct
  source 1..20: mol_type = other RNA
accaggcttcagatgcttct

SEQ ID NO: 6510 - RNA, 20 nt, synthetic construct
  source 1..20: mol_type = other RNA
acccagaagcatctgaagcc

SEQ ID NO: 6511 - RNA, 20 nt, synthetic construct
  source 1..20: mol_type = other RNA
gggtgcagatgcagattttc

SEQ ID NO: 6512 - RNA, 20 nt, synthetic construct
  source 1..20: mol_type = other RNA
gattttcaggatgtacaaca

SEQ ID NO: 6513 - RNA, 20 nt, synthetic construct
  source 1..20: mol_type = other RNA
tacaacatggagcatcccca

SEQ ID NO: 6514 - RNA, 20 nt, synthetic construct
  source 1..20: mol_type = other RNA
ctctcaacacagttgccttg

SEQ ID NO: 6515 - RNA, 20 nt, synthetic construct
  source 1..20: mol_type = other RNA
gctctcaacacagttgcctt

SEQ ID NO: 6516 - RNA, 20 nt, synthetic construct
  source 1..20: mol_type = other RNA
ggctctcaacacagttgcct

SEQ ID NO: 6517 - RNA, 20 nt, synthetic construct
  source 1..20: mol_type = other RNA
aactgtgttgagagcctgcg

SEQ ID NO: 6518 - RNA, 20 nt, synthetic construct
  source 1..20: mol_type = other RNA
gtgttgagagcctgcgaggc

SEQ ID NO: 6519 - RNA, 20 nt, synthetic construct
  source 1..20: mol_type = other RNA
gcctgcgaggcaggtgaatg

SEQ ID NO: 6520 - RNA, 20 nt, synthetic construct
  source 1..20: mol_type = other RNA
tccacattcacctgcctcgc

SEQ ID NO: 6521 - RNA, 20 nt, synthetic construct
  source 1..20: mol_type = other RNA
tctcctgactgagttcacca

SEQ ID NO: 6522 - RNA, 20 nt, synthetic construct
  source 1..20: mol_type = other RNA
ggtgaactcagtcaggagag

SEQ ID NO: 6523 - RNA, 20 nt, synthetic construct
  source 1..20: mol_type = other RNA
tggtgaactcagtcaggaga

SEQ ID NO: 6524 - RNA, 20 nt, synthetic construct
  source 1..20: mol_type = other RNA
ttggtgaactcagtcaggag

SEQ ID NO: 6525 - RNA, 20 nt, synthetic construct
  source 1..20: mol_type = other RNA
gttccttggtgaactcagtc

SEQ ID NO: 6526 - RNA, 20 nt, synthetic construct
  source 1..20: mol_type = other RNA
agtttacaaagcttgttcct

SEQ ID NO: 6527 - RNA, 20 nt, synthetic construct
  source 1..20: mol_type = other RNA
caagctttgtaaactatttg

SEQ ID NO: 6528 - RNA, 20 nt, synthetic construct
  source 1..20: mol_type = other RNA
aagctttgtaaactatttga

SEQ ID NO: 6529 - RNA, 20 nt, synthetic construct
  source 1..20: mol_type = other RNA
tttgtaaactatttgagggt

SEQ ID NO: 6530 - RNA, 20 nt, synthetic construct
  source 1..20: mol_type = other RNA
ttgtaaactatttgagggta

SEQ ID NO: 6531 - RNA, 20 nt, synthetic construct
  source 1..20: mol_type = other RNA
tgtaaactatttgagggtag

SEQ ID NO: 6532 - RNA, 20 nt, synthetic construct
  source 1..20: mol_type = other RNA
actctcatatcctcagagcc

SEQ ID NO: 6533 - RNA, 20 nt, synthetic construct
  source 1..20: mol_type = other RNA
atcctcagagcctggtgttg

SEQ ID NO: 6534 - RNA, 20 nt, synthetic construct
  source 1..20: mol_type = other RNA
tcagagcctggtgttgaggt

SEQ ID NO: 6535 - RNA, 20 nt, synthetic construct
  source 1..20: mol_type = other RNA
aacctcaacaccaggctctg

SEQ ID NO: 6536 - RNA, 20 nt, synthetic construct
  source 1..20: mol_type = other RNA
tgttgaggttggtgctttgt

SEQ ID NO: 6537 - RNA, 20 nt, synthetic construct
  source 1..20: mol_type = other RNA
ttggtgctttgtaggcaccc

SEQ ID NO: 6538 - RNA, 20 nt, synthetic construct
  source 1..20: mol_type = other RNA
tggtgctttgtaggcaccca

SEQ ID NO: 6539 - RNA, 20 nt, synthetic construct
  source 1..20: mol_type = other RNA
agggactttcaaatgaatga

SEQ ID NO: 6540 - RNA, 20 nt, synthetic construct
  source 1..20: mol_type = other RNA
gggactttcaaatgaatgaa

SEQ ID NO: 6541 - RNA, 20 nt, synthetic construct
  source 1..20: mol_type = other RNA
tcattcatttgaaagtccct

SEQ ID NO: 6542 - RNA, 20 nt, synthetic construct
  source 1..20: mol_type = other RNA
ttcattcatttgaaagtccc

SEQ ID NO: 6543 - RNA, 20 nt, synthetic construct
  source 1..20: mol_type = other RNA
actttcaaatgaatgaaggg

SEQ ID NO: 6544 - RNA, 20 nt, synthetic construct
  source 1..20: mol_type = other RNA
ctttcaaatgaatgaaggga

SEQ ID NO: 6545 - RNA, 20 nt, synthetic construct
  source 1..20: mol_type = other RNA
tcaaatgaatgaagggaggg

SEQ ID NO: 6546 - RNA, 20 nt, synthetic construct
  source 1..20: mol_type = other RNA
caaatgaatgaagggaggga

SEQ ID NO: 6547 - RNA, 20 nt, synthetic construct
  source 1..20: mol_type = other RNA
atgaatgaagggagggaggg

SEQ ID NO: 6548 - RNA, 20 nt, synthetic construct
  source 1..20: mol_type = other RNA
agggagggagggaggaaaga

SEQ ID NO: 6549 - RNA, 20 nt, synthetic construct
  source 1..20: mol_type = other RNA
agggagggaggaaagaagga

SEQ ID NO: 6550 - RNA, 20 nt, synthetic construct
  source 1..20: mol_type = other RNA
gggagggaggaaagaaggat

SEQ ID NO: 6551 - RNA, 20 nt, synthetic construct
  source 1..20: mol_type = other RNA
aagaaggatgggtccatagt

SEQ ID NO: 6552 - RNA, 20 nt, synthetic construct
  source 1..20: mol_type = other RNA
gatgggtccatagtaggacc

SEQ ID NO: 6553 - RNA, 20 nt, synthetic construct
  source 1..20: mol_type = other RNA
tccatagtaggacctggtga

SEQ ID NO: 6554 - RNA, 20 nt, synthetic construct
  source 1..20: mol_type = other RNA
ccatagtaggacctggtgat

SEQ ID NO: 6555 - RNA, 20 nt, synthetic construct
  source 1..20: mol_type = other RNA
agtaggacctggtgatgggc

SEQ ID NO: 6556 - RNA, 20 nt, synthetic construct
  source 1..20: mol_type = other RNA
gtaggacctggtgatgggct

SEQ ID NO: 6557 - RNA, 20 nt, synthetic construct
  source 1..20: mol_type = other RNA
ggtgatgggctgggagctcc

SEQ ID NO: 6558 - RNA, 20 nt, synthetic construct
  source 1..20: mol_type = other RNA
ggagctcccagcccatcacc

SEQ ID NO: 6559 - RNA, 20 nt, synthetic construct
  source 1..20: mol_type = other RNA
gggattggttgacatttgcc

SEQ ID NO: 6560 - RNA, 20 nt, synthetic construct
  source 1..20: mol_type = other RNA
atgtcaaccaatccctctcc

SEQ ID NO: 6561 - RNA, 20 nt, synthetic construct
  source 1..20: mol_type = other RNA
tgtcaaccaatccctctcct

SEQ ID NO: 6562 - RNA, 20 nt, synthetic construct
  source 1..20: mol_type = other RNA
agctgacccaggagagggat

SEQ ID NO: 6563 - RNA, 20 nt, synthetic construct
  source 1..20: mol_type = other RNA
cctctcctgggtcagctccc

SEQ ID NO: 6564 - RNA, 20 nt, synthetic construct
  source 1..20: mol_type = other RNA
ctctcctgggtcagctccca

SEQ ID NO: 6565 - RNA, 20 nt, synthetic construct
  source 1..20: mol_type = other RNA
tctcctgggtcagctcccag

SEQ ID NO: 6566 - RNA, 20 nt, synthetic construct
  source 1..20: mol_type = other RNA
ctgggagctgacccaggaga

SEQ ID NO: 6567 - RNA, 20 nt, synthetic construct
  source 1..20: mol_type = other RNA
cctgggagctgacccaggag

SEQ ID NO: 6568 - RNA, 20 nt, synthetic construct
  source 1..20: mol_type = other RNA
gagcccctgggagctgaccc

SEQ ID NO: 6569 - RNA, 20 nt, synthetic construct
  source 1..20: mol_type = other RNA
gcaaagaagggtgagcccct

SEQ ID NO: 6570 - RNA, 20 nt, synthetic construct
  source 1..20: mol_type = other RNA
tgcaaagaagggtgagcccc

SEQ ID NO: 6571 - RNA, 20 nt, synthetic construct
  source 1..20: mol_type = other RNA
agagctggaaatgcaaagaa

SEQ ID NO: 6572 - RNA, 20 nt, synthetic construct
  source 1..20: mol_type = other RNA
gagagctggaaatgcaaaga

SEQ ID NO: 6573 - RNA, 20 nt, synthetic construct
  source 1..20: mol_type = other RNA
ttgcatttccagctctcatg

SEQ ID NO: 6574 - RNA, 20 nt, synthetic construct
  source 1..20: mol_type = other RNA
cacaatgacctcatgagagc

SEQ ID NO: 6575 - RNA, 20 nt, synthetic construct
  source 1..20: mol_type = other RNA
ctcatgaggtcattgtgcac

SEQ ID NO: 6576 - RNA, 20 nt, synthetic construct
  source 1..20: mol_type = other RNA
gtaggatcagaggagattag

SEQ ID NO: 6577 - RNA, 20 nt, synthetic construct
  source 1..20: mol_type = other RNA
ctctggtgcagtaggatcag

SEQ ID NO: 6578 - RNA, 20 nt, synthetic construct
  source 1..20: mol_type = other RNA
cttgatttctctggtgcagt

SEQ ID NO: 6579 - RNA, 20 nt, synthetic construct
  source 1..20: mol_type = other RNA
gaattctggcttgatttctc

SEQ ID NO: 6580 - RNA, 20 nt, synthetic construct
  source 1..20: mol_type = other RNA
actgagactttattgaattc

SEQ ID NO: 6581 - RNA, 20 nt, synthetic construct
  source 1..20: mol_type = other RNA
tttcttttgtcttgtttatc

SEQ ID NO: 6582 - RNA, 20 nt, synthetic construct
  source 1..20: mol_type = other RNA
cgagtagaagatctccttca

SEQ ID NO: 6583 - RNA, 20 nt, synthetic construct
  source 1..20: mol_type = other RNA
gagtagaagatctccttcaa

SEQ ID NO: 6584 - RNA, 20 nt, synthetic construct
  source 1..20: mol_type = other RNA
acacagcaactttcccttga

SEQ ID NO: 6585 - RNA, 20 nt, synthetic construct
  source 1..20: mol_type = other RNA
catggatgggacaaaggtct

SEQ ID NO: 6586 - RNA, 20 nt, synthetic construct
  source 1..20: mol_type = other RNA
atgatacatggatgggacaa

SEQ ID NO: 6587 - RNA, 20 nt, synthetic construct
  source 1..20: mol_type = other RNA
ttgggggatgatacatggat

SEQ ID NO: 6588 - RNA, 20 nt, synthetic construct
  source 1..20: mol_type = other RNA
cttgggggatgatacatgga

SEQ ID NO: 6589 - RNA, 20 nt, synthetic construct
  source 1..20: mol_type = other RNA
tttacttgggggatgataca

SEQ ID NO: 6590 - RNA, 20 nt, synthetic construct
  source 1..20: mol_type = other RNA
aacaagaagtgtttacttgg

SEQ ID NO: 6591 - RNA, 20 nt, synthetic construct
  source 1..20: mol_type = other RNA
gaacaagaagtgtttacttg

SEQ ID NO: 6592 - RNA, 20 nt, synthetic construct
  source 1..20: mol_type = other RNA
tgaacaagaagtgtttactt

SEQ ID NO: 6593 - RNA, 20 nt, synthetic construct
  source 1..20: mol_type = other RNA
gtgaacaagaagtgtttact

SEQ ID NO: 6594 - RNA, 20 nt, synthetic construct
  source 1..20: mol_type = other RNA
gcacttgaaatctaatgaac

SEQ ID NO: 6595 - RNA, 20 nt, synthetic construct
  source 1..20: mol_type = other RNA
tagatttcaagtgcagtccc

SEQ ID NO: 6596 - RNA, 20 nt, synthetic construct
  source 1..20: mol_type = other RNA
ttgtagggacttacaggcca

SEQ ID NO: 6597 - RNA, 20 nt, synthetic construct
  source 1..20: mol_type = other RNA
attgtagggacttacaggcc

SEQ ID NO: 6598 - RNA, 20 nt, synthetic construct
  source 1..20: mol_type = other RNA
ttatcattgtagggacttac

SEQ ID NO: 6599 - RNA, 20 nt, synthetic construct
  source 1..20: mol_type = other RNA
aagagaagcttatcattgta

SEQ ID NO: 6600 - RNA, 20 nt, synthetic construct
  source 1..20: mol_type = other RNA
taagagaagcttatcattgt

SEQ ID NO: 6601 - RNA, 20 nt, synthetic construct
  source 1..20: mol_type = other RNA
atcattgcacattcttcatc

SEQ ID NO: 6602 - RNA, 20 nt, synthetic construct
  source 1..20: mol_type = other RNA
attgcacattcttcatcagg

SEQ ID NO: 6603 - RNA, 20 nt, synthetic construct
  source 1..20: mol_type = other RNA
cttcatcaggaggatgccag

SEQ ID NO: 6604 - RNA, 20 nt, synthetic construct
  source 1..20: mol_type = other RNA
aactgttggctgagctcctc

SEQ ID NO: 6605 - RNA, 20 nt, synthetic construct
  source 1..20: mol_type = other RNA
tgctactgatgaggaactgt

SEQ ID NO: 6606 - RNA, 20 nt, synthetic construct
  source 1..20: mol_type = other RNA
tgaagaatctgctactgatg

SEQ ID NO: 6607 - RNA, 20 nt, synthetic construct
  source 1..20: mol_type = other RNA
tagcagattcttcagaatct

SEQ ID NO: 6608 - RNA, 20 nt, synthetic construct
  source 1..20: mol_type = other RNA
agcagattcttcagaatctt

SEQ ID NO: 6609 - RNA, 20 nt, synthetic construct
  source 1..20: mol_type = other RNA
cccttgagctctttgaataa

SEQ ID NO: 6610 - RNA, 20 nt, synthetic construct
  source 1..20: mol_type = other RNA
cctttattcaaagagctcaa

SEQ ID NO: 6611 - RNA, 20 nt, synthetic construct
  source 1..20: mol_type = other RNA
gcctttattcaaagagctca

SEQ ID NO: 6612 - RNA, 20 nt, synthetic construct
  source 1..20: mol_type = other RNA
gttagaggtacactcgtctt

SEQ ID NO: 6613 - RNA, 20 nt, synthetic construct
  source 1..20: mol_type = other RNA
taaatgaaaattgtggttag

SEQ ID NO: 6614 - RNA, 20 nt, synthetic construct
  source 1..20: mol_type = other RNA
ttaaaaataaatgaaaattg

SEQ ID NO: 6615 - RNA, 20 nt, synthetic construct
  source 1..20: mol_type = other RNA
atttttaaatgtttccttca

SEQ ID NO: 6616 - RNA, 20 nt, synthetic construct
  source 1..20: mol_type = other RNA
ttccttcatggcctttcttg

SEQ ID NO: 6617 - RNA, 20 nt, synthetic construct
  source 1..20: mol_type = other RNA
agccacaagaaaggccatga

SEQ ID NO: 6618 - RNA, 20 nt, synthetic construct
  source 1..20: mol_type = other RNA
catagggtgagccacaagaa

SEQ ID NO: 6619 - RNA, 20 nt, synthetic construct
  source 1..20: mol_type = other RNA
acaaatacacaaactgcata

SEQ ID NO: 6620 - RNA, 20 nt, synthetic construct
  source 1..20: mol_type = other RNA
aacaaatacacaaactgcat

SEQ ID NO: 6621 - RNA, 20 nt, synthetic construct
  source 1..20: mol_type = other RNA
aactttatgtgtttttaata

SEQ ID NO: 6622 - RNA, 20 nt, synthetic construct
  source 1..20: mol_type = other RNA
aatatggtttttgccaaact

SEQ ID NO: 6623 - RNA, 20 nt, synthetic construct
  source 1..20: mol_type = other RNA
ggtctcggaaaaaccaagtt

SEQ ID NO: 6624 - RNA, 20 nt, synthetic construct
  source 1..20: mol_type = other RNA
ccgagaccgtcttttctcag

SEQ ID NO: 6625 - RNA, 20 nt, synthetic construct
  source 1..20: mol_type = other RNA
cctctgagaaaagacggtct

SEQ ID NO: 6626 - RNA, 20 nt, synthetic construct
  source 1..20: mol_type = other RNA
actgagcctctgagaaaaga

SEQ ID NO: 6627 - RNA, 20 nt, synthetic construct
  source 1..20: mol_type = other RNA
tttaccgtcctatctgcagt

SEQ ID NO: 6628 - RNA, 20 nt, synthetic construct
  source 1..20: mol_type = other RNA
gtagccgactgcagatagga

SEQ ID NO: 6629 - RNA, 20 nt, synthetic construct
  source 1..20: mol_type = other RNA
ctgcagtcggctactttcag

SEQ ID NO: 6630 - RNA, 20 nt, synthetic construct
  source 1..20: mol_type = other RNA
ctctgggcagaagcatgcgc

SEQ ID NO: 6631 - RNA, 20 nt, synthetic construct
  source 1..20: mol_type = other RNA
agcgcatgcttctgcccaga

SEQ ID NO: 6632 - RNA, 20 nt, synthetic construct
  source 1..20: mol_type = other RNA
cagcgcatgcttctgcccag

SEQ ID NO: 6633 - RNA, 20 nt, synthetic construct
  source 1..20: mol_type = other RNA
gctggtgtctcctcctgatc

SEQ ID NO: 6634 - RNA, 20 nt, synthetic construct
  source 1..20: mol_type = other RNA
ctggtgtctcctcctgatct

SEQ ID NO: 6635 - RNA, 20 nt, synthetic construct
  source 1..20: mol_type = other RNA
tctcctcctgatctgggccc

SEQ ID NO: 6636 - RNA, 20 nt, synthetic construct
  source 1..20: mol_type = other RNA
ctcctcctgatctgggccca

SEQ ID NO: 6637 - RNA, 20 nt, synthetic construct
  source 1..20: mol_type = other RNA
tcctcctgatctgggcccag

SEQ ID NO: 6638 - RNA, 20 nt, synthetic construct
  source 1..20: mol_type = other RNA
tgatctgggcccaggggctg

SEQ ID NO: 6639 - RNA, 20 nt, synthetic construct
  source 1..20: mol_type = other RNA
tcagcccctgggcccagatc

SEQ ID NO: 6640 - RNA, 20 nt, synthetic construct
  source 1..20: mol_type = other RNA
ctgggcccaggggctgaggc

SEQ ID NO: 6641 - RNA, 20 nt, synthetic construct
  source 1..20: mol_type = other RNA
gggagcctgcctcagcccct

SEQ ID NO: 6642 - RNA, 20 nt, synthetic construct
  source 1..20: mol_type = other RNA
ggggagcctgcctcagcccc

SEQ ID NO: 6643 - RNA, 20 nt, synthetic construct
  source 1..20: mol_type = other RNA
aggcaggctcccctcgcctc

SEQ ID NO: 6644 - RNA, 20 nt, synthetic construct
  source 1..20: mol_type = other RNA
ggctcccctcgcctcaggta

SEQ ID NO: 6645 - RNA, 20 nt, synthetic construct
  source 1..20: mol_type = other RNA
caggccttacctgaggcgag

SEQ ID NO: 6646 - RNA, 20 nt, synthetic construct
  source 1..20: mol_type = other RNA
tcaggccttacctgaggcga

SEQ ID NO: 6647 - RNA, 20 nt, synthetic construct
  source 1..20: mol_type = other RNA
ttcaggccttacctgaggcg

SEQ ID NO: 6648 - RNA, 20 nt, synthetic construct
  source 1..20: mol_type = other RNA
tgggtttcaggccttacctg

SEQ ID NO: 6649 - RNA, 20 nt, synthetic construct
  source 1..20: mol_type = other RNA
tgtgcttcgtcctcttccct

SEQ ID NO: 6650 - RNA, 20 nt, synthetic construct
  source 1..20: mol_type = other RNA
tcttccctaggaatgatgac

SEQ ID NO: 6651 - RNA, 20 nt, synthetic construct
  source 1..20: mol_type = other RNA
tgtcatcattcctagggaag

SEQ ID NO: 6652 - RNA, 20 nt, synthetic construct
  source 1..20: mol_type = other RNA
tgtgcctgtcatcattccta

SEQ ID NO: 6653 - RNA, 20 nt, synthetic construct
  source 1..20: mol_type = other RNA
ttgtgcctgtcatcattcct

SEQ ID NO: 6654 - RNA, 20 nt, synthetic construct
  source 1..20: mol_type = other RNA
gacaggcacaatagaaacaa

SEQ ID NO: 6655 - RNA, 20 nt, synthetic construct
  source 1..20: mol_type = other RNA
acaggcacaatagaaacaac

SEQ ID NO: 6656 - RNA, 20 nt, synthetic construct
  source 1..20: mol_type = other RNA
caggcacaatagaaacaacg

SEQ ID NO: 6657 - RNA, 20 nt, synthetic construct
  source 1..20: mol_type = other RNA
cattacaaatggccagaagc

SEQ ID NO: 6658 - RNA, 20 nt, synthetic construct
  source 1..20: mol_type = other RNA
ggccatttgtaatgctgact

SEQ ID NO: 6659 - RNA, 20 nt, synthetic construct
  source 1..20: mol_type = other RNA
gccatttgtaatgctgactt

SEQ ID NO: 6660 - RNA, 20 nt, synthetic construct
  source 1..20: mol_type = other RNA
ccatttgtaatgctgacttg

SEQ ID NO: 6661 - RNA, 20 nt, synthetic construct
  source 1..20: mol_type = other RNA
tttgtaatgctgacttgggg

SEQ ID NO: 6662 - RNA, 20 nt, synthetic construct
  source 1..20: mol_type = other RNA
ccccaagtcagcattacaaa

SEQ ID NO: 6663 - RNA, 20 nt, synthetic construct
  source 1..20: mol_type = other RNA
ctggaggtcctagaaagctc

SEQ ID NO: 6664 - RNA, 20 nt, synthetic construct
  source 1..20: mol_type = other RNA
ctgagctttctaggacctcc

SEQ ID NO: 6665 - RNA, 20 nt, synthetic construct
  source 1..20: mol_type = other RNA
gaaagctcaggtattcctgc

SEQ ID NO: 6666 - RNA, 20 nt, synthetic construct
  source 1..20: mol_type = other RNA
caggaatacctgagctttct

SEQ ID NO: 6667 - RNA, 20 nt, synthetic construct
  source 1..20: mol_type = other RNA
gtattcctgctggagcaagt

SEQ ID NO: 6668 - RNA, 20 nt, synthetic construct
  source 1..20: mol_type = other RNA
ttcctgctggagcaagttgg

SEQ ID NO: 6669 - RNA, 20 nt, synthetic construct
  source 1..20: mol_type = other RNA
atccaccaacttgctccagc

SEQ ID NO: 6670 - RNA, 20 nt, synthetic construct
  source 1..20: mol_type = other RNA
attttctatgctagagggag

SEQ ID NO: 6671 - RNA, 20 nt, synthetic construct
  source 1..20: mol_type = other RNA
attgcattttctatgctaga

SEQ ID NO: 6672 - RNA, 20 nt, synthetic construct
  source 1..20: mol_type = other RNA
gattgcattttctatgctag

SEQ ID NO: 6673 - RNA, 20 nt, synthetic construct
  source 1..20: mol_type = other RNA
atcctgaaacactgcacagc

SEQ ID NO: 6674 - RNA, 20 nt, synthetic construct
  source 1..20: mol_type = other RNA
tcctgaaacactgcacagca

SEQ ID NO: 6675 - RNA, 20 nt, synthetic construct
  source 1..20: mol_type = other RNA
gccctgctgtgcagtgtttc

SEQ ID NO: 6676 - RNA, 20 nt, synthetic construct
  source 1..20: mol_type = other RNA
cacagcagggcttctcaatt

SEQ ID NO: 6677 - RNA, 20 nt, synthetic construct
  source 1..20: mol_type = other RNA
acagcagggcttctcaattc

SEQ ID NO: 6678 - RNA, 20 nt, synthetic construct
  source 1..20: mol_type = other RNA
gatcacatttgaatcacctg

SEQ ID NO: 6679 - RNA, 20 nt, synthetic construct
  source 1..20: mol_type = other RNA
gtatgatttaaaatctcctc

SEQ ID NO: 6680 - RNA, 20 nt, synthetic construct
  source 1..20: mol_type = other RNA
tttaaatcatactgatgccg

SEQ ID NO: 6681 - RNA, 20 nt, synthetic construct
  source 1..20: mol_type = other RNA
aattggtctgggtgaggcct

SEQ ID NO: 6682 - RNA, 20 nt, synthetic construct
  source 1..20: mol_type = other RNA
tgattgaattggtctgggtg

SEQ ID NO: 6683 - RNA, 20 nt, synthetic construct
  source 1..20: mol_type = other RNA
gattctgattgaattggtct

SEQ ID NO: 6684 - RNA, 20 nt, synthetic construct
  source 1..20: mol_type = other RNA
ggattctgattgaattggtc

SEQ ID NO: 6685 - RNA, 20 nt, synthetic construct
  source 1..20: mol_type = other RNA
attagggattctgattgaat

SEQ ID NO: 6686 - RNA, 20 nt, synthetic construct
  source 1..20: mol_type = other RNA
cctaatagcagagctaaaca

SEQ ID NO: 6687 - RNA, 20 nt, synthetic construct
  source 1..20: mol_type = other RNA
ctaatagcagagctaaacaa

SEQ ID NO: 6688 - RNA, 20 nt, synthetic construct
  source 1..20: mol_type = other RNA
cttgtttagctctgctatta

SEQ ID NO: 6689 - RNA, 20 nt, synthetic construct
  source 1..20: mol_type = other RNA
ccttgtttagctctgctatt

SEQ ID NO: 6690 - RNA, 20 nt, synthetic construct
  source 1..20: mol_type = other RNA
agcagagctaaacaagggta

SEQ ID NO: 6691 - RNA, 20 nt, synthetic construct
  source 1..20: mol_type = other RNA
taaggtctaaaagcatttcc

SEQ ID NO: 6692 - RNA, 20 nt, synthetic construct
  source 1..20: mol_type = other RNA
gcatttccaggtgattctaa

SEQ ID NO: 6693 - RNA, 20 nt, synthetic construct
  source 1..20: mol_type = other RNA
catttccaggtgattctaat

SEQ ID NO: 6694 - RNA, 20 nt, synthetic construct
  source 1..20: mol_type = other RNA
ggctgcccattagaatcacc

SEQ ID NO: 6695 - RNA, 20 nt, synthetic construct
  source 1..20: mol_type = other RNA
agaacagtggttctcagtat

SEQ ID NO: 6696 - RNA, 20 nt, synthetic construct
  source 1..20: mol_type = other RNA
tgcttcttacataagaacag

SEQ ID NO: 6697 - RNA, 20 nt, synthetic construct
  source 1..20: mol_type = other RNA
acatcttacctatatttcct

SEQ ID NO: 6698 - RNA, 20 nt, synthetic construct
  source 1..20: mol_type = other RNA
ctggtcttcctaggaaatat

SEQ ID NO: 6699 - RNA, 20 nt, synthetic construct
  source 1..20: mol_type = other RNA
cctaggaagaccagttgatg

SEQ ID NO: 6700 - RNA, 20 nt, synthetic construct
  source 1..20: mol_type = other RNA
cctcatcaactggtcttcct

SEQ ID NO: 6701 - RNA, 20 nt, synthetic construct
  source 1..20: mol_type = other RNA
ttgcatatgacctcatcaac

SEQ ID NO: 6702 - RNA, 20 nt, synthetic construct
  source 1..20: mol_type = other RNA
atgcaaaagttcccatttat

SEQ ID NO: 6703 - RNA, 20 nt, synthetic construct
  source 1..20: mol_type = other RNA
attatactaaaccaataaat

SEQ ID NO: 6704 - RNA, 20 nt, synthetic construct
  source 1..20: mol_type = other RNA
aattatactaaaccaataaa

SEQ ID NO: 6705 - RNA, 20 nt, synthetic construct
  source 1..20: mol_type = other RNA
aagtgtataaagagtagagc

SEQ ID NO: 6706 - RNA, 20 nt, synthetic construct
  source 1..20: mol_type = other RNA
ctctactctttatacactta

SEQ ID NO: 6707 - RNA, 20 nt, synthetic construct
  source 1..20: mol_type = other RNA
gctctactctttatacactt

SEQ ID NO: 6708 - RNA, 20 nt, synthetic construct
  source 1..20: mol_type = other RNA
tgtacaattaaacttagcac

SEQ ID NO: 6709 - RNA, 20 nt, synthetic construct
  source 1..20: mol_type = other RNA
tacagtaatttacatttgtg

SEQ ID NO: 6710 - RNA, 20 nt, synthetic construct
  source 1..20: mol_type = other RNA
atgagggcatttgggaaact

SEQ ID NO: 6711 - RNA, 20 nt, synthetic construct
  source 1..20: mol_type = other RNA
taacaaatatgagggcattt

SEQ ID NO: 6712 - RNA, 20 nt, synthetic construct
  source 1..20: mol_type = other RNA
ataacaaatatgagggcatt

SEQ ID NO: 6713 - RNA, 20 nt, synthetic construct
  source 1..20: mol_type = other RNA
caggtggataacaaatatga

SEQ ID NO: 6714 - RNA, 20 nt, synthetic construct
  source 1..20: mol_type = other RNA
acaggtggataacaaatatg

SEQ ID NO: 6715 - RNA, 20 nt, synthetic construct
  source 1..20: mol_type = other RNA
aattggtttaaatgtacagg

SEQ ID NO: 6716 - RNA, 20 nt, synthetic construct
  source 1..20: mol_type = other RNA
acatttaaaccaattcccag

SEQ ID NO: 6717 - RNA, 20 nt, synthetic construct
  source 1..20: mol_type = other RNA
caattcccagaggttagaaa

SEQ ID NO: 6718 - RNA, 20 nt, synthetic construct
  source 1..20: mol_type = other RNA
cttttctaacctctgggaat

SEQ ID NO: 6719 - RNA, 20 nt, synthetic construct
  source 1..20: mol_type = other RNA
agaatccttttctaacctct

SEQ ID NO: 6720 - RNA, 20 nt, synthetic construct
  source 1..20: mol_type = other RNA
aagaatccttttctaacctc

SEQ ID NO: 6721 - RNA, 20 nt, synthetic construct
  source 1..20: mol_type = other RNA
tgagagacagtatagcacca

SEQ ID NO: 6722 - RNA, 20 nt, synthetic construct
  source 1..20: mol_type = other RNA
agagtctgagcttttaacca

SEQ ID NO: 6723 - RNA, 20 nt, synthetic construct
  source 1..20: mol_type = other RNA
gactctgacaccagacagtc

SEQ ID NO: 6724 - RNA, 20 nt, synthetic construct
  source 1..20: mol_type = other RNA
actctgacaccagacagtct

SEQ ID NO: 6725 - RNA, 20 nt, synthetic construct
  source 1..20: mol_type = other RNA
gacagtctgggtgcaaatcc

SEQ ID NO: 6726 - RNA, 20 nt, synthetic construct
  source 1..20: mol_type = other RNA
ggatttgcacccagactgtc

SEQ ID NO: 6727 - RNA, 20 nt, synthetic construct
  source 1..20: mol_type = other RNA
ctctgctgttgccctcagac

SEQ ID NO: 6728 - RNA, 20 nt, synthetic construct
  source 1..20: mol_type = other RNA
agctaagaaatcctgtctga

SEQ ID NO: 6729 - RNA, 20 nt, synthetic construct
  source 1..20: mol_type = other RNA
aagctaagaaatcctgtctg

SEQ ID NO: 6730 - RNA, 20 nt, synthetic construct
  source 1..20: mol_type = other RNA
tcagttttctcatctgtgaa

SEQ ID NO: 6731 - RNA, 20 nt, synthetic construct
  source 1..20: mol_type = other RNA
gttttctcatctgtgaaagg

SEQ ID NO: 6732 - RNA, 20 nt, synthetic construct
  source 1..20: mol_type = other RNA
accttatgcgatgctaatgt

SEQ ID NO: 6733 - RNA, 20 nt, synthetic construct
  source 1..20: mol_type = other RNA
tcctacattagcatcgcata

SEQ ID NO: 6734 - RNA, 20 nt, synthetic construct
  source 1..20: mol_type = other RNA
aattccctactacaagaaaa

SEQ ID NO: 6735 - RNA, 20 nt, synthetic construct
  source 1..20: mol_type = other RNA
aagaccattttcttgtagta

SEQ ID NO: 6736 - RNA, 20 nt, synthetic construct
  source 1..20: mol_type = other RNA
taagaccattttcttgtagt

SEQ ID NO: 6737 - RNA, 20 nt, synthetic construct
  source 1..20: mol_type = other RNA
aatggtcttagaacaatgcc

SEQ ID NO: 6738 - RNA, 20 nt, synthetic construct
  source 1..20: mol_type = other RNA
ttagaacaatgcctggaaca

SEQ ID NO: 6739 - RNA, 20 nt, synthetic construct
  source 1..20: mol_type = other RNA
tacagcacttaccatgttcc

SEQ ID NO: 6740 - RNA, 20 nt, synthetic construct
  source 1..20: mol_type = other RNA
ctgttttgtcctccctctag

SEQ ID NO: 6741 - RNA, 20 nt, synthetic construct
  source 1..20: mol_type = other RNA
cgcgttgactagaaaggtaa

SEQ ID NO: 6742 - RNA, 20 nt, synthetic construct
  source 1..20: mol_type = other RNA
gactagaaaggtaatggctc

SEQ ID NO: 6743 - RNA, 20 nt, synthetic construct
  source 1..20: mol_type = other RNA
caggagaaaatcagctggac

SEQ ID NO: 6744 - RNA, 20 nt, synthetic construct
  source 1..20: mol_type = other RNA
gtccagctgattttctcctg

SEQ ID NO: 6745 - RNA, 20 nt, synthetic construct
  source 1..20: mol_type = other RNA
gagaaaatcagctggacagg

SEQ ID NO: 6746 - RNA, 20 nt, synthetic construct
  source 1..20: mol_type = other RNA
aatcagctggacaggaggaa

SEQ ID NO: 6747 - RNA, 20 nt, synthetic construct
  source 1..20: mol_type = other RNA
cccagtgctccctcaccccc

SEQ ID NO: 6748 - RNA, 20 nt, synthetic construct
  source 1..20: mol_type = other RNA
ctgggggtgagggagcactg

SEQ ID NO: 6749 - RNA, 20 nt, synthetic construct
  source 1..20: mol_type = other RNA
cctgggggtgagggagcact

SEQ ID NO: 6750 - RNA, 20 nt, synthetic construct
  source 1..20: mol_type = other RNA
tcctgggggtgagggagcac

SEQ ID NO: 6751 - RNA, 20 nt, synthetic construct
  source 1..20: mol_type = other RNA
acccccaggaagctgtgtcc

SEQ ID NO: 6752 - RNA, 20 nt, synthetic construct
  source 1..20: mol_type = other RNA
gacacagcttcctgggggtg

SEQ ID NO: 6753 - RNA, 20 nt, synthetic construct
  source 1..20: mol_type = other RNA
gcctggacacagcttcctgg

SEQ ID NO: 6754 - RNA, 20 nt, synthetic construct
  source 1..20: mol_type = other RNA
tgcctggacacagcttcctg

SEQ ID NO: 6755 - RNA, 20 nt, synthetic construct
  source 1..20: mol_type = other RNA
ctgcctggacacagcttcct

SEQ ID NO: 6756 - RNA, 20 nt, synthetic construct
  source 1..20: mol_type = other RNA
tctgcctggacacagcttcc

SEQ ID NO: 6757 - RNA, 20 nt, synthetic construct
  source 1..20: mol_type = other RNA
caggcagaagctgcacctgc

SEQ ID NO: 6758 - RNA, 20 nt, synthetic construct
  source 1..20: mol_type = other RNA
aggcagaagctgcacctgct

SEQ ID NO: 6759 - RNA, 20 nt, synthetic construct
  source 1..20: mol_type = other RNA
cagcaggtgcagcttctgcc

SEQ ID NO: 6760 - RNA, 20 nt, synthetic construct
  source 1..20: mol_type = other RNA
gctgcacctgctgggctctg

SEQ ID NO: 6761 - RNA, 20 nt, synthetic construct
  source 1..20: mol_type = other RNA
ctgggctctgtggagagcag

SEQ ID NO: 6762 - RNA, 20 nt, synthetic construct
  source 1..20: mol_type = other RNA
tgggctctgtggagagcagc

SEQ ID NO: 6763 - RNA, 20 nt, synthetic construct
  source 1..20: mol_type = other RNA
gggctctgtggagagcagcg

SEQ ID NO: 6764 - RNA, 20 nt, synthetic construct
  source 1..20: mol_type = other RNA
ctgtggagagcagcggggag

SEQ ID NO: 6765 - RNA, 20 nt, synthetic construct
  source 1..20: mol_type = other RNA
attgaagtagtcatgcagct

SEQ ID NO: 6766 - RNA, 20 nt, synthetic construct
  source 1..20: mol_type = other RNA
tgtcctgagttacagaagcc

SEQ ID NO: 6767 - RNA, 20 nt, synthetic construct
  source 1..20: mol_type = other RNA
gtcctgagttacagaagcct

SEQ ID NO: 6768 - RNA, 20 nt, synthetic construct
  source 1..20: mol_type = other RNA
tacccaggcttctgtaactc

SEQ ID NO: 6769 - RNA, 20 nt, synthetic construct
  source 1..20: mol_type = other RNA
tgaagaagctgcagttaccc

SEQ ID NO: 6770 - RNA, 20 nt, synthetic construct
  source 1..20: mol_type = other RNA
tgcagcttcttcacagagac

SEQ ID NO: 6771 - RNA, 20 nt, synthetic construct
  source 1..20: mol_type = other RNA
agagactggttagcaaccag

SEQ ID NO: 6772 - RNA, 20 nt, synthetic construct
  source 1..20: mol_type = other RNA
tagcaaccagaggcatcttc

SEQ ID NO: 6773 - RNA, 20 nt, synthetic construct
  source 1..20: mol_type = other RNA
tatcttccagaagatgcctc

SEQ ID NO: 6774 - RNA, 20 nt, synthetic construct
  source 1..20: mol_type = other RNA
acacacacacgcagcactga

SEQ ID NO: 6775 - RNA, 20 nt, synthetic construct
  source 1..20: mol_type = other RNA
cttctccatcttcatttcct

SEQ ID NO: 6776 - RNA, 20 nt, synthetic construct
  source 1..20: mol_type = other RNA
aggaaatgaagatggagaag

SEQ ID NO: 6777 - RNA, 20 nt, synthetic construct
  source 1..20: mol_type = other RNA
aaaggccaaggaaatgaaga

SEQ ID NO: 6778 - RNA, 20 nt, synthetic construct
  source 1..20: mol_type = other RNA
ggaatagaacgaaaaggcca

SEQ ID NO: 6779 - RNA, 20 nt, synthetic construct
  source 1..20: mol_type = other RNA
caaaatggaatagaacgaaa

SEQ ID NO: 6780 - RNA, 20 nt, synthetic construct
  source 1..20: mol_type = other RNA
ttctattccattttgcatta

SEQ ID NO: 6781 - RNA, 20 nt, synthetic construct
  source 1..20: mol_type = other RNA
attccattttgcattatggc

SEQ ID NO: 6782 - RNA, 20 nt, synthetic construct
  source 1..20: mol_type = other RNA
ttttgcattatggcaggcct

SEQ ID NO: 6783 - RNA, 20 nt, synthetic construct
  source 1..20: mol_type = other RNA
tttgcattatggcaggccta

SEQ ID NO: 6784 - RNA, 20 nt, synthetic construct
  source 1..20: mol_type = other RNA
aggcctgccataatgcaaaa

SEQ ID NO: 6785 - RNA, 20 nt, synthetic construct
  source 1..20: mol_type = other RNA
caggcctagggtgagtaacg

SEQ ID NO: 6786 - RNA, 20 nt, synthetic construct
  source 1..20: mol_type = other RNA
agatccacgttactcaccct

SEQ ID NO: 6787 - RNA, 20 nt, synthetic construct
  source 1..20: mol_type = other RNA
aattaaaaaatatcttgacc

SEQ ID NO: 6788 - RNA, 20 nt, synthetic construct
  source 1..20: mol_type = other RNA
tcttgacctggttttaaatc

SEQ ID NO: 6789 - RNA, 20 nt, synthetic construct
  source 1..20: mol_type = other RNA
aaactgccagatttaaaacc

SEQ ID NO: 6790 - RNA, 20 nt, synthetic construct
  source 1..20: mol_type = other RNA
aatgtgtctctcagagacat

SEQ ID NO: 6791 - RNA, 20 nt, synthetic construct
  source 1..20: mol_type = other RNA
gagagacacattcctcataa

SEQ ID NO: 6792 - RNA, 20 nt, synthetic construct
  source 1..20: mol_type = other RNA
cctcataatggccagcattt

SEQ ID NO: 6793 - RNA, 20 nt, synthetic construct
  source 1..20: mol_type = other RNA
ctcataatggccagcatttt

SEQ ID NO: 6794 - RNA, 20 nt, synthetic construct
  source 1..20: mol_type = other RNA
ccaaaatgctggccattatg

SEQ ID NO: 6795 - RNA, 20 nt, synthetic construct
  source 1..20: mol_type = other RNA
ggccagcattttgggctaca

SEQ ID NO: 6796 - RNA, 20 nt, synthetic construct
  source 1..20: mol_type = other RNA
aaccttgtagcccaaaatgc

SEQ ID NO: 6797 - RNA, 20 nt, synthetic construct
  source 1..20: mol_type = other RNA
ttttgggctacaaggttttg

SEQ ID NO: 6798 - RNA, 20 nt, synthetic construct
  source 1..20: mol_type = other RNA
aggttttgtggttgatgatg

SEQ ID NO: 6799 - RNA, 20 nt, synthetic construct
  source 1..20: mol_type = other RNA
tttgtggttgatgatgagga

SEQ ID NO: 6800 - RNA, 20 nt, synthetic construct
  source 1..20: mol_type = other RNA
gtgaaaaaatgagatgagga

SEQ ID NO: 6801 - RNA, 20 nt, synthetic construct
  source 1..20: mol_type = other RNA
tgacgtgaaaaaatgagatg

SEQ ID NO: 6802 - RNA, 20 nt, synthetic construct
  source 1..20: mol_type = other RNA
agtaactttcactcattcaa

SEQ ID NO: 6803 - RNA, 20 nt, synthetic construct
  source 1..20: mol_type = other RNA
actttcactcattcaaaggc

SEQ ID NO: 6804 - RNA, 20 nt, synthetic construct
  source 1..20: mol_type = other RNA
ggcaggttataagtaagtcc

SEQ ID NO: 6805 - RNA, 20 nt, synthetic construct
  source 1..20: mol_type = other RNA
agtcctggtagcagcctcta

SEQ ID NO: 6806 - RNA, 20 nt, synthetic construct
  source 1..20: mol_type = other RNA
gtcctggtagcagcctctat

SEQ ID NO: 6807 - RNA, 20 nt, synthetic construct
  source 1..20: mol_type = other RNA
tcctggtagcagcctctatg

SEQ ID NO: 6808 - RNA, 20 nt, synthetic construct
  source 1..20: mol_type = other RNA
tccccatagaggctgctacc

SEQ ID NO: 6809 - RNA, 20 nt, synthetic construct
  source 1..20: mol_type = other RNA
actctcaaatctccccatag

SEQ ID NO: 6810 - RNA, 20 nt, synthetic construct
  source 1..20: mol_type = other RNA
atttgagagtgactaaatct

SEQ ID NO: 6811 - RNA, 20 nt, synthetic construct
  source 1..20: mol_type = other RNA
ctcaagaacttacagttaaa

SEQ ID NO: 6812 - RNA, 20 nt, synthetic construct
  source 1..20: mol_type = other RNA
tcaagaacttacagttaaat

SEQ ID NO: 6813 - RNA, 20 nt, synthetic construct
  source 1..20: mol_type = other RNA
caagaacttacagttaaatg

SEQ ID NO: 6814 - RNA, 20 nt, synthetic construct
  source 1..20: mol_type = other RNA
atttaactgtaagttcttga

SEQ ID NO: 6815 - RNA, 20 nt, synthetic construct
  source 1..20: mol_type = other RNA
catttaactgtaagttcttg

SEQ ID NO: 6816 - RNA, 20 nt, synthetic construct
  source 1..20: mol_type = other RNA
gagacaatgttgtcatgaaa

SEQ ID NO: 6817 - RNA, 20 nt, synthetic construct
  source 1..20: mol_type = other RNA
catgaaaaggtattatagta

SEQ ID NO: 6818 - RNA, 20 nt, synthetic construct
  source 1..20: mol_type = other RNA
ggtattatagtaaggagaga

SEQ ID NO: 6819 - RNA, 20 nt, synthetic construct
  source 1..20: mol_type = other RNA
ggagagaaggagacatacac

SEQ ID NO: 6820 - RNA, 20 nt, synthetic construct
  source 1..20: mol_type = other RNA
ggagacatacacaggccttc

SEQ ID NO: 6821 - RNA, 20 nt, synthetic construct
  source 1..20: mol_type = other RNA
ttcaggaagagacgacagtt

SEQ ID NO: 6822 - RNA, 20 nt, synthetic construct
  source 1..20: mol_type = other RNA
tcaggaagagacgacagttt

SEQ ID NO: 6823 - RNA, 20 nt, synthetic construct
  source 1..20: mol_type = other RNA
caggaagagacgacagtttg

SEQ ID NO: 6824 - RNA, 20 nt, synthetic construct
  source 1..20: mol_type = other RNA
aaactgtcgtctcttcctga

SEQ ID NO: 6825 - RNA, 20 nt, synthetic construct
  source 1..20: mol_type = other RNA
agagacgacagtttggggtg

SEQ ID NO: 6826 - RNA, 20 nt, synthetic construct
  source 1..20: mol_type = other RNA
acagtttggggtgaggtagt

SEQ ID NO: 6827 - RNA, 20 nt, synthetic construct
  source 1..20: mol_type = other RNA
tggggtgaggtagttggcat

SEQ ID NO: 6828 - RNA, 20 nt, synthetic construct
  source 1..20: mol_type = other RNA
taggcttatctgtgatgaag

SEQ ID NO: 6829 - RNA, 20 nt, synthetic construct
  source 1..20: mol_type = other RNA
ttatctgtgatgaagtggcc

SEQ ID NO: 6830 - RNA, 20 nt, synthetic construct
  source 1..20: mol_type = other RNA
tatctgtgatgaagtggcct

SEQ ID NO: 6831 - RNA, 20 nt, synthetic construct
  source 1..20: mol_type = other RNA
gaagtggcctgggagcacca

SEQ ID NO: 6832 - RNA, 20 nt, synthetic construct
  source 1..20: mol_type = other RNA
aagtggcctgggagcaccaa

SEQ ID NO: 6833 - RNA, 20 nt, synthetic construct
  source 1..20: mol_type = other RNA
agtggcctgggagcaccaag

SEQ ID NO: 6834 - RNA, 20 nt, synthetic construct
  source 1..20: mol_type = other RNA
ggagcaccaaggggatgttg

SEQ ID NO: 6835 - RNA, 20 nt, synthetic construct
  source 1..20: mol_type = other RNA
aacatccccttggtgctccc

SEQ ID NO: 6836 - RNA, 20 nt, synthetic construct
  source 1..20: mol_type = other RNA
aggggatgttgaggctagtc

SEQ ID NO: 6837 - RNA, 20 nt, synthetic construct
  source 1..20: mol_type = other RNA
ggggatgttgaggctagtct

SEQ ID NO: 6838 - RNA, 20 nt, synthetic construct
  source 1..20: mol_type = other RNA
gactagcctcaacatcccct

SEQ ID NO: 6839 - RNA, 20 nt, synthetic construct
  source 1..20: mol_type = other RNA
gatgttgaggctagtctggg

SEQ ID NO: 6840 - RNA, 20 nt, synthetic construct
  source 1..20: mol_type = other RNA
gaggctagtctgggaggagc

SEQ ID NO: 6841 - RNA, 20 nt, synthetic construct
  source 1..20: mol_type = other RNA
gaggagcaggagttttgtct

SEQ ID NO: 6842 - RNA, 20 nt, synthetic construct
  source 1..20: mol_type = other RNA
aggagcaggagttttgtcta

SEQ ID NO: 6843 - RNA, 20 nt, synthetic construct
  source 1..20: mol_type = other RNA
gttttgtctagggaacttgt

SEQ ID NO: 6844 - RNA, 20 nt, synthetic construct
  source 1..20: mol_type = other RNA
gggaacttgtaggaaattct

SEQ ID NO: 6845 - RNA, 20 nt, synthetic construct
  source 1..20: mol_type = other RNA
agctgaaagtcccacaaaga

SEQ ID NO: 6846 - RNA, 20 nt, synthetic construct
  source 1..20: mol_type = other RNA
aagtcccacaaagaaggccc

SEQ ID NO: 6847 - RNA, 20 nt, synthetic construct
  source 1..20: mol_type = other RNA
caaagaaggccctggcacca

SEQ ID NO: 6848 - RNA, 20 nt, synthetic construct
  source 1..20: mol_type = other RNA
aaagaaggccctggcaccaa

SEQ ID NO: 6849 - RNA, 20 nt, synthetic construct
  source 1..20: mol_type = other RNA
tggtgccagggccttctttg

SEQ ID NO: 6850 - RNA, 20 nt, synthetic construct
  source 1..20: mol_type = other RNA
tgctgactcccttggtgcca

SEQ ID NO: 6851 - RNA, 20 nt, synthetic construct
  source 1..20: mol_type = other RNA
ttgctgactcccttggtgcc

SEQ ID NO: 6852 - RNA, 20 nt, synthetic construct
  source 1..20: mol_type = other RNA
ctgaagtttgctgactccct

SEQ ID NO: 6853 - RNA, 20 nt, synthetic construct
  source 1..20: mol_type = other RNA
aaacttcagattttattctc

SEQ ID NO: 6854 - RNA, 20 nt, synthetic construct
  source 1..20: mol_type = other RNA
aacttcagattttattctct

SEQ ID NO: 6855 - RNA, 20 nt, synthetic construct
  source 1..20: mol_type = other RNA
tcagattttattctctgggc

SEQ ID NO: 6856 - RNA, 20 nt, synthetic construct
  source 1..20: mol_type = other RNA
gatgagtatgtcacagcaaa

SEQ ID NO: 6857 - RNA, 20 nt, synthetic construct
  source 1..20: mol_type = other RNA
tccattagacagcctgatac

SEQ ID NO: 6858 - RNA, 20 nt, synthetic construct
  source 1..20: mol_type = other RNA
gcctgtatcaggctgtctaa

SEQ ID NO: 6859 - RNA, 20 nt, synthetic construct
  source 1..20: mol_type = other RNA
tacaggcctgtagcctcttc

SEQ ID NO: 6860 - RNA, 20 nt, synthetic construct
  source 1..20: mol_type = other RNA
acacggccggaagaggctac

SEQ ID NO: 6861 - RNA, 20 nt, synthetic construct
  source 1..20: mol_type = other RNA
cctcttccggccgtgtgtgc

SEQ ID NO: 6862 - RNA, 20 nt, synthetic construct
  source 1..20: mol_type = other RNA
ctcttccggccgtgtgtgct

SEQ ID NO: 6863 - RNA, 20 nt, synthetic construct
  source 1..20: mol_type = other RNA
tcttccggccgtgtgtgctg

SEQ ID NO: 6864 - RNA, 20 nt, synthetic construct
  source 1..20: mol_type = other RNA
ccagcacacacggccggaag

SEQ ID NO: 6865 - RNA, 20 nt, synthetic construct
  source 1..20: mol_type = other RNA
gcttccccagcacacacggc

SEQ ID NO: 6866 - RNA, 20 nt, synthetic construct
  source 1..20: mol_type = other RNA
gtgtgtgctggggaagcccc

SEQ ID NO: 6867 - RNA, 20 nt, synthetic construct
  source 1..20: mol_type = other RNA
tggggcttccccagcacaca

SEQ ID NO: 6868 - RNA, 20 nt, synthetic construct
  source 1..20: mol_type = other RNA
ggaaacgcacatgcccacac

SEQ ID NO: 6869 - RNA, 20 nt, synthetic construct
  source 1..20: mol_type = other RNA
gaaacgcacatgcccacaca

SEQ ID NO: 6870 - RNA, 20 nt, synthetic construct
  source 1..20: mol_type = other RNA
gtgtgggcatgtgcgtttcc

SEQ ID NO: 6871 - RNA, 20 nt, synthetic construct
  source 1..20: mol_type = other RNA
tacgacttggctccctgtgt

SEQ ID NO: 6872 - RNA, 20 nt, synthetic construct
  source 1..20: mol_type = other RNA
ctacgacttggctccctgtg

SEQ ID NO: 6873 - RNA, 20 nt, synthetic construct
  source 1..20: mol_type = other RNA
gggagccaagtcgtagcatt

SEQ ID NO: 6874 - RNA, 20 nt, synthetic construct
  source 1..20: mol_type = other RNA
ggagccaagtcgtagcattt

SEQ ID NO: 6875 - RNA, 20 nt, synthetic construct
  source 1..20: mol_type = other RNA
aaggcccaaatgctacgact

SEQ ID NO: 6876 - RNA, 20 nt, synthetic construct
  source 1..20: mol_type = other RNA
gatgcagaaaaggtagatca

SEQ ID NO: 6877 - RNA, 20 nt, synthetic construct
  source 1..20: mol_type = other RNA
agagtgtattgatgcagaaa

SEQ ID NO: 6878 - RNA, 20 nt, synthetic construct
  source 1..20: mol_type = other RNA
gggaaacgttcttttttcaa

SEQ ID NO: 6879 - RNA, 20 nt, synthetic construct
  source 1..20: mol_type = other RNA
ttcccactaaaaagaaaatg

SEQ ID NO: 6880 - RNA, 20 nt, synthetic construct
  source 1..20: mol_type = other RNA
atccacattttctttttagt

SEQ ID NO: 6881 - RNA, 20 nt, synthetic construct
  source 1..20: mol_type = other RNA
aatccacattttctttttag

SEQ ID NO: 6882 - RNA, 20 nt, synthetic construct
  source 1..20: mol_type = other RNA
aaaatgtggatttttaaaat

SEQ ID NO: 6883 - RNA, 20 nt, synthetic construct
  source 1..20: mol_type = other RNA
aaatgtggatttttaaaata

SEQ ID NO: 6884 - RNA, 20 nt, synthetic construct
  source 1..20: mol_type = other RNA
ttaaaatagggactcttcct

SEQ ID NO: 6885 - RNA, 20 nt, synthetic construct
  source 1..20: mol_type = other RNA
taaaatagggactcttccta

SEQ ID NO: 6886 - RNA, 20 nt, synthetic construct
  source 1..20: mol_type = other RNA
aaaatagggactcttcctag

SEQ ID NO: 6887 - RNA, 20 nt, synthetic construct
  source 1..20: mol_type = other RNA
ggactcttcctaggggaaaa

SEQ ID NO: 6888 - RNA, 20 nt, synthetic construct
  source 1..20: mol_type = other RNA
gactcttcctaggggaaaaa

SEQ ID NO: 6889 - RNA, 20 nt, synthetic construct
  source 1..20: mol_type = other RNA
actcttcctaggggaaaaag

SEQ ID NO: 6890 - RNA, 20 nt, synthetic construct
  source 1..20: mol_type = other RNA
ctcttcctaggggaaaaagg

SEQ ID NO: 6891 - RNA, 20 nt, synthetic construct
  source 1..20: mol_type = other RNA
tcttcctaggggaaaaaggg

SEQ ID NO: 6892 - RNA, 20 nt, synthetic construct
  source 1..20: mol_type = other RNA
cctaggggaaaaaggggggc

SEQ ID NO: 6893 - RNA, 20 nt, synthetic construct
  source 1..20: mol_type = other RNA
ctaggggaaaaaggggggct

SEQ ID NO: 6894 - RNA, 20 nt, synthetic construct
  source 1..20: mol_type = other RNA
ccagcccccctttttcccct

SEQ ID NO: 6895 - RNA, 20 nt, synthetic construct
  source 1..20: mol_type = other RNA
aggggggctgggagtgatag

SEQ ID NO: 6896 - RNA, 20 nt, synthetic construct
  source 1..20: mol_type = other RNA
ggggggctgggagtgataga

SEQ ID NO: 6897 - RNA, 20 nt, synthetic construct
  source 1..20: mol_type = other RNA
gttcgaagaagttagtttga

SEQ ID NO: 6898 - RNA, 20 nt, synthetic construct
  source 1..20: mol_type = other RNA
tcgtcagggagtgaataaaa

SEQ ID NO: 6899 - RNA, 20 nt, synthetic construct
  source 1..20: mol_type = other RNA
gtcgtcagggagtgaataaa

SEQ ID NO: 6900 - RNA, 20 nt, synthetic construct
  source 1..20: mol_type = other RNA
actccctgacgactttgtgc

SEQ ID NO: 6901 - RNA, 20 nt, synthetic construct
  source 1..20: mol_type = other RNA
ctccctgacgactttgtgct

SEQ ID NO: 6902 - RNA, 20 nt, synthetic construct
  source 1..20: mol_type = other RNA
tccctgacgactttgtgctg

SEQ ID NO: 6903 - RNA, 20 nt, synthetic construct
  source 1..20: mol_type = other RNA
tgacgactttgtgctggggt

SEQ ID NO: 6904 - RNA, 20 nt, synthetic construct
  source 1..20: mol_type = other RNA
gacgactttgtgctggggtt

SEQ ID NO: 6905 - RNA, 20 nt, synthetic construct
  source 1..20: mol_type = other RNA
acgactttgtgctggggttg

SEQ ID NO: 6906 - RNA, 20 nt, synthetic construct
  source 1..20: mol_type = other RNA
aaccccagcacaaagtcgtc

SEQ ID NO: 6907 - RNA, 20 nt, synthetic construct
  source 1..20: mol_type = other RNA
tgcaattaaacagaaataag

SEQ ID NO: 6908 - RNA, 20 nt, synthetic construct
  source 1..20: mol_type = other RNA
atttctgtttaattgcattc

SEQ ID NO: 6909 - RNA, 20 nt, synthetic construct
  source 1..20: mol_type = other RNA
ctgtttaattgcattcaggc

SEQ ID NO: 6910 - RNA, 20 nt, synthetic construct
  source 1..20: mol_type = other RNA
ccttccaccatctctctcag

SEQ ID NO: 6911 - RNA, 20 nt, synthetic construct
  source 1..20: mol_type = other RNA
cctctgagagagatggtgga

SEQ ID NO: 6912 - RNA, 20 nt, synthetic construct
  source 1..20: mol_type = other RNA
atctctctcagaggaatgag

SEQ ID NO: 6913 - RNA, 20 nt, synthetic construct
  source 1..20: mol_type = other RNA
tctctctcagaggaatgagc

SEQ ID NO: 6914 - RNA, 20 nt, synthetic construct
  source 1..20: mol_type = other RNA
ctctctcagaggaatgagcg

SEQ ID NO: 6915 - RNA, 20 nt, synthetic construct
  source 1..20: mol_type = other RNA
gctcattcctctgagagaga

SEQ ID NO: 6916 - RNA, 20 nt, synthetic construct
  source 1..20: mol_type = other RNA
tctcagaggaatgagcgggg

SEQ ID NO: 6917 - RNA, 20 nt, synthetic construct
  source 1..20: mol_type = other RNA
agaggaatgagcggggaggt

SEQ ID NO: 6918 - RNA, 20 nt, synthetic construct
  source 1..20: mol_type = other RNA
agcggggaggttggatttac

SEQ ID NO: 6919 - RNA, 20 nt, synthetic construct
  source 1..20: mol_type = other RNA
tggtgactgattttctttca

SEQ ID NO: 6920 - RNA, 20 nt, synthetic construct
  source 1..20: mol_type = other RNA
ggtgactgattttctttcat

SEQ ID NO: 6921 - RNA, 20 nt, synthetic construct
  source 1..20: mol_type = other RNA
tgattttctttcatgggcca

SEQ ID NO: 6922 - RNA, 20 nt, synthetic construct
  source 1..20: mol_type = other RNA
cacattctctttcagttcct

SEQ ID NO: 6923 - RNA, 20 nt, synthetic construct
  source 1..20: mol_type = other RNA
ctgaaagagaatgtgaagca

SEQ ID NO: 6924 - RNA, 20 nt, synthetic construct
  source 1..20: mol_type = other RNA
gcaaggttgtgtcttgcgca

SEQ ID NO: 6925 - RNA, 20 nt, synthetic construct
  source 1..20: mol_type = other RNA
ctgcttcctaagacttagac

SEQ ID NO: 6926 - RNA, 20 nt, synthetic construct
  source 1..20: mol_type = other RNA
tgcttcctaagacttagact

SEQ ID NO: 6927 - RNA, 20 nt, synthetic construct
  source 1..20: mol_type = other RNA
gcttcctaagacttagactg

SEQ ID NO: 6928 - RNA, 20 nt, synthetic construct
  source 1..20: mol_type = other RNA
cagtctaagtcttaggaagc

SEQ ID NO: 6929 - RNA, 20 nt, synthetic construct
  source 1..20: mol_type = other RNA
tcaaccccagtctaagtctt

SEQ ID NO: 6930 - RNA, 20 nt, synthetic construct
  source 1..20: mol_type = other RNA
acaattcaactatttctcct

SEQ ID NO: 6931 - RNA, 20 nt, synthetic construct
  source 1..20: mol_type = other RNA
ataataataataaaaatcct

SEQ ID NO: 6932 - RNA, 20 nt, synthetic construct
  source 1..20: mol_type = other RNA
tttttcacttttctaccaaa

SEQ ID NO: 6933 - RNA, 20 nt, synthetic construct
  source 1..20: mol_type = other RNA
ttttcacttttctaccaaat

SEQ ID NO: 6934 - RNA, 20 nt, synthetic construct
  source 1..20: mol_type = other RNA
ttctaccaaatgggttacat

SEQ ID NO: 6935 - RNA, 20 nt, synthetic construct
  source 1..20: mol_type = other RNA
ttcttcctatgtaacccatt

SEQ ID NO: 6936 - RNA, 20 nt, synthetic construct
  source 1..20: mol_type = other RNA
gtccagagctccaagtcctt

SEQ ID NO: 6937 - RNA, 20 nt, synthetic construct
  source 1..20: mol_type = other RNA
ttccaaaggacttggagctc

SEQ ID NO: 6938 - RNA, 20 nt, synthetic construct
  source 1..20: mol_type = other RNA
aatctttcttccaaaggact

SEQ ID NO: 6939 - RNA, 20 nt, synthetic construct
  source 1..20: mol_type = other RNA
tcatctaatctttcttccaa

SEQ ID NO: 6940 - RNA, 20 nt, synthetic construct
  source 1..20: mol_type = other RNA
aaaaatgttgttgtttgctg

SEQ ID NO: 6941 - RNA, 20 nt, synthetic construct
  source 1..20: mol_type = other RNA
caaaattagtgcaaatctgt

SEQ ID NO: 6942 - RNA, 20 nt, synthetic construct
  source 1..20: mol_type = other RNA
atagaacacaattcacaaat

SEQ ID NO: 6943 - RNA, 20 nt, synthetic construct
  source 1..20: mol_type = other RNA
actaaaatgtaatgacgaaa

SEQ ID NO: 6944 - RNA, 20 nt, synthetic construct
  source 1..20: mol_type = other RNA
ctaaaatgtaatgacgaaaa

SEQ ID NO: 6945 - RNA, 20 nt, synthetic construct
  source 1..20: mol_type = other RNA
aagggagtagtgttttgatt

SEQ ID NO: 6946 - RNA, 20 nt, synthetic construct
  source 1..20: mol_type = other RNA
ggagtagtgttttgatttgg

SEQ ID NO: 6947 - RNA, 20 nt, synthetic construct
  source 1..20: mol_type = other RNA
gtagtgttttgatttggagg

SEQ ID NO: 6948 - RNA, 20 nt, synthetic construct
  source 1..20: mol_type = other RNA
atttggaggaggtgtatatt

SEQ ID NO: 6949 - RNA, 20 nt, synthetic construct
  source 1..20: mol_type = other RNA
aggaggtgtatattcggcag

SEQ ID NO: 6950 - RNA, 20 nt, synthetic construct
  source 1..20: mol_type = other RNA
ggtgtatattcggcagaggt

SEQ ID NO: 6951 - RNA, 20 nt, synthetic construct
  source 1..20: mol_type = other RNA
gcagaggttggactgagagt

SEQ ID NO: 6952 - RNA, 20 nt, synthetic construct
  source 1..20: mol_type = other RNA
cagaggttggactgagagtt

SEQ ID NO: 6953 - RNA, 20 nt, synthetic construct
  source 1..20: mol_type = other RNA
ggtgttatttaacataatta

SEQ ID NO: 6954 - RNA, 20 nt, synthetic construct
  source 1..20: mol_type = other RNA
tttaacataattatggtaat

SEQ ID NO: 6955 - RNA, 20 nt, synthetic construct
  source 1..20: mol_type = other RNA
ttaacataattatggtaatt

SEQ ID NO: 6956 - RNA, 20 nt, synthetic construct
  source 1..20: mol_type = other RNA
gaaacatttataaacactat

SEQ ID NO: 6957 - RNA, 20 nt, synthetic construct
  source 1..20: mol_type = other RNA
aaacatttataaacactatt

SEQ ID NO: 6958 - RNA, 20 nt, synthetic construct
  source 1..20: mol_type = other RNA
atttataaacactattggga

SEQ ID NO: 6959 - RNA, 20 nt, synthetic construct
  source 1..20: mol_type = other RNA
ggatggtgataaaatacaaa

SEQ ID NO: 6960 - RNA, 20 nt, synthetic construct
  source 1..20: mol_type = other RNA
gatggtgataaaatacaaaa

SEQ ID NO: 6961 - RNA, 20 nt, synthetic construct
  source 1..20: mol_type = other RNA
gggcctatagatgttagaaa

SEQ ID NO: 6962 - RNA, 20 nt, synthetic construct
  source 1..20: mol_type = other RNA
ggcctatagatgttagaaat

SEQ ID NO: 6963 - RNA, 20 nt, synthetic construct
  source 1..20: mol_type = other RNA
atagatgttagaaatgggtc

SEQ ID NO: 6964 - RNA, 20 nt, synthetic construct
  source 1..20: mol_type = other RNA
gacccatttctaacatctat

SEQ ID NO: 6965 - RNA, 20 nt, synthetic construct
  source 1..20: mol_type = other RNA
aatgggtcaggttactgaaa

SEQ ID NO: 6966 - RNA, 20 nt, synthetic construct
  source 1..20: mol_type = other RNA
atgggtcaggttactgaaat

SEQ ID NO: 6967 - RNA, 20 nt, synthetic construct
  source 1..20: mol_type = other RNA
tggtcttctctggttctcag

SEQ ID NO: 6968 - RNA, 20 nt, synthetic construct
  source 1..20: mol_type = other RNA
agagaagaccatttcatagt

SEQ ID NO: 6969 - RNA, 20 nt, synthetic construct
  source 1..20: mol_type = other RNA
aactatgaaatggtcttctc

SEQ ID NO: 6970 - RNA, 20 nt, synthetic construct
  source 1..20: mol_type = other RNA
ccatttcatagttggattcc

SEQ ID NO: 6971 - RNA, 20 nt, synthetic construct
  source 1..20: mol_type = other RNA
ccaggaatccaactatgaaa

SEQ ID NO: 6972 - RNA, 20 nt, synthetic construct
  source 1..20: mol_type = other RNA
ggtggatagcgcatgtctcc

SEQ ID NO: 6973 - RNA, 20 nt, synthetic construct
  source 1..20: mol_type = other RNA
acgtagccactttccacatg

SEQ ID NO: 6974 - RNA, 20 nt, synthetic construct
  source 1..20: mol_type = other RNA
acatgtggaaagtggctacg

SEQ ID NO: 6975 - RNA, 20 nt, synthetic construct
  source 1..20: mol_type = other RNA
tgatggccacatgtggaaag

SEQ ID NO: 6976 - RNA, 20 nt, synthetic construct
  source 1..20: mol_type = other RNA
aagtggttgatggccacatg

SEQ ID NO: 6977 - RNA, 20 nt, synthetic construct
  source 1..20: mol_type = other RNA
tggccatcaaccacttaaga

SEQ ID NO: 6978 - RNA, 20 nt, synthetic construct
  source 1..20: mol_type = other RNA
ggccatcaaccacttaagat

SEQ ID NO: 6979 - RNA, 20 nt, synthetic construct
  source 1..20: mol_type = other RNA
gccatcaaccacttaagatg

SEQ ID NO: 6980 - RNA, 20 nt, synthetic construct
  source 1..20: mol_type = other RNA
accccatcttaagtggttga

SEQ ID NO: 6981 - RNA, 20 nt, synthetic construct
  source 1..20: mol_type = other RNA
taaactaaccccatcttaag

SEQ ID NO: 6982 - RNA, 20 nt, synthetic construct
  source 1..20: mol_type = other RNA
tcaagatgtgctgttataat

SEQ ID NO: 6983 - RNA, 20 nt, synthetic construct
  source 1..20: mol_type = other RNA
cataaaatcacactagattc

SEQ ID NO: 6984 - RNA, 20 nt, synthetic construct
  source 1..20: mol_type = other RNA
gaatactatttcagtagttt

SEQ ID NO: 6985 - RNA, 20 nt, synthetic construct
  source 1..20: mol_type = other RNA
tgtcaaaaatgataatattt

SEQ ID NO: 6986 - RNA, 20 nt, synthetic construct
  source 1..20: mol_type = other RNA
tgataatattttggatgtat

SEQ ID NO: 6987 - RNA, 20 nt, synthetic construct
  source 1..20: mol_type = other RNA
gataatattttggatgtatt

SEQ ID NO: 6988 - DNA, 28 bp, synthetic construct
  source 1..28: mol_type = other DNA
gtgctctagtcccactagctgctcttgg

SEQ ID NO: 6989 - DNA, 28 bp, synthetic construct
  source 1..28: mol_type = other DNA
agtggcagggccaagagcagctagtggg

SEQ ID NO: 6990 - DNA, 28 bp, synthetic construct
  source 1..28: mol_type = other DNA
gagtggcagggccaagagcagctagtgg

SEQ ID NO: 6991 - DNA, 28 bp, synthetic construct
  source 1..28: mol_type = other DNA
tagctgctcttggccctgccactcctgg

SEQ ID NO: 6992 - DNA, 28 bp, synthetic construct
  source 1..28: mol_type = other DNA
cttggccctgccactcctggctccccgg

SEQ ID NO: 6993 - DNA, 28 bp, synthetic construct
  source 1..28: mol_type = other DNA
taaggccggggagccaggagtggcaggg

SEQ ID NO: 6994 - DNA, 28 bp, synthetic construct
  source 1..28: mol_type = other DNA
ctaaggccggggagccaggagtggcagg

SEQ ID NO: 6995 - DNA, 28 bp, synthetic construct
  source 1..28: mol_type = other DNA
ctcactaaggccggggagccaggagtgg

SEQ ID NO: 6996 - DNA, 28 bp, synthetic construct
  source 1..28: mol_type = other DNA
cctggctccccggccttagtgagtttgg

SEQ ID NO: 6997 - DNA, 28 bp, synthetic construct
  source 1..28: mol_type = other DNA
ctggctccccggccttagtgagtttggg

SEQ ID NO: 6998 - DNA, 28 bp, synthetic construct
  source 1..28: mol_type = other DNA
atgtttcccaaactcactaaggccgggg

SEQ ID NO: 6999 - DNA, 28 bp, synthetic construct
  source 1..28: mol_type = other DNA
gatgtttcccaaactcactaaggccggg

SEQ ID NO: 7000 - DNA, 28 bp, synthetic construct
  source 1..28: mol_type = other DNA
ggatgtttcccaaactcactaaggccgg

SEQ ID NO: 7001 - DNA, 28 bp, synthetic construct
  source 1..28: mol_type = other DNA
ggagggatgtttcccaaactcactaagg

SEQ ID NO: 7002 - DNA, 28 bp, synthetic construct
  source 1..28: mol_type = other DNA
gggaaacatccctccagttcaaccttgg

SEQ ID NO: 7003 - DNA, 28 bp, synthetic construct
  source 1..28: mol_type = other DNA
gggaaggtgccaaggttgaactggaggg

SEQ ID NO: 7004 - DNA, 28 bp, synthetic construct
  source 1..28: mol_type = other DNA
agggaaggtgccaaggttgaactggagg

SEQ ID NO: 7005 - DNA, 28 bp, synthetic construct
  source 1..28: mol_type = other DNA
ccagttcaaccttggcaccttcccttgg

SEQ ID NO: 7006 - DNA, 28 bp, synthetic construct
  source 1..28: mol_type = other DNA
aatgtgtgtccaagggaaggtgccaagg

SEQ ID NO: 7007 - DNA, 28 bp, synthetic construct
  source 1..28: mol_type = other DNA
tggcaccttcccttggacacacattagg

SEQ ID NO: 7008 - DNA, 28 bp, synthetic construct
  source 1..28: mol_type = other DNA
taatacctaatgtgtgtccaagggaagg

SEQ ID NO: 7009 - DNA, 28 bp, synthetic construct
  source 1..28: mol_type = other DNA
gaaataatacctaatgtgtgtccaaggg

SEQ ID NO: 7010 - DNA, 28 bp, synthetic construct
  source 1..28: mol_type = other DNA
agaaataatacctaatgtgtgtccaagg

SEQ ID NO: 7011 - DNA, 28 bp, synthetic construct
  source 1..28: mol_type = other DNA
taggtattatttctccttcagctgaagg

SEQ ID NO: 7012 - DNA, 28 bp, synthetic construct
  source 1..28: mol_type = other DNA
caatagctacaaagccttcagctgaagg

SEQ ID NO: 7013 - DNA, 28 bp, synthetic construct
  source 1..28: mol_type = other DNA
agctgaaggctttgtagctattgaaagg

SEQ ID NO: 7014 - DNA, 28 bp, synthetic construct
  source 1..28: mol_type = other DNA
aaggctttgtagctattgaaaggcaagg

SEQ ID NO: 7015 - DNA, 28 bp, synthetic construct
  source 1..28: mol_type = other DNA
aggcatctcttgatgtgagccttgaagg

SEQ ID NO: 7016 - DNA, 28 bp, synthetic construct
  source 1..28: mol_type = other DNA
tctcttgatgtgagccttgaaggacagg

SEQ ID NO: 7017 - DNA, 28 bp, synthetic construct
  source 1..28: mol_type = other DNA
gtgagccttgaaggacaggttgctttgg

SEQ ID NO: 7018 - DNA, 28 bp, synthetic construct
  source 1..28: mol_type = other DNA
tgagccttgaaggacaggttgctttggg

SEQ ID NO: 7019 - DNA, 28 bp, synthetic construct
  source 1..28: mol_type = other DNA
ccttgaaggacaggttgctttgggtagg

SEQ ID NO: 7020 - DNA, 28 bp, synthetic construct
  source 1..28: mol_type = other DNA
ttgctttgggtaggcagagagaagctgg

SEQ ID NO: 7021 - DNA, 28 bp, synthetic construct
  source 1..28: mol_type = other DNA
ttgggtaggcagagagaagctggtaagg

SEQ ID NO: 7022 - DNA, 28 bp, synthetic construct
  source 1..28: mol_type = other DNA
aagctggtaaggcgtatattgtctaagg

SEQ ID NO: 7023 - DNA, 28 bp, synthetic construct
  source 1..28: mol_type = other DNA
agctggtaaggcgtatattgtctaaggg

SEQ ID NO: 7024 - DNA, 28 bp, synthetic construct
  source 1..28: mol_type = other DNA
gtaaggcgtatattgtctaagggtctgg

SEQ ID NO: 7025 - DNA, 28 bp, synthetic construct
  source 1..28: mol_type = other DNA
aggcgtatattgtctaagggtctggagg

SEQ ID NO: 7026 - DNA, 28 bp, synthetic construct
  source 1..28: mol_type = other DNA
cgtatattgtctaagggtctggaggtgg

SEQ ID NO: 7027 - DNA, 28 bp, synthetic construct
  source 1..28: mol_type = other DNA
gtatattgtctaagggtctggaggtggg

SEQ ID NO: 7028 - DNA, 28 bp, synthetic construct
  source 1..28: mol_type = other DNA
tatattgtctaagggtctggaggtgggg

SEQ ID NO: 7029 - DNA, 28 bp, synthetic construct
  source 1..28: mol_type = other DNA
tctaagggtctggaggtggggtataagg

SEQ ID NO: 7030 - DNA, 28 bp, synthetic construct
  source 1..28: mol_type = other DNA
ctaagggtctggaggtggggtataaggg

SEQ ID NO: 7031 - DNA, 28 bp, synthetic construct
  source 1..28: mol_type = other DNA
taagggtctggaggtggggtataagggg

SEQ ID NO: 7032 - DNA, 28 bp, synthetic construct
  source 1..28: mol_type = other DNA
ataaggggtatacaagtcatagagttgg

SEQ ID NO: 7033 - DNA, 28 bp, synthetic construct
  source 1..28: mol_type = other DNA
taaggggtatacaagtcatagagttggg

SEQ ID NO: 7034 - DNA, 28 bp, synthetic construct
  source 1..28: mol_type = other DNA
aaggggtatacaagtcatagagttgggg

SEQ ID NO: 7035 - DNA, 28 bp, synthetic construct
  source 1..28: mol_type = other DNA
gtatacaagtcatagagttggggatagg

SEQ ID NO: 7036 - DNA, 28 bp, synthetic construct
  source 1..28: mol_type = other DNA
agttggggataggcagaacccagagagg

SEQ ID NO: 7037 - DNA, 28 bp, synthetic construct
  source 1..28: mol_type = other DNA
gttggggataggcagaacccagagaggg

SEQ ID NO: 7038 - DNA, 28 bp, synthetic construct
  source 1..28: mol_type = other DNA
ttggggataggcagaacccagagagggg

SEQ ID NO: 7039 - DNA, 28 bp, synthetic construct
  source 1..28: mol_type = other DNA
gcagaacccagagaggggagaaaactgg

SEQ ID NO: 7040 - DNA, 28 bp, synthetic construct
  source 1..28: mol_type = other DNA
ctcaggccagttttctcccctctctggg

SEQ ID NO: 7041 - DNA, 28 bp, synthetic construct
  source 1..28: mol_type = other DNA
tctcaggccagttttctcccctctctgg

SEQ ID NO: 7042 - DNA, 28 bp, synthetic construct
  source 1..28: mol_type = other DNA
ctggcctgagatagaagaccttgcaagg

SEQ ID NO: 7043 - DNA, 28 bp, synthetic construct
  source 1..28: mol_type = other DNA
tggcctgagatagaagaccttgcaaggg

SEQ ID NO: 7044 - DNA, 28 bp, synthetic construct
  source 1..28: mol_type = other DNA
tctcccttgcaaggtcttctatctcagg

SEQ ID NO: 7045 - DNA, 28 bp, synthetic construct
  source 1..28: mol_type = other DNA
gagatagaagaccttgcaagggagaagg

SEQ ID NO: 7046 - DNA, 28 bp, synthetic construct
  source 1..28: mol_type = other DNA
atagaagaccttgcaagggagaaggagg

SEQ ID NO: 7047 - DNA, 28 bp, synthetic construct
  source 1..28: mol_type = other DNA
tagaagaccttgcaagggagaaggaggg

SEQ ID NO: 7048 - DNA, 28 bp, synthetic construct
  source 1..28: mol_type = other DNA
agaccttgcaagggagaaggagggtagg

SEQ ID NO: 7049 - DNA, 28 bp, synthetic construct
  source 1..28: mol_type = other DNA
gctcctaccctccttctcccttgcaagg

SEQ ID NO: 7050 - DNA, 28 bp, synthetic construct
  source 1..28: mol_type = other DNA
gcaagggagaaggagggtaggagcctgg

SEQ ID NO: 7051 - DNA, 28 bp, synthetic construct
  source 1..28: mol_type = other DNA
gggagaaggagggtaggagcctggatgg

SEQ ID NO: 7052 - DNA, 28 bp, synthetic construct
  source 1..28: mol_type = other DNA
gagcctggatggtgtgaaatgctagagg

SEQ ID NO: 7053 - DNA, 28 bp, synthetic construct
  source 1..28: mol_type = other DNA
gcacctctagcatttcacaccatccagg

SEQ ID NO: 7054 - DNA, 28 bp, synthetic construct
  source 1..28: mol_type = other DNA
gatggtgtgaaatgctagaggtgcatgg

SEQ ID NO: 7055 - DNA, 28 bp, synthetic construct
  source 1..28: mol_type = other DNA
gtgtgaaatgctagaggtgcatggctgg

SEQ ID NO: 7056 - DNA, 28 bp, synthetic construct
  source 1..28: mol_type = other DNA
aaatgctagaggtgcatggctggaatgg

SEQ ID NO: 7057 - DNA, 28 bp, synthetic construct
  source 1..28: mol_type = other DNA
tgctagaggtgcatggctggaatggagg

SEQ ID NO: 7058 - DNA, 28 bp, synthetic construct
  source 1..28: mol_type = other DNA
gctagaggtgcatggctggaatggaggg

SEQ ID NO: 7059 - DNA, 28 bp, synthetic construct
  source 1..28: mol_type = other DNA
ctagaggtgcatggctggaatggagggg

SEQ ID NO: 7060 - DNA, 28 bp, synthetic construct
  source 1..28: mol_type = other DNA
tagaggtgcatggctggaatggaggggg

SEQ ID NO: 7061 - DNA, 28 bp, synthetic construct
  source 1..28: mol_type = other DNA
aggtgcatggctggaatggagggggtgg

SEQ ID NO: 7062 - DNA, 28 bp, synthetic construct
  source 1..28: mol_type = other DNA
ggtgcatggctggaatggagggggtggg

SEQ ID NO: 7063 - DNA, 28 bp, synthetic construct
  source 1..28: mol_type = other DNA
gtgcatggctggaatggagggggtgggg

SEQ ID NO: 7064 - DNA, 28 bp, synthetic construct
  source 1..28: mol_type = other DNA
gctggaatggagggggtggggcaccagg

SEQ ID NO: 7065 - DNA, 28 bp, synthetic construct
  source 1..28: mol_type = other DNA
tggggcaccaggcttcagatgcttctgg

SEQ ID NO: 7066 - DNA, 28 bp, synthetic construct
  source 1..28: mol_type = other DNA
ggggcaccaggcttcagatgcttctggg

SEQ ID NO: 7067 - DNA, 28 bp, synthetic construct
  source 1..28: mol_type = other DNA
tctgcacccagaagcatctgaagcctgg

SEQ ID NO: 7068 - DNA, 28 bp, synthetic construct
  source 1..28: mol_type = other DNA
cttctgggtgcagatgcagattttcagg

SEQ ID NO: 7069 - DNA, 28 bp, synthetic construct
  source 1..28: mol_type = other DNA
atgcagattttcaggatgtacaacatgg

SEQ ID NO: 7070 - DNA, 28 bp, synthetic construct
  source 1..28: mol_type = other DNA
ggatgtacaacatggagcatccccaagg

SEQ ID NO: 7071 - DNA, 28 bp, synthetic construct
  source 1..28: mol_type = other DNA
gcaggctctcaacacagttgccttgggg

SEQ ID NO: 7072 - DNA, 28 bp, synthetic construct
  source 1..28: mol_type = other DNA
cgcaggctctcaacacagttgccttggg

SEQ ID NO: 7073 - DNA, 28 bp, synthetic construct
  source 1..28: mol_type = other DNA
tcgcaggctctcaacacagttgccttgg

SEQ ID NO: 7074 - DNA, 28 bp, synthetic construct
  source 1..28: mol_type = other DNA
aaggcaactgtgttgagagcctgcgagg

SEQ ID NO: 7075 - DNA, 28 bp, synthetic construct
  source 1..28: mol_type = other DNA
caactgtgttgagagcctgcgaggcagg

SEQ ID NO: 7076 - DNA, 28 bp, synthetic construct
  source 1..28: mol_type = other DNA
tgagagcctgcgaggcaggtgaatgtgg

SEQ ID NO: 7077 - DNA, 28 bp, synthetic construct
  source 1..28: mol_type = other DNA
gaagatccacattcacctgcctcgcagg

SEQ ID NO: 7078 - DNA, 28 bp, synthetic construct
  source 1..28: mol_type = other DNA
ccccctctcctgactgagttcaccaagg

SEQ ID NO: 7079 - DNA, 28 bp, synthetic construct
  source 1..28: mol_type = other DNA
tccttggtgaactcagtcaggagagggg

SEQ ID NO: 7080 - DNA, 28 bp, synthetic construct
  source 1..28: mol_type = other DNA
ttccttggtgaactcagtcaggagaggg

SEQ ID NO: 7081 - DNA, 28 bp, synthetic construct
  source 1..28: mol_type = other DNA
gttccttggtgaactcagtcaggagagg

SEQ ID NO: 7082 - DNA, 28 bp, synthetic construct
  source 1..28: mol_type = other DNA
agcttgttccttggtgaactcagtcagg

SEQ ID NO: 7083 - DNA, 28 bp, synthetic construct
  source 1..28: mol_type = other DNA
caaatagtttacaaagcttgttccttgg

SEQ ID NO: 7084 - DNA, 28 bp, synthetic construct
  source 1..28: mol_type = other DNA
aggaacaagctttgtaaactatttgagg

SEQ ID NO: 7085 - DNA, 28 bp, synthetic construct
  source 1..28: mol_type = other DNA
ggaacaagctttgtaaactatttgaggg

SEQ ID NO: 7086 - DNA, 28 bp, synthetic construct
  source 1..28: mol_type = other DNA
caagctttgtaaactatttgagggtagg

SEQ ID NO: 7087 - DNA, 28 bp, synthetic construct
  source 1..28: mol_type = other DNA
aagctttgtaaactatttgagggtaggg

SEQ ID NO: 7088 - DNA, 28 bp, synthetic construct
  source 1..28: mol_type = other DNA
agctttgtaaactatttgagggtagggg

SEQ ID NO: 7089 - DNA, 28 bp, synthetic construct
  source 1..28: mol_type = other DNA
tatttactctcatatcctcagagcctgg

SEQ ID NO: 7090 - DNA, 28 bp, synthetic construct
  source 1..28: mol_type = other DNA
ctcatatcctcagagcctggtgttgagg

SEQ ID NO: 7091 - DNA, 28 bp, synthetic construct
  source 1..28: mol_type = other DNA
tatcctcagagcctggtgttgaggttgg

SEQ ID NO: 7092 - DNA, 28 bp, synthetic construct
  source 1..28: mol_type = other DNA
gcaccaacctcaacaccaggctctgagg

SEQ ID NO: 7093 - DNA, 28 bp, synthetic construct
  source 1..28: mol_type = other DNA
cctggtgttgaggttggtgctttgtagg

SEQ ID NO: 7094 - DNA, 28 bp, synthetic construct
  source 1..28: mol_type = other DNA
tgaggttggtgctttgtaggcacccagg

SEQ ID NO: 7095 - DNA, 28 bp, synthetic construct
  source 1..28: mol_type = other DNA
gaggttggtgctttgtaggcacccaggg

SEQ ID NO: 7096 - DNA, 28 bp, synthetic construct
  source 1..28: mol_type = other DNA
cacccagggactttcaaatgaatgaagg

SEQ ID NO: 7097 - DNA, 28 bp, synthetic construct
  source 1..28: mol_type = other DNA
acccagggactttcaaatgaatgaaggg

SEQ ID NO: 7098 - DNA, 28 bp, synthetic construct
  source 1..28: mol_type = other DNA
tcccttcattcatttgaaagtccctggg

SEQ ID NO: 7099 - DNA, 28 bp, synthetic construct
  source 1..28: mol_type = other DNA
ctcccttcattcatttgaaagtccctgg

SEQ ID NO: 7100 - DNA, 28 bp, synthetic construct
  source 1..28: mol_type = other DNA
cagggactttcaaatgaatgaagggagg

SEQ ID NO: 7101 - DNA, 28 bp, synthetic construct
  source 1..28: mol_type = other DNA
agggactttcaaatgaatgaagggaggg

SEQ ID NO: 7102 - DNA, 28 bp, synthetic construct
  source 1..28: mol_type = other DNA
gactttcaaatgaatgaagggagggagg

SEQ ID NO: 7103 - DNA, 28 bp, synthetic construct
  source 1..28: mol_type = other DNA
actttcaaatgaatgaagggagggaggg

SEQ ID NO: 7104 - DNA, 28 bp, synthetic construct
  source 1..28: mol_type = other DNA
ttcaaatgaatgaagggagggagggagg

SEQ ID NO: 7105 - DNA, 28 bp, synthetic construct
  source 1..28: mol_type = other DNA
aatgaagggagggagggaggaaagaagg

SEQ ID NO: 7106 - DNA, 28 bp, synthetic construct
  source 1..28: mol_type = other DNA
aagggagggagggaggaaagaaggatgg

SEQ ID NO: 7107 - DNA, 28 bp, synthetic construct
  source 1..28: mol_type = other DNA
agggagggagggaggaaagaaggatggg

SEQ ID NO: 7108 - DNA, 28 bp, synthetic construct
  source 1..28: mol_type = other DNA
gaggaaagaaggatgggtccatagtagg

SEQ ID NO: 7109 - DNA, 28 bp, synthetic construct
  source 1..28: mol_type = other DNA
agaaggatgggtccatagtaggacctgg

SEQ ID NO: 7110 - DNA, 28 bp, synthetic construct
  source 1..28: mol_type = other DNA
atgggtccatagtaggacctggtgatgg

SEQ ID NO: 7111 - DNA, 28 bp, synthetic construct
  source 1..28: mol_type = other DNA
tgggtccatagtaggacctggtgatggg

SEQ ID NO: 7112 - DNA, 28 bp, synthetic construct
  source 1..28: mol_type = other DNA
tccatagtaggacctggtgatgggctgg

SEQ ID NO: 7113 - DNA, 28 bp, synthetic construct
  source 1..28: mol_type = other DNA
ccatagtaggacctggtgatgggctggg

SEQ ID NO: 7114 - DNA, 28 bp, synthetic construct
  source 1..28: mol_type = other DNA
gacctggtgatgggctgggagctccagg

SEQ ID NO: 7115 - DNA, 28 bp, synthetic construct
  source 1..28: mol_type = other DNA
tgcctggagctcccagcccatcaccagg

SEQ ID NO: 7116 - DNA, 28 bp, synthetic construct
  source 1..28: mol_type = other DNA
ggagagggattggttgacatttgcctgg

SEQ ID NO: 7117 - DNA, 28 bp, synthetic construct
  source 1..28: mol_type = other DNA
ggcaaatgtcaaccaatccctctcctgg

SEQ ID NO: 7118 - DNA, 28 bp, synthetic construct
  source 1..28: mol_type = other DNA
gcaaatgtcaaccaatccctctcctggg

SEQ ID NO: 7119 - DNA, 28 bp, synthetic construct
  source 1..28: mol_type = other DNA
ctgggagctgacccaggagagggattgg

SEQ ID NO: 7120 - DNA, 28 bp, synthetic construct
  source 1..28: mol_type = other DNA
caatccctctcctgggtcagctcccagg

SEQ ID NO: 7121 - DNA, 28 bp, synthetic construct
  source 1..28: mol_type = other DNA
aatccctctcctgggtcagctcccaggg

SEQ ID NO: 7122 - DNA, 28 bp, synthetic construct
  source 1..28: mol_type = other DNA
atccctctcctgggtcagctcccagggg

SEQ ID NO: 7123 - DNA, 28 bp, synthetic construct
  source 1..28: mol_type = other DNA
agcccctgggagctgacccaggagaggg

SEQ ID NO: 7124 - DNA, 28 bp, synthetic construct
  source 1..28: mol_type = other DNA
gagcccctgggagctgacccaggagagg

SEQ ID NO: 7125 - DNA, 28 bp, synthetic construct
  source 1..28: mol_type = other DNA
agggtgagcccctgggagctgacccagg

SEQ ID NO: 7126 - DNA, 28 bp, synthetic construct
  source 1..28: mol_type = other DNA
gaaatgcaaagaagggtgagcccctggg

SEQ ID NO: 7127 - DNA, 28 bp, synthetic construct
  source 1..28: mol_type = other DNA
ggaaatgcaaagaagggtgagcccctgg

SEQ ID NO: 7128 - DNA, 28 bp, synthetic construct
  source 1..28: mol_type = other DNA
tcatgagagctggaaatgcaaagaaggg

SEQ ID NO: 7129 - DNA, 28 bp, synthetic construct
  source 1..28: mol_type = other DNA
ctcatgagagctggaaatgcaaagaagg

SEQ ID NO: 7130 - DNA, 28 bp, synthetic construct
  source 1..28: mol_type = other DNA
cttctttgcatttccagctctcatgagg

SEQ ID NO: 7131 - DNA, 28 bp, synthetic construct
  source 1..28: mol_type = other DNA
ctgtgcacaatgacctcatgagagctgg

SEQ ID NO: 7132 - DNA, 28 bp, synthetic construct
  source 1..28: mol_type = other DNA
cagctctcatgaggtcattgtgcacagg

SEQ ID NO: 7133 - DNA, 28 bp, synthetic construct
  source 1..28: mol_type = other DNA
gtgcagtaggatcagaggagattagagg

SEQ ID NO: 7134 - DNA, 28 bp, synthetic construct
  source 1..28: mol_type = other DNA
gatttctctggtgcagtaggatcagagg

SEQ ID NO: 7135 - DNA, 28 bp, synthetic construct
  source 1..28: mol_type = other DNA
tctggcttgatttctctggtgcagtagg

SEQ ID NO: 7136 - DNA, 28 bp, synthetic construct
  source 1..28: mol_type = other DNA
ttattgaattctggcttgatttctctgg

SEQ ID NO: 7137 - DNA, 28 bp, synthetic construct
  source 1..28: mol_type = other DNA
tctggactgagactttattgaattctgg

SEQ ID NO: 7138 - DNA, 28 bp, synthetic construct
  source 1..28: mol_type = other DNA
tcttatttcttttgtcttgtttatctgg

SEQ ID NO: 7139 - DNA, 28 bp, synthetic construct
  source 1..28: mol_type = other DNA
agattcgagtagaagatctccttcaagg

SEQ ID NO: 7140 - DNA, 28 bp, synthetic construct
  source 1..28: mol_type = other DNA
gattcgagtagaagatctccttcaaggg

SEQ ID NO: 7141 - DNA, 28 bp, synthetic construct
  source 1..28: mol_type = other DNA
gacaaacacagcaactttcccttgaagg

SEQ ID NO: 7142 - DNA, 28 bp, synthetic construct
  source 1..28: mol_type = other DNA
tgatacatggatgggacaaaggtcttgg

SEQ ID NO: 7143 - DNA, 28 bp, synthetic construct
  source 1..28: mol_type = other DNA
gggggatgatacatggatgggacaaagg

SEQ ID NO: 7144 - DNA, 28 bp, synthetic construct
  source 1..28: mol_type = other DNA
tttacttgggggatgatacatggatggg

SEQ ID NO: 7145 - DNA, 28 bp, synthetic construct
  source 1..28: mol_type = other DNA
gtttacttgggggatgatacatggatgg

SEQ ID NO: 7146 - DNA, 28 bp, synthetic construct
  source 1..28: mol_type = other DNA
aagtgtttacttgggggatgatacatgg

SEQ ID NO: 7147 - DNA, 28 bp, synthetic construct
  source 1..28: mol_type = other DNA
aggtgaacaagaagtgtttacttggggg

SEQ ID NO: 7148 - DNA, 28 bp, synthetic construct
  source 1..28: mol_type = other DNA
caggtgaacaagaagtgtttacttgggg

SEQ ID NO: 7149 - DNA, 28 bp, synthetic construct
  source 1..28: mol_type = other DNA
acaggtgaacaagaagtgtttacttggg

SEQ ID NO: 7150 - DNA, 28 bp, synthetic construct
  source 1..28: mol_type = other DNA
aacaggtgaacaagaagtgtttacttgg

SEQ ID NO: 7151 - DNA, 28 bp, synthetic construct
  source 1..28: mol_type = other DNA
ggactgcacttgaaatctaatgaacagg

SEQ ID NO: 7152 - DNA, 28 bp, synthetic construct
  source 1..28: mol_type = other DNA
ttcattagatttcaagtgcagtccctgg

SEQ ID NO: 7153 - DNA, 28 bp, synthetic construct
  source 1..28: mol_type = other DNA
tatcattgtagggacttacaggccaggg

SEQ ID NO: 7154 - DNA, 28 bp, synthetic construct
  source 1..28: mol_type = other DNA
ttatcattgtagggacttacaggccagg

SEQ ID NO: 7155 - DNA, 28 bp, synthetic construct
  source 1..28: mol_type = other DNA
gaagcttatcattgtagggacttacagg

SEQ ID NO: 7156 - DNA, 28 bp, synthetic construct
  source 1..28: mol_type = other DNA
atgataagagaagcttatcattgtaggg

SEQ ID NO: 7157 - DNA, 28 bp, synthetic construct
  source 1..28: mol_type = other DNA
aatgataagagaagcttatcattgtagg

SEQ ID NO: 7158 - DNA, 28 bp, synthetic construct
  source 1..28: mol_type = other DNA
ctcttatcattgcacattcttcatcagg

SEQ ID NO: 7159 - DNA, 28 bp, synthetic construct
  source 1..28: mol_type = other DNA
ttatcattgcacattcttcatcaggagg

SEQ ID NO: 7160 - DNA, 28 bp, synthetic construct
  source 1..28: mol_type = other DNA
acattcttcatcaggaggatgccagagg

SEQ ID NO: 7161 - DNA, 28 bp, synthetic construct
  source 1..28: mol_type = other DNA
tgaggaactgttggctgagctcctctgg

SEQ ID NO: 7162 - DNA, 28 bp, synthetic construct
  source 1..28: mol_type = other DNA
gaatctgctactgatgaggaactgttgg

SEQ ID NO: 7163 - DNA, 28 bp, synthetic construct
  source 1..28: mol_type = other DNA
gattctgaagaatctgctactgatgagg

SEQ ID NO: 7164 - DNA, 28 bp, synthetic construct
  source 1..28: mol_type = other DNA
atcagtagcagattcttcagaatcttgg

SEQ ID NO: 7165 - DNA, 28 bp, synthetic construct
  source 1..28: mol_type = other DNA
tcagtagcagattcttcagaatcttggg

SEQ ID NO: 7166 - DNA, 28 bp, synthetic construct
  source 1..28: mol_type = other DNA
agatgcccttgagctctttgaataaagg

SEQ ID NO: 7167 - DNA, 28 bp, synthetic construct
  source 1..28: mol_type = other DNA
atcagcctttattcaaagagctcaaggg

SEQ ID NO: 7168 - DNA, 28 bp, synthetic construct
  source 1..28: mol_type = other DNA
aatcagcctttattcaaagagctcaagg

SEQ ID NO: 7169 - DNA, 28 bp, synthetic construct
  source 1..28: mol_type = other DNA
ttgtggttagaggtacactcgtctttgg

SEQ ID NO: 7170 - DNA, 28 bp, synthetic construct
  source 1..28: mol_type = other DNA
aaaaataaatgaaaattgtggttagagg

SEQ ID NO: 7171 - DNA, 28 bp, synthetic construct
  source 1..28: mol_type = other DNA
aacatttaaaaataaatgaaaattgtgg

SEQ ID NO: 7172 - DNA, 28 bp, synthetic construct
  source 1..28: mol_type = other DNA
catttatttttaaatgtttccttcatgg

SEQ ID NO: 7173 - DNA, 28 bp, synthetic construct
  source 1..28: mol_type = other DNA
aatgtttccttcatggcctttcttgtgg

SEQ ID NO: 7174 - DNA, 28 bp, synthetic construct
  source 1..28: mol_type = other DNA
gggtgagccacaagaaaggccatgaagg

SEQ ID NO: 7175 - DNA, 28 bp, synthetic construct
  source 1..28: mol_type = other DNA
aactgcatagggtgagccacaagaaagg

SEQ ID NO: 7176 - DNA, 28 bp, synthetic construct
  source 1..28: mol_type = other DNA
tgtcaacaaatacacaaactgcataggg

SEQ ID NO: 7177 - DNA, 28 bp, synthetic construct
  source 1..28: mol_type = other DNA
ttgtcaacaaatacacaaactgcatagg

SEQ ID NO: 7178 - DNA, 28 bp, synthetic construct
  source 1..28: mol_type = other DNA
ttgacaactttatgtgtttttaatatgg

SEQ ID NO: 7179 - DNA, 28 bp, synthetic construct
  source 1..28: mol_type = other DNA
tttttaatatggtttttgccaaacttgg

SEQ ID NO: 7180 - DNA, 28 bp, synthetic construct
  source 1..28: mol_type = other DNA
aagacggtctcggaaaaaccaagtttgg

SEQ ID NO: 7181 - DNA, 28 bp, synthetic construct
  source 1..28: mol_type = other DNA
tttttccgagaccgtcttttctcagagg

SEQ ID NO: 7182 - DNA, 28 bp, synthetic construct
  source 1..28: mol_type = other DNA
ctgagcctctgagaaaagacggtctcgg

SEQ ID NO: 7183 - DNA, 28 bp, synthetic construct
  source 1..28: mol_type = other DNA
gtaaaactgagcctctgagaaaagacgg

SEQ ID NO: 7184 - DNA, 28 bp, synthetic construct
  source 1..28: mol_type = other DNA
tcagttttaccgtcctatctgcagtcgg

SEQ ID NO: 7185 - DNA, 28 bp, synthetic construct
  source 1..28: mol_type = other DNA
tgaaagtagccgactgcagataggacgg

SEQ ID NO: 7186 - DNA, 28 bp, synthetic construct
  source 1..28: mol_type = other DNA
cctatctgcagtcggctactttcagtgg

SEQ ID NO: 7187 - DNA, 28 bp, synthetic construct
  source 1..28: mol_type = other DNA
aggccctctgggcagaagcatgcgctgg

SEQ ID NO: 7188 - DNA, 28 bp, synthetic construct
  source 1..28: mol_type = other DNA
acaccagcgcatgcttctgcccagaggg

SEQ ID NO: 7189 - DNA, 28 bp, synthetic construct
  source 1..28: mol_type = other DNA
gacaccagcgcatgcttctgcccagagg

SEQ ID NO: 7190 - DNA, 28 bp, synthetic construct
  source 1..28: mol_type = other DNA
catgcgctggtgtctcctcctgatctgg

SEQ ID NO: 7191 - DNA, 28 bp, synthetic construct
  source 1..28: mol_type = other DNA
atgcgctggtgtctcctcctgatctggg

SEQ ID NO: 7192 - DNA, 28 bp, synthetic construct
  source 1..28: mol_type = other DNA
tggtgtctcctcctgatctgggcccagg

SEQ ID NO: 7193 - DNA, 28 bp, synthetic construct
  source 1..28: mol_type = other DNA
ggtgtctcctcctgatctgggcccaggg

SEQ ID NO: 7194 - DNA, 28 bp, synthetic construct
  source 1..28: mol_type = other DNA
gtgtctcctcctgatctgggcccagggg

SEQ ID NO: 7195 - DNA, 28 bp, synthetic construct
  source 1..28: mol_type = other DNA
cctcctgatctgggcccaggggctgagg

SEQ ID NO: 7196 - DNA, 28 bp, synthetic construct
  source 1..28: mol_type = other DNA
ctgcctcagcccctgggcccagatcagg

SEQ ID NO: 7197 - DNA, 28 bp, synthetic construct
  source 1..28: mol_type = other DNA
ctgatctgggcccaggggctgaggcagg

SEQ ID NO: 7198 - DNA, 28 bp, synthetic construct
  source 1..28: mol_type = other DNA
gcgaggggagcctgcctcagcccctggg

SEQ ID NO: 7199 - DNA, 28 bp, synthetic construct
  source 1..28: mol_type = other DNA
ggcgaggggagcctgcctcagcccctgg

SEQ ID NO: 7200 - DNA, 28 bp, synthetic construct
  source 1..28: mol_type = other DNA
ggctgaggcaggctcccctcgcctcagg

SEQ ID NO: 7201 - DNA, 28 bp, synthetic construct
  source 1..28: mol_type = other DNA
aggcaggctcccctcgcctcaggtaagg

SEQ ID NO: 7202 - DNA, 28 bp, synthetic construct
  source 1..28: mol_type = other DNA
ggtttcaggccttacctgaggcgagggg

SEQ ID NO: 7203 - DNA, 28 bp, synthetic construct
  source 1..28: mol_type = other DNA
gggtttcaggccttacctgaggcgaggg

SEQ ID NO: 7204 - DNA, 28 bp, synthetic construct
  source 1..28: mol_type = other DNA
tgggtttcaggccttacctgaggcgagg

SEQ ID NO: 7205 - DNA, 28 bp, synthetic construct
  source 1..28: mol_type = other DNA
tctgctgggtttcaggccttacctgagg

SEQ ID NO: 7206 - DNA, 28 bp, synthetic construct
  source 1..28: mol_type = other DNA
tcacatgtgcttcgtcctcttccctagg

SEQ ID NO: 7207 - DNA, 28 bp, synthetic construct
  source 1..28: mol_type = other DNA
cgtcctcttccctaggaatgatgacagg

SEQ ID NO: 7208 - DNA, 28 bp, synthetic construct
  source 1..28: mol_type = other DNA
gtgcctgtcatcattcctagggaagagg

SEQ ID NO: 7209 - DNA, 28 bp, synthetic construct
  source 1..28: mol_type = other DNA
tctattgtgcctgtcatcattcctaggg

SEQ ID NO: 7210 - DNA, 28 bp, synthetic construct
  source 1..28: mol_type = other DNA
ttctattgtgcctgtcatcattcctagg

SEQ ID NO: 7211 - DNA, 28 bp, synthetic construct
  source 1..28: mol_type = other DNA
atgatgacaggcacaatagaaacaacgg

SEQ ID NO: 7212 - DNA, 28 bp, synthetic construct
  source 1..28: mol_type = other DNA
tgatgacaggcacaatagaaacaacggg

SEQ ID NO: 7213 - DNA, 28 bp, synthetic construct
  source 1..28: mol_type = other DNA
gatgacaggcacaatagaaacaacgggg

SEQ ID NO: 7214 - DNA, 28 bp, synthetic construct
  source 1..28: mol_type = other DNA
gtcagcattacaaatggccagaagctgg

SEQ ID NO: 7215 - DNA, 28 bp, synthetic construct
  source 1..28: mol_type = other DNA
cttctggccatttgtaatgctgacttgg

SEQ ID NO: 7216 - DNA, 28 bp, synthetic construct
  source 1..28: mol_type = other DNA
ttctggccatttgtaatgctgacttggg

SEQ ID NO: 7217 - DNA, 28 bp, synthetic construct
  source 1..28: mol_type = other DNA
tctggccatttgtaatgctgacttgggg

SEQ ID NO: 7218 - DNA, 28 bp, synthetic construct
  source 1..28: mol_type = other DNA
ggccatttgtaatgctgacttggggtgg

SEQ ID NO: 7219 - DNA, 28 bp, synthetic construct
  source 1..28: mol_type = other DNA
tgccaccccaagtcagcattacaaatgg

SEQ ID NO: 7220 - DNA, 28 bp, synthetic construct
  source 1..28: mol_type = other DNA
tcttcctggaggtcctagaaagctcagg

SEQ ID NO: 7221 - DNA, 28 bp, synthetic construct
  source 1..28: mol_type = other DNA
aatacctgagctttctaggacctccagg

SEQ ID NO: 7222 - DNA, 28 bp, synthetic construct
  source 1..28: mol_type = other DNA
tcctagaaagctcaggtattcctgctgg

SEQ ID NO: 7223 - DNA, 28 bp, synthetic construct
  source 1..28: mol_type = other DNA
tccagcaggaatacctgagctttctagg

SEQ ID NO: 7224 - DNA, 28 bp, synthetic construct
  source 1..28: mol_type = other DNA
ctcaggtattcctgctggagcaagttgg

SEQ ID NO: 7225 - DNA, 28 bp, synthetic construct
  source 1..28: mol_type = other DNA
aggtattcctgctggagcaagttggtgg

SEQ ID NO: 7226 - DNA, 28 bp, synthetic construct
  source 1..28: mol_type = other DNA
ggtttatccaccaacttgctccagcagg

SEQ ID NO: 7227 - DNA, 28 bp, synthetic construct
  source 1..28: mol_type = other DNA
attgcattttctatgctagagggagagg

SEQ ID NO: 7228 - DNA, 28 bp, synthetic construct
  source 1..28: mol_type = other DNA
tcaggattgcattttctatgctagaggg

SEQ ID NO: 7229 - DNA, 28 bp, synthetic construct
  source 1..28: mol_type = other DNA
ttcaggattgcattttctatgctagagg

SEQ ID NO: 7230 - DNA, 28 bp, synthetic construct
  source 1..28: mol_type = other DNA
atgcaatcctgaaacactgcacagcagg

SEQ ID NO: 7231 - DNA, 28 bp, synthetic construct
  source 1..28: mol_type = other DNA
tgcaatcctgaaacactgcacagcaggg

SEQ ID NO: 7232 - DNA, 28 bp, synthetic construct
  source 1..28: mol_type = other DNA
gagaagccctgctgtgcagtgtttcagg

SEQ ID NO: 7233 - DNA, 28 bp, synthetic construct
  source 1..28: mol_type = other DNA
cactgcacagcagggcttctcaattcgg

SEQ ID NO: 7234 - DNA, 28 bp, synthetic construct
  source 1..28: mol_type = other DNA
actgcacagcagggcttctcaattcggg

SEQ ID NO: 7235 - DNA, 28 bp, synthetic construct
  source 1..28: mol_type = other DNA
ttcgggatcacatttgaatcacctgagg

SEQ ID NO: 7236 - DNA, 28 bp, synthetic construct
  source 1..28: mol_type = other DNA
catcagtatgatttaaaatctcctcagg

SEQ ID NO: 7237 - DNA, 28 bp, synthetic construct
  source 1..28: mol_type = other DNA
gagattttaaatcatactgatgccgagg

SEQ ID NO: 7238 - DNA, 28 bp, synthetic construct
  source 1..28: mol_type = other DNA
gattgaattggtctgggtgaggcctcgg

SEQ ID NO: 7239 - DNA, 28 bp, synthetic construct
  source 1..28: mol_type = other DNA
gattctgattgaattggtctgggtgagg

SEQ ID NO: 7240 - DNA, 28 bp, synthetic construct
  source 1..28: mol_type = other DNA
ttagggattctgattgaattggtctggg

SEQ ID NO: 7241 - DNA, 28 bp, synthetic construct
  source 1..28: mol_type = other DNA
attagggattctgattgaattggtctgg

SEQ ID NO: 7242 - DNA, 28 bp, synthetic construct
  source 1..28: mol_type = other DNA
ctgctattagggattctgattgaattgg

SEQ ID NO: 7243 - DNA, 28 bp, synthetic construct
  source 1..28: mol_type = other DNA
gaatccctaatagcagagctaaacaagg

SEQ ID NO: 7244 - DNA, 28 bp, synthetic construct
  source 1..28: mol_type = other DNA
aatccctaatagcagagctaaacaaggg

SEQ ID NO: 7245 - DNA, 28 bp, synthetic construct
  source 1..28: mol_type = other DNA
ttacccttgtttagctctgctattaggg

SEQ ID NO: 7246 - DNA, 28 bp, synthetic construct
  source 1..28: mol_type = other DNA
cttacccttgtttagctctgctattagg

SEQ ID NO: 7247 - DNA, 28 bp, synthetic construct
  source 1..28: mol_type = other DNA
ctaatagcagagctaaacaagggtaagg

SEQ ID NO: 7248 - DNA, 28 bp, synthetic construct
  source 1..28: mol_type = other DNA
aagggtaaggtctaaaagcatttccagg

SEQ ID NO: 7249 - DNA, 28 bp, synthetic construct
  source 1..28: mol_type = other DNA
taaaagcatttccaggtgattctaatgg

SEQ ID NO: 7250 - DNA, 28 bp, synthetic construct
  source 1..28: mol_type = other DNA
aaaagcatttccaggtgattctaatggg

SEQ ID NO: 7251 - DNA, 28 bp, synthetic construct
  source 1..28: mol_type = other DNA
gtattggctgcccattagaatcacctgg

SEQ ID NO: 7252 - DNA, 28 bp, synthetic construct
  source 1..28: mol_type = other DNA
acataagaacagtggttctcagtattgg

SEQ ID NO: 7253 - DNA, 28 bp, synthetic construct
  source 1..28: mol_type = other DNA
agatgtgcttcttacataagaacagtgg

SEQ ID NO: 7254 - DNA, 28 bp, synthetic construct
  source 1..28: mol_type = other DNA
gaagcacatcttacctatatttcctagg

SEQ ID NO: 7255 - DNA, 28 bp, synthetic construct
  source 1..28: mol_type = other DNA
atcaactggtcttcctaggaaatatagg

SEQ ID NO: 7256 - DNA, 28 bp, synthetic construct
  source 1..28: mol_type = other DNA
tatttcctaggaagaccagttgatgagg

SEQ ID NO: 7257 - DNA, 28 bp, synthetic construct
  source 1..28: mol_type = other DNA
tatgacctcatcaactggtcttcctagg

SEQ ID NO: 7258 - DNA, 28 bp, synthetic construct
  source 1..28: mol_type = other DNA
aacttttgcatatgacctcatcaactgg

SEQ ID NO: 7259 - DNA, 28 bp, synthetic construct
  source 1..28: mol_type = other DNA
gtcatatgcaaaagttcccatttattgg

SEQ ID NO: 7260 - DNA, 28 bp, synthetic construct
  source 1..28: mol_type = other DNA
gcacaattatactaaaccaataaatggg

SEQ ID NO: 7261 - DNA, 28 bp, synthetic construct
  source 1..28: mol_type = other DNA
tgcacaattatactaaaccaataaatgg

SEQ ID NO: 7262 - DNA, 28 bp, synthetic construct
  source 1..28: mol_type = other DNA
cccctaagtgtataaagagtagagctgg

SEQ ID NO: 7263 - DNA, 28 bp, synthetic construct
  source 1..28: mol_type = other DNA
accagctctactctttatacacttaggg

SEQ ID NO: 7264 - DNA, 28 bp, synthetic construct
  source 1..28: mol_type = other DNA
aaccagctctactctttatacacttagg

SEQ ID NO: 7265 - DNA, 28 bp, synthetic construct
  source 1..28: mol_type = other DNA
attactgtacaattaaacttagcacagg

SEQ ID NO: 7266 - DNA, 28 bp, synthetic construct
  source 1..28: mol_type = other DNA
aattgtacagtaatttacatttgtgtgg

SEQ ID NO: 7267 - DNA, 28 bp, synthetic construct
  source 1..28: mol_type = other DNA
caaatatgagggcatttgggaaacttgg

SEQ ID NO: 7268 - DNA, 28 bp, synthetic construct
  source 1..28: mol_type = other DNA
gtggataacaaatatgagggcatttggg

SEQ ID NO: 7269 - DNA, 28 bp, synthetic construct
  source 1..28: mol_type = other DNA
ggtggataacaaatatgagggcatttgg

SEQ ID NO: 7270 - DNA, 28 bp, synthetic construct
  source 1..28: mol_type = other DNA
atgtacaggtggataacaaatatgaggg

SEQ ID NO: 7271 - DNA, 28 bp, synthetic construct
  source 1..28: mol_type = other DNA
aatgtacaggtggataacaaatatgagg

SEQ ID NO: 7272 - DNA, 28 bp, synthetic construct
  source 1..28: mol_type = other DNA
ctgggaattggtttaaatgtacaggtgg

SEQ ID NO: 7273 - DNA, 28 bp, synthetic construct
  source 1..28: mol_type = other DNA
cctgtacatttaaaccaattcccagagg

SEQ ID NO: 7274 - DNA, 28 bp, synthetic construct
  source 1..28: mol_type = other DNA
taaaccaattcccagaggttagaaaagg

SEQ ID NO: 7275 - DNA, 28 bp, synthetic construct
  source 1..28: mol_type = other DNA
gaatccttttctaacctctgggaattgg

SEQ ID NO: 7276 - DNA, 28 bp, synthetic construct
  source 1..28: mol_type = other DNA
agataagaatccttttctaacctctggg

SEQ ID NO: 7277 - DNA, 28 bp, synthetic construct
  source 1..28: mol_type = other DNA
aagataagaatccttttctaacctctgg

SEQ ID NO: 7278 - DNA, 28 bp, synthetic construct
  source 1..28: mol_type = other DNA
ttatctgagagacagtatagcaccatgg

SEQ ID NO: 7279 - DNA, 28 bp, synthetic construct
  source 1..28: mol_type = other DNA
gtgtcagagtctgagcttttaaccatgg

SEQ ID NO: 7280 - DNA, 28 bp, synthetic construct
  source 1..28: mol_type = other DNA
gctcagactctgacaccagacagtctgg

SEQ ID NO: 7281 - DNA, 28 bp, synthetic construct
  source 1..28: mol_type = other DNA
ctcagactctgacaccagacagtctggg

SEQ ID NO: 7282 - DNA, 28 bp, synthetic construct
  source 1..28: mol_type = other DNA
caccagacagtctgggtgcaaatcctgg

SEQ ID NO: 7283 - DNA, 28 bp, synthetic construct
  source 1..28: mol_type = other DNA
agccaggatttgcacccagactgtctgg

SEQ ID NO: 7284 - DNA, 28 bp, synthetic construct
  source 1..28: mol_type = other DNA
cctggctctgctgttgccctcagacagg

SEQ ID NO: 7285 - DNA, 28 bp, synthetic construct
  source 1..28: mol_type = other DNA
agagaagctaagaaatcctgtctgaggg

SEQ ID NO: 7286 - DNA, 28 bp, synthetic construct
  source 1..28: mol_type = other DNA
cagagaagctaagaaatcctgtctgagg

SEQ ID NO: 7287 - DNA, 28 bp, synthetic construct
  source 1..28: mol_type = other DNA
gtgtatcagttttctcatctgtgaaagg

SEQ ID NO: 7288 - DNA, 28 bp, synthetic construct
  source 1..28: mol_type = other DNA
tatcagttttctcatctgtgaaaggagg

SEQ ID NO: 7289 - DNA, 28 bp, synthetic construct
  source 1..28: mol_type = other DNA
ataagaccttatgcgatgctaatgtagg

SEQ ID NO: 7290 - DNA, 28 bp, synthetic construct
  source 1..28: mol_type = other DNA
tttaatcctacattagcatcgcataagg

SEQ ID NO: 7291 - DNA, 28 bp, synthetic construct
  source 1..28: mol_type = other DNA
gattaaattccctactacaagaaaatgg

SEQ ID NO: 7292 - DNA, 28 bp, synthetic construct
  source 1..28: mol_type = other DNA
gttctaagaccattttcttgtagtaggg

SEQ ID NO: 7293 - DNA, 28 bp, synthetic construct
  source 1..28: mol_type = other DNA
tgttctaagaccattttcttgtagtagg

SEQ ID NO: 7294 - DNA, 28 bp, synthetic construct
  source 1..28: mol_type = other DNA
aagaaaatggtcttagaacaatgcctgg

SEQ ID NO: 7295 - DNA, 28 bp, synthetic construct
  source 1..28: mol_type = other DNA
tggtcttagaacaatgcctggaacatgg

SEQ ID NO: 7296 - DNA, 28 bp, synthetic construct
  source 1..28: mol_type = other DNA
acttatacagcacttaccatgttccagg

SEQ ID NO: 7297 - DNA, 28 bp, synthetic construct
  source 1..28: mol_type = other DNA
catctctgttttgtcctccctctagtgg

SEQ ID NO: 7298 - DNA, 28 bp, synthetic construct
  source 1..28: mol_type = other DNA
gtggtcgcgttgactagaaaggtaatgg

SEQ ID NO: 7299 - DNA, 28 bp, synthetic construct
  source 1..28: mol_type = other DNA
gcgttgactagaaaggtaatggctccgg

SEQ ID NO: 7300 - DNA, 28 bp, synthetic construct
  source 1..28: mol_type = other DNA
gacctcaggagaaaatcagctggacagg

SEQ ID NO: 7301 - DNA, 28 bp, synthetic construct
  source 1..28: mol_type = other DNA
ctcctgtccagctgattttctcctgagg

SEQ ID NO: 7302 - DNA, 28 bp, synthetic construct
  source 1..28: mol_type = other DNA
ctcaggagaaaatcagctggacaggagg

SEQ ID NO: 7303 - DNA, 28 bp, synthetic construct
  source 1..28: mol_type = other DNA
gagaaaatcagctggacaggaggaatgg

SEQ ID NO: 7304 - DNA, 28 bp, synthetic construct
  source 1..28: mol_type = other DNA
ggagccccagtgctccctcacccccagg

SEQ ID NO: 7305 - DNA, 28 bp, synthetic construct
  source 1..28: mol_type = other DNA
gcttcctgggggtgagggagcactgggg

SEQ ID NO: 7306 - DNA, 28 bp, synthetic construct
  source 1..28: mol_type = other DNA
agcttcctgggggtgagggagcactggg

SEQ ID NO: 7307 - DNA, 28 bp, synthetic construct
  source 1..28: mol_type = other DNA
cagcttcctgggggtgagggagcactgg

SEQ ID NO: 7308 - DNA, 28 bp, synthetic construct
  source 1..28: mol_type = other DNA
ccctcacccccaggaagctgtgtccagg

SEQ ID NO: 7309 - DNA, 28 bp, synthetic construct
  source 1..28: mol_type = other DNA
gcctggacacagcttcctgggggtgagg

SEQ ID NO: 7310 - DNA, 28 bp, synthetic construct
  source 1..28: mol_type = other DNA
cttctgcctggacacagcttcctggggg

SEQ ID NO: 7311 - DNA, 28 bp, synthetic construct
  source 1..28: mol_type = other DNA
gcttctgcctggacacagcttcctgggg

SEQ ID NO: 7312 - DNA, 28 bp, synthetic construct
  source 1..28: mol_type = other DNA
agcttctgcctggacacagcttcctggg

SEQ ID NO: 7313 - DNA, 28 bp, synthetic construct
  source 1..28: mol_type = other DNA
cagcttctgcctggacacagcttcctgg

SEQ ID NO: 7314 - DNA, 28 bp, synthetic construct
  source 1..28: mol_type = other DNA
gtgtccaggcagaagctgcacctgctgg

SEQ ID NO: 7315 - DNA, 28 bp, synthetic construct
  source 1..28: mol_type = other DNA
tgtccaggcagaagctgcacctgctggg

SEQ ID NO: 7316 - DNA, 28 bp, synthetic construct
  source 1..28: mol_type = other DNA
gagcccagcaggtgcagcttctgcctgg

SEQ ID NO: 7317 - DNA, 28 bp, synthetic construct
  source 1..28: mol_type = other DNA
cagaagctgcacctgctgggctctgtgg

SEQ ID NO: 7318 - DNA, 28 bp, synthetic construct
  source 1..28: mol_type = other DNA
acctgctgggctctgtggagagcagcgg

SEQ ID NO: 7319 - DNA, 28 bp, synthetic construct
  source 1..28: mol_type = other DNA
cctgctgggctctgtggagagcagcggg

SEQ ID NO: 7320 - DNA, 28 bp, synthetic construct
  source 1..28: mol_type = other DNA
ctgctgggctctgtggagagcagcgggg

SEQ ID NO: 7321 - DNA, 28 bp, synthetic construct
  source 1..28: mol_type = other DNA
gggctctgtggagagcagcggggagagg

SEQ ID NO: 7322 - DNA, 28 bp, synthetic construct
  source 1..28: mol_type = other DNA
aggacattgaagtagtcatgcagctcgg

SEQ ID NO: 7323 - DNA, 28 bp, synthetic construct
  source 1..28: mol_type = other DNA
ttcaatgtcctgagttacagaagcctgg

SEQ ID NO: 7324 - DNA, 28 bp, synthetic construct
  source 1..28: mol_type = other DNA
tcaatgtcctgagttacagaagcctggg

SEQ ID NO: 7325 - DNA, 28 bp, synthetic construct
  source 1..28: mol_type = other DNA
gcagttacccaggcttctgtaactcagg

SEQ ID NO: 7326 - DNA, 28 bp, synthetic construct
  source 1..28: mol_type = other DNA
ctctgtgaagaagctgcagttacccagg

SEQ ID NO: 7327 - DNA, 28 bp, synthetic construct
  source 1..28: mol_type = other DNA
gtaactgcagcttcttcacagagactgg

SEQ ID NO: 7328 - DNA, 28 bp, synthetic construct
  source 1..28: mol_type = other DNA
ttcacagagactggttagcaaccagagg

SEQ ID NO: 7329 - DNA, 28 bp, synthetic construct
  source 1..28: mol_type = other DNA
ctggttagcaaccagaggcatcttctgg

SEQ ID NO: 7330 - DNA, 28 bp, synthetic construct
  source 1..28: mol_type = other DNA
aagtgtatcttccagaagatgcctctgg

SEQ ID NO: 7331 - DNA, 28 bp, synthetic construct
  source 1..28: mol_type = other DNA
cacacacacacacacgcagcactgatgg

SEQ ID NO: 7332 - DNA, 28 bp, synthetic construct
  source 1..28: mol_type = other DNA
atcctcttctccatcttcatttccttgg

SEQ ID NO: 7333 - DNA, 28 bp, synthetic construct
  source 1..28: mol_type = other DNA
ggccaaggaaatgaagatggagaagagg

SEQ ID NO: 7334 - DNA, 28 bp, synthetic construct
  source 1..28: mol_type = other DNA
aacgaaaaggccaaggaaatgaagatgg

SEQ ID NO: 7335 - DNA, 28 bp, synthetic construct
  source 1..28: mol_type = other DNA
aaaatggaatagaacgaaaaggccaagg

SEQ ID NO: 7336 - DNA, 28 bp, synthetic construct
  source 1..28: mol_type = other DNA
taatgcaaaatggaatagaacgaaaagg

SEQ ID NO: 7337 - DNA, 28 bp, synthetic construct
  source 1..28: mol_type = other DNA
tttcgttctattccattttgcattatgg

SEQ ID NO: 7338 - DNA, 28 bp, synthetic construct
  source 1..28: mol_type = other DNA
gttctattccattttgcattatggcagg

SEQ ID NO: 7339 - DNA, 28 bp, synthetic construct
  source 1..28: mol_type = other DNA
ttccattttgcattatggcaggcctagg

SEQ ID NO: 7340 - DNA, 28 bp, synthetic construct
  source 1..28: mol_type = other DNA
tccattttgcattatggcaggcctaggg

SEQ ID NO: 7341 - DNA, 28 bp, synthetic construct
  source 1..28: mol_type = other DNA
accctaggcctgccataatgcaaaatgg

SEQ ID NO: 7342 - DNA, 28 bp, synthetic construct
  source 1..28: mol_type = other DNA
tatggcaggcctagggtgagtaacgtgg

SEQ ID NO: 7343 - DNA, 28 bp, synthetic construct
  source 1..28: mol_type = other DNA
gatcaagatccacgttactcaccctagg

SEQ ID NO: 7344 - DNA, 28 bp, synthetic construct
  source 1..28: mol_type = other DNA
tgcaaaattaaaaaatatcttgacctgg

SEQ ID NO: 7345 - DNA, 28 bp, synthetic construct
  source 1..28: mol_type = other DNA
aaatatcttgacctggttttaaatctgg

SEQ ID NO: 7346 - DNA, 28 bp, synthetic construct
  source 1..28: mol_type = other DNA
tgctcaaactgccagatttaaaaccagg

SEQ ID NO: 7347 - DNA, 28 bp, synthetic construct
  source 1..28: mol_type = other DNA
tgaggaatgtgtctctcagagacatagg

SEQ ID NO: 7348 - DNA, 28 bp, synthetic construct
  source 1..28: mol_type = other DNA
tctctgagagacacattcctcataatgg

SEQ ID NO: 7349 - DNA, 28 bp, synthetic construct
  source 1..28: mol_type = other DNA
acattcctcataatggccagcattttgg

SEQ ID NO: 7350 - DNA, 28 bp, synthetic construct
  source 1..28: mol_type = other DNA
cattcctcataatggccagcattttggg

SEQ ID NO: 7351 - DNA, 28 bp, synthetic construct
  source 1..28: mol_type = other DNA
gtagcccaaaatgctggccattatgagg

SEQ ID NO: 7352 - DNA, 28 bp, synthetic construct
  source 1..28: mol_type = other DNA
ataatggccagcattttgggctacaagg

SEQ ID NO: 7353 - DNA, 28 bp, synthetic construct
  source 1..28: mol_type = other DNA
cacaaaaccttgtagcccaaaatgctgg

SEQ ID NO: 7354 - DNA, 28 bp, synthetic construct
  source 1..28: mol_type = other DNA
cagcattttgggctacaaggttttgtgg

SEQ ID NO: 7355 - DNA, 28 bp, synthetic construct
  source 1..28: mol_type = other DNA
ctacaaggttttgtggttgatgatgagg

SEQ ID NO: 7356 - DNA, 28 bp, synthetic construct
  source 1..28: mol_type = other DNA
aaggttttgtggttgatgatgaggatgg

SEQ ID NO: 7357 - DNA, 28 bp, synthetic construct
  source 1..28: mol_type = other DNA
atgacgtgaaaaaatgagatgaggatgg

SEQ ID NO: 7358 - DNA, 28 bp, synthetic construct
  source 1..28: mol_type = other DNA
gaaaatgacgtgaaaaaatgagatgagg

SEQ ID NO: 7359 - DNA, 28 bp, synthetic construct
  source 1..28: mol_type = other DNA
ttttcagtaactttcactcattcaaagg

SEQ ID NO: 7360 - DNA, 28 bp, synthetic construct
  source 1..28: mol_type = other DNA
cagtaactttcactcattcaaaggcagg

SEQ ID NO: 7361 - DNA, 28 bp, synthetic construct
  source 1..28: mol_type = other DNA
tcaaaggcaggttataagtaagtcctgg

SEQ ID NO: 7362 - DNA, 28 bp, synthetic construct
  source 1..28: mol_type = other DNA
aagtaagtcctggtagcagcctctatgg

SEQ ID NO: 7363 - DNA, 28 bp, synthetic construct
  source 1..28: mol_type = other DNA
agtaagtcctggtagcagcctctatggg

SEQ ID NO: 7364 - DNA, 28 bp, synthetic construct
  source 1..28: mol_type = other DNA
gtaagtcctggtagcagcctctatgggg

SEQ ID NO: 7365 - DNA, 28 bp, synthetic construct
  source 1..28: mol_type = other DNA
aaatctccccatagaggctgctaccagg

SEQ ID NO: 7366 - DNA, 28 bp, synthetic construct
  source 1..28: mol_type = other DNA
tagtcactctcaaatctccccatagagg

SEQ ID NO: 7367 - DNA, 28 bp, synthetic construct
  source 1..28: mol_type = other DNA
gggagatttgagagtgactaaatcttgg

SEQ ID NO: 7368 - DNA, 28 bp, synthetic construct
  source 1..28: mol_type = other DNA
ctgccctcaagaacttacagttaaatgg

SEQ ID NO: 7369 - DNA, 28 bp, synthetic construct
  source 1..28: mol_type = other DNA
tgccctcaagaacttacagttaaatggg

SEQ ID NO: 7370 - DNA, 28 bp, synthetic construct
  source 1..28: mol_type = other DNA
gccctcaagaacttacagttaaatgggg

SEQ ID NO: 7371 - DNA, 28 bp, synthetic construct
  source 1..28: mol_type = other DNA
tccccatttaactgtaagttcttgaggg

SEQ ID NO: 7372 - DNA, 28 bp, synthetic construct
  source 1..28: mol_type = other DNA
ctccccatttaactgtaagttcttgagg

SEQ ID NO: 7373 - DNA, 28 bp, synthetic construct
  source 1..28: mol_type = other DNA
atggggagacaatgttgtcatgaaaagg

SEQ ID NO: 7374 - DNA, 28 bp, synthetic construct
  source 1..28: mol_type = other DNA
gttgtcatgaaaaggtattatagtaagg

SEQ ID NO: 7375 - DNA, 28 bp, synthetic construct
  source 1..28: mol_type = other DNA
gaaaaggtattatagtaaggagagaagg

SEQ ID NO: 7376 - DNA, 28 bp, synthetic construct
  source 1..28: mol_type = other DNA
agtaaggagagaaggagacatacacagg

SEQ ID NO: 7377 - DNA, 28 bp, synthetic construct
  source 1..28: mol_type = other DNA
gagaaggagacatacacaggccttcagg

SEQ ID NO: 7378 - DNA, 28 bp, synthetic construct
  source 1..28: mol_type = other DNA
aggccttcaggaagagacgacagtttgg

SEQ ID NO: 7379 - DNA, 28 bp, synthetic construct
  source 1..28: mol_type = other DNA
ggccttcaggaagagacgacagtttggg

SEQ ID NO: 7380 - DNA, 28 bp, synthetic construct
  source 1..28: mol_type = other DNA
gccttcaggaagagacgacagtttgggg

SEQ ID NO: 7381 - DNA, 28 bp, synthetic construct
  source 1..28: mol_type = other DNA
accccaaactgtcgtctcttcctgaagg

SEQ ID NO: 7382 - DNA, 28 bp, synthetic construct
  source 1..28: mol_type = other DNA
caggaagagacgacagtttggggtgagg

SEQ ID NO: 7383 - DNA, 28 bp, synthetic construct
  source 1..28: mol_type = other DNA
agacgacagtttggggtgaggtagttgg

SEQ ID NO: 7384 - DNA, 28 bp, synthetic construct
  source 1..28: mol_type = other DNA
cagtttggggtgaggtagttggcatagg

SEQ ID NO: 7385 - DNA, 28 bp, synthetic construct
  source 1..28: mol_type = other DNA
tggcataggcttatctgtgatgaagtgg

SEQ ID NO: 7386 - DNA, 28 bp, synthetic construct
  source 1..28: mol_type = other DNA
taggcttatctgtgatgaagtggcctgg

SEQ ID NO: 7387 - DNA, 28 bp, synthetic construct
  source 1..28: mol_type = other DNA
aggcttatctgtgatgaagtggcctggg

SEQ ID NO: 7388 - DNA, 28 bp, synthetic construct
  source 1..28: mol_type = other DNA
gtgatgaagtggcctgggagcaccaagg

SEQ ID NO: 7389 - DNA, 28 bp, synthetic construct
  source 1..28: mol_type = other DNA
tgatgaagtggcctgggagcaccaaggg

SEQ ID NO: 7390 - DNA, 28 bp, synthetic construct
  source 1..28: mol_type = other DNA
gatgaagtggcctgggagcaccaagggg

SEQ ID NO: 7391 - DNA, 28 bp, synthetic construct
  source 1..28: mol_type = other DNA
gcctgggagcaccaaggggatgttgagg

SEQ ID NO: 7392 - DNA, 28 bp, synthetic construct
  source 1..28: mol_type = other DNA
gcctcaacatccccttggtgctcccagg

SEQ ID NO: 7393 - DNA, 28 bp, synthetic construct
  source 1..28: mol_type = other DNA
caccaaggggatgttgaggctagtctgg

SEQ ID NO: 7394 - DNA, 28 bp, synthetic construct
  source 1..28: mol_type = other DNA
accaaggggatgttgaggctagtctggg

SEQ ID NO: 7395 - DNA, 28 bp, synthetic construct
  source 1..28: mol_type = other DNA
tcccagactagcctcaacatccccttgg

SEQ ID NO: 7396 - DNA, 28 bp, synthetic construct
  source 1..28: mol_type = other DNA
aaggggatgttgaggctagtctgggagg

SEQ ID NO: 7397 - DNA, 28 bp, synthetic construct
  source 1..28: mol_type = other DNA
atgttgaggctagtctgggaggagcagg

SEQ ID NO: 7398 - DNA, 28 bp, synthetic construct
  source 1..28: mol_type = other DNA
tctgggaggagcaggagttttgtctagg

SEQ ID NO: 7399 - DNA, 28 bp, synthetic construct
  source 1..28: mol_type = other DNA
ctgggaggagcaggagttttgtctaggg

SEQ ID NO: 7400 - DNA, 28 bp, synthetic construct
  source 1..28: mol_type = other DNA
caggagttttgtctagggaacttgtagg

SEQ ID NO: 7401 - DNA, 28 bp, synthetic construct
  source 1..28: mol_type = other DNA
gtctagggaacttgtaggaaattcttgg

SEQ ID NO: 7402 - DNA, 28 bp, synthetic construct
  source 1..28: mol_type = other DNA
cttggagctgaaagtcccacaaagaagg

SEQ ID NO: 7403 - DNA, 28 bp, synthetic construct
  source 1..28: mol_type = other DNA
gctgaaagtcccacaaagaaggccctgg

SEQ ID NO: 7404 - DNA, 28 bp, synthetic construct
  source 1..28: mol_type = other DNA
tcccacaaagaaggccctggcaccaagg

SEQ ID NO: 7405 - DNA, 28 bp, synthetic construct
  source 1..28: mol_type = other DNA
cccacaaagaaggccctggcaccaaggg

SEQ ID NO: 7406 - DNA, 28 bp, synthetic construct
  source 1..28: mol_type = other DNA
tcccttggtgccagggccttctttgtgg

SEQ ID NO: 7407 - DNA, 28 bp, synthetic construct
  source 1..28: mol_type = other DNA
aagtttgctgactcccttggtgccaggg

SEQ ID NO: 7408 - DNA, 28 bp, synthetic construct
  source 1..28: mol_type = other DNA
gaagtttgctgactcccttggtgccagg

SEQ ID NO: 7409 - DNA, 28 bp, synthetic construct
  source 1..28: mol_type = other DNA
aaaatctgaagtttgctgactcccttgg

SEQ ID NO: 7410 - DNA, 28 bp, synthetic construct
  source 1..28: mol_type = other DNA
tcagcaaacttcagattttattctctgg

SEQ ID NO: 7411 - DNA, 28 bp, synthetic construct
  source 1..28: mol_type = other DNA
cagcaaacttcagattttattctctggg

SEQ ID NO: 7412 - DNA, 28 bp, synthetic construct
  source 1..28: mol_type = other DNA
aaacttcagattttattctctgggcagg

SEQ ID NO: 7413 - DNA, 28 bp, synthetic construct
  source 1..28: mol_type = other DNA
taatggatgagtatgtcacagcaaaagg

SEQ ID NO: 7414 - DNA, 28 bp, synthetic construct
  source 1..28: mol_type = other DNA
actcatccattagacagcctgatacagg

SEQ ID NO: 7415 - DNA, 28 bp, synthetic construct
  source 1..28: mol_type = other DNA
tacaggcctgtatcaggctgtctaatgg

SEQ ID NO: 7416 - DNA, 28 bp, synthetic construct
  source 1..28: mol_type = other DNA
cctgatacaggcctgtagcctcttccgg

SEQ ID NO: 7417 - DNA, 28 bp, synthetic construct
  source 1..28: mol_type = other DNA
agcacacacggccggaagaggctacagg

SEQ ID NO: 7418 - DNA, 28 bp, synthetic construct
  source 1..28: mol_type = other DNA
tgtagcctcttccggccgtgtgtgctgg

SEQ ID NO: 7419 - DNA, 28 bp, synthetic construct
  source 1..28: mol_type = other DNA
gtagcctcttccggccgtgtgtgctggg

SEQ ID NO: 7420 - DNA, 28 bp, synthetic construct
  source 1..28: mol_type = other DNA
tagcctcttccggccgtgtgtgctgggg

SEQ ID NO: 7421 - DNA, 28 bp, synthetic construct
  source 1..28: mol_type = other DNA
cttccccagcacacacggccggaagagg

SEQ ID NO: 7422 - DNA, 28 bp, synthetic construct
  source 1..28: mol_type = other DNA
ctggggcttccccagcacacacggccgg

SEQ ID NO: 7423 - DNA, 28 bp, synthetic construct
  source 1..28: mol_type = other DNA
cggccgtgtgtgctggggaagccccagg

SEQ ID NO: 7424 - DNA, 28 bp, synthetic construct
  source 1..28: mol_type = other DNA
tttcctggggcttccccagcacacacgg

SEQ ID NO: 7425 - DNA, 28 bp, synthetic construct
  source 1..28: mol_type = other DNA
ccccaggaaacgcacatgcccacacagg

SEQ ID NO: 7426 - DNA, 28 bp, synthetic construct
  source 1..28: mol_type = other DNA
cccaggaaacgcacatgcccacacaggg

SEQ ID NO: 7427 - DNA, 28 bp, synthetic construct
  source 1..28: mol_type = other DNA
tccctgtgtgggcatgtgcgtttcctgg

SEQ ID NO: 7428 - DNA, 28 bp, synthetic construct
  source 1..28: mol_type = other DNA
aatgctacgacttggctccctgtgtggg

SEQ ID NO: 7429 - DNA, 28 bp, synthetic construct
  source 1..28: mol_type = other DNA
aaatgctacgacttggctccctgtgtgg

SEQ ID NO: 7430 - DNA, 28 bp, synthetic construct
  source 1..28: mol_type = other DNA
acacagggagccaagtcgtagcatttgg

SEQ ID NO: 7431 - DNA, 28 bp, synthetic construct
  source 1..28: mol_type = other DNA
cacagggagccaagtcgtagcatttggg

SEQ ID NO: 7432 - DNA, 28 bp, synthetic construct
  source 1..28: mol_type = other DNA
agatcaaggcccaaatgctacgacttgg

SEQ ID NO: 7433 - DNA, 28 bp, synthetic construct
  source 1..28: mol_type = other DNA
gtattgatgcagaaaaggtagatcaagg

SEQ ID NO: 7434 - DNA, 28 bp, synthetic construct
  source 1..28: mol_type = other DNA
gctcaagagtgtattgatgcagaaaagg

SEQ ID NO: 7435 - DNA, 28 bp, synthetic construct
  source 1..28: mol_type = other DNA
ttagtgggaaacgttcttttttcaaagg

SEQ ID NO: 7436 - DNA, 28 bp, synthetic construct
  source 1..28: mol_type = other DNA
aacgtttcccactaaaaagaaaatgtgg

SEQ ID NO: 7437 - DNA, 28 bp, synthetic construct
  source 1..28: mol_type = other DNA
taaaaatccacattttctttttagtggg

SEQ ID NO: 7438 - DNA, 28 bp, synthetic construct
  source 1..28: mol_type = other DNA
ttaaaaatccacattttctttttagtgg

SEQ ID NO: 7439 - DNA, 28 bp, synthetic construct
  source 1..28: mol_type = other DNA
aaaagaaaatgtggatttttaaaatagg

SEQ ID NO: 7440 - DNA, 28 bp, synthetic construct
  source 1..28: mol_type = other DNA
aaagaaaatgtggatttttaaaataggg

SEQ ID NO: 7441 - DNA, 28 bp, synthetic construct
  source 1..28: mol_type = other DNA
gatttttaaaatagggactcttcctagg

SEQ ID NO: 7442 - DNA, 28 bp, synthetic construct
  source 1..28: mol_type = other DNA
atttttaaaatagggactcttcctaggg

SEQ ID NO: 7443 - DNA, 28 bp, synthetic construct
  source 1..28: mol_type = other DNA
tttttaaaatagggactcttcctagggg

SEQ ID NO: 7444 - DNA, 28 bp, synthetic construct
  source 1..28: mol_type = other DNA
aatagggactcttcctaggggaaaaagg

SEQ ID NO: 7445 - DNA, 28 bp, synthetic construct
  source 1..28: mol_type = other DNA
atagggactcttcctaggggaaaaaggg

SEQ ID NO: 7446 - DNA, 28 bp, synthetic construct
  source 1..28: mol_type = other DNA
tagggactcttcctaggggaaaaagggg

SEQ ID NO: 7447 - DNA, 28 bp, synthetic construct
  source 1..28: mol_type = other DNA
agggactcttcctaggggaaaaaggggg

SEQ ID NO: 7448 - DNA, 28 bp, synthetic construct
  source 1..28: mol_type = other DNA
gggactcttcctaggggaaaaagggggg

SEQ ID NO: 7449 - DNA, 28 bp, synthetic construct
  source 1..28: mol_type = other DNA
ctcttcctaggggaaaaaggggggctgg

SEQ ID NO: 7450 - DNA, 28 bp, synthetic construct
  source 1..28: mol_type = other DNA
tcttcctaggggaaaaaggggggctggg

SEQ ID NO: 7451 - DNA, 28 bp, synthetic construct
  source 1..28: mol_type = other DNA
cactcccagcccccctttttcccctagg

SEQ ID NO: 7452 - DNA, 28 bp, synthetic construct
  source 1..28: mol_type = other DNA
gaaaaaggggggctgggagtgatagagg

SEQ ID NO: 7453 - DNA, 28 bp, synthetic construct
  source 1..28: mol_type = other DNA
aaaaaggggggctgggagtgatagaggg

SEQ ID NO: 7454 - DNA, 28 bp, synthetic construct
  source 1..28: mol_type = other DNA
aaagggttcgaagaagttagtttgaagg

SEQ ID NO: 7455 - DNA, 28 bp, synthetic construct
  source 1..28: mol_type = other DNA
caaagtcgtcagggagtgaataaaaggg

SEQ ID NO: 7456 - DNA, 28 bp, synthetic construct
  source 1..28: mol_type = other DNA
acaaagtcgtcagggagtgaataaaagg

SEQ ID NO: 7457 - DNA, 28 bp, synthetic construct
  source 1..28: mol_type = other DNA
tattcactccctgacgactttgtgctgg

SEQ ID NO: 7458 - DNA, 28 bp, synthetic construct
  source 1..28: mol_type = other DNA
attcactccctgacgactttgtgctggg

SEQ ID NO: 7459 - DNA, 28 bp, synthetic construct
  source 1..28: mol_type = other DNA
ttcactccctgacgactttgtgctgggg

SEQ ID NO: 7460 - DNA, 28 bp, synthetic construct
  source 1..28: mol_type = other DNA
ctccctgacgactttgtgctggggttgg

SEQ ID NO: 7461 - DNA, 28 bp, synthetic construct
  source 1..28: mol_type = other DNA
tccctgacgactttgtgctggggttggg

SEQ ID NO: 7462 - DNA, 28 bp, synthetic construct
  source 1..28: mol_type = other DNA
ccctgacgactttgtgctggggttgggg

SEQ ID NO: 7463 - DNA, 28 bp, synthetic construct
  source 1..28: mol_type = other DNA
accccaaccccagcacaaagtcgtcagg

SEQ ID NO: 7464 - DNA, 28 bp, synthetic construct
  source 1..28: mol_type = other DNA
ctgaatgcaattaaacagaaataagcgg

SEQ ID NO: 7465 - DNA, 28 bp, synthetic construct
  source 1..28: mol_type = other DNA
cgcttatttctgtttaattgcattcagg

SEQ ID NO: 7466 - DNA, 28 bp, synthetic construct
  source 1..28: mol_type = other DNA
tatttctgtttaattgcattcaggctgg

SEQ ID NO: 7467 - DNA, 28 bp, synthetic construct
  source 1..28: mol_type = other DNA
tttatccttccaccatctctctcagagg

SEQ ID NO: 7468 - DNA, 28 bp, synthetic construct
  source 1..28: mol_type = other DNA
tcattcctctgagagagatggtggaagg

SEQ ID NO: 7469 - DNA, 28 bp, synthetic construct
  source 1..28: mol_type = other DNA
ccaccatctctctcagaggaatgagcgg

SEQ ID NO: 7470 - DNA, 28 bp, synthetic construct
  source 1..28: mol_type = other DNA
caccatctctctcagaggaatgagcggg

SEQ ID NO: 7471 - DNA, 28 bp, synthetic construct
  source 1..28: mol_type = other DNA
accatctctctcagaggaatgagcgggg

SEQ ID NO: 7472 - DNA, 28 bp, synthetic construct
  source 1..28: mol_type = other DNA
tccccgctcattcctctgagagagatgg

SEQ ID NO: 7473 - DNA, 28 bp, synthetic construct
  source 1..28: mol_type = other DNA
atctctctcagaggaatgagcggggagg

SEQ ID NO: 7474 - DNA, 28 bp, synthetic construct
  source 1..28: mol_type = other DNA
ctctcagaggaatgagcggggaggttgg

SEQ ID NO: 7475 - DNA, 28 bp, synthetic construct
  source 1..28: mol_type = other DNA
gaatgagcggggaggttggatttactgg

SEQ ID NO: 7476 - DNA, 28 bp, synthetic construct
  source 1..28: mol_type = other DNA
tttactggtgactgattttctttcatgg

SEQ ID NO: 7477 - DNA, 28 bp, synthetic construct
  source 1..28: mol_type = other DNA
ttactggtgactgattttctttcatggg

SEQ ID NO: 7478 - DNA, 28 bp, synthetic construct
  source 1..28: mol_type = other DNA
gtgactgattttctttcatgggccaagg

SEQ ID NO: 7479 - DNA, 28 bp, synthetic construct
  source 1..28: mol_type = other DNA
tgcttcacattctctttcagttccttgg

SEQ ID NO: 7480 - DNA, 28 bp, synthetic construct
  source 1..28: mol_type = other DNA
aggaactgaaagagaatgtgaagcaagg

SEQ ID NO: 7481 - DNA, 28 bp, synthetic construct
  source 1..28: mol_type = other DNA
gtgaagcaaggttgtgtcttgcgcatgg

SEQ ID NO: 7482 - DNA, 28 bp, synthetic construct
  source 1..28: mol_type = other DNA
ttgtcctgcttcctaagacttagactgg

SEQ ID NO: 7483 - DNA, 28 bp, synthetic construct
  source 1..28: mol_type = other DNA
tgtcctgcttcctaagacttagactggg

SEQ ID NO: 7484 - DNA, 28 bp, synthetic construct
  source 1..28: mol_type = other DNA
gtcctgcttcctaagacttagactgggg

SEQ ID NO: 7485 - DNA, 28 bp, synthetic construct
  source 1..28: mol_type = other DNA
aaccccagtctaagtcttaggaagcagg

SEQ ID NO: 7486 - DNA, 28 bp, synthetic construct
  source 1..28: mol_type = other DNA
aattgtcaaccccagtctaagtcttagg

SEQ ID NO: 7487 - DNA, 28 bp, synthetic construct
  source 1..28: mol_type = other DNA
acaagacaattcaactatttctcctagg

SEQ ID NO: 7488 - DNA, 28 bp, synthetic construct
  source 1..28: mol_type = other DNA
aaaaaataataataataaaaatcctagg

SEQ ID NO: 7489 - DNA, 28 bp, synthetic construct
  source 1..28: mol_type = other DNA
attattttttcacttttctaccaaatgg

SEQ ID NO: 7490 - DNA, 28 bp, synthetic construct
  source 1..28: mol_type = other DNA
ttattttttcacttttctaccaaatggg

SEQ ID NO: 7491 - DNA, 28 bp, synthetic construct
  source 1..28: mol_type = other DNA
cacttttctaccaaatgggttacatagg

SEQ ID NO: 7492 - DNA, 28 bp, synthetic construct
  source 1..28: mol_type = other DNA
gttcattcttcctatgtaacccatttgg

SEQ ID NO: 7493 - DNA, 28 bp, synthetic construct
  source 1..28: mol_type = other DNA
aatctgtccagagctccaagtcctttgg

SEQ ID NO: 7494 - DNA, 28 bp, synthetic construct
  source 1..28: mol_type = other DNA
ctttcttccaaaggacttggagctctgg

SEQ ID NO: 7495 - DNA, 28 bp, synthetic construct
  source 1..28: mol_type = other DNA
catctaatctttcttccaaaggacttgg

SEQ ID NO: 7496 - DNA, 28 bp, synthetic construct
  source 1..28: mol_type = other DNA
tacgttcatctaatctttcttccaaagg

SEQ ID NO: 7497 - DNA, 28 bp, synthetic construct
  source 1..28: mol_type = other DNA
aacgtaaaaatgttgttgtttgctgtgg

SEQ ID NO: 7498 - DNA, 28 bp, synthetic construct
  source 1..28: mol_type = other DNA
tcttgcaaaattagtgcaaatctgttgg

SEQ ID NO: 7499 - DNA, 28 bp, synthetic construct
  source 1..28: mol_type = other DNA
tggaaatagaacacaattcacaaattgg

SEQ ID NO: 7500 - DNA, 28 bp, synthetic construct
  source 1..28: mol_type = other DNA
agtgaactaaaatgtaatgacgaaaagg

SEQ ID NO: 7501 - DNA, 28 bp, synthetic construct
  source 1..28: mol_type = other DNA
gtgaactaaaatgtaatgacgaaaaggg

SEQ ID NO: 7502 - DNA, 28 bp, synthetic construct
  source 1..28: mol_type = other DNA
acgaaaagggagtagtgttttgatttgg

SEQ ID NO: 7503 - DNA, 28 bp, synthetic construct
  source 1..28: mol_type = other DNA
aaaagggagtagtgttttgatttggagg

SEQ ID NO: 7504 - DNA, 28 bp, synthetic construct
  source 1..28: mol_type = other DNA
agggagtagtgttttgatttggaggagg

SEQ ID NO: 7505 - DNA, 28 bp, synthetic construct
  source 1..28: mol_type = other DNA
ttttgatttggaggaggtgtatattcgg

SEQ ID NO: 7506 - DNA, 28 bp, synthetic construct
  source 1..28: mol_type = other DNA
tttggaggaggtgtatattcggcagagg

SEQ ID NO: 7507 - DNA, 28 bp, synthetic construct
  source 1..28: mol_type = other DNA
gaggaggtgtatattcggcagaggttgg

SEQ ID NO: 7508 - DNA, 28 bp, synthetic construct
  source 1..28: mol_type = other DNA
attcggcagaggttggactgagagttgg

SEQ ID NO: 7509 - DNA, 28 bp, synthetic construct
  source 1..28: mol_type = other DNA
ttcggcagaggttggactgagagttggg

SEQ ID NO: 7510 - DNA, 28 bp, synthetic construct
  source 1..28: mol_type = other DNA
agttgggtgttatttaacataattatgg

SEQ ID NO: 7511 - DNA, 28 bp, synthetic construct
  source 1..28: mol_type = other DNA
tgttatttaacataattatggtaattgg

SEQ ID NO: 7512 - DNA, 28 bp, synthetic construct
  source 1..28: mol_type = other DNA
gttatttaacataattatggtaattggg

SEQ ID NO: 7513 - DNA, 28 bp, synthetic construct
  source 1..28: mol_type = other DNA
attgggaaacatttataaacactattgg

SEQ ID NO: 7514 - DNA, 28 bp, synthetic construct
  source 1..28: mol_type = other DNA
ttgggaaacatttataaacactattggg

SEQ ID NO: 7515 - DNA, 28 bp, synthetic construct
  source 1..28: mol_type = other DNA
gaaacatttataaacactattgggatgg

SEQ ID NO: 7516 - DNA, 28 bp, synthetic construct
  source 1..28: mol_type = other DNA
tattgggatggtgataaaatacaaaagg

SEQ ID NO: 7517 - DNA, 28 bp, synthetic construct
  source 1..28: mol_type = other DNA
attgggatggtgataaaatacaaaaggg

SEQ ID NO: 7518 - DNA, 28 bp, synthetic construct
  source 1..28: mol_type = other DNA
caaaagggcctatagatgttagaaatgg

SEQ ID NO: 7519 - DNA, 28 bp, synthetic construct
  source 1..28: mol_type = other DNA
aaaagggcctatagatgttagaaatggg

SEQ ID NO: 7520 - DNA, 28 bp, synthetic construct
  source 1..28: mol_type = other DNA
ggcctatagatgttagaaatgggtcagg

SEQ ID NO: 7521 - DNA, 28 bp, synthetic construct
  source 1..28: mol_type = other DNA
aacctgacccatttctaacatctatagg

SEQ ID NO: 7522 - DNA, 28 bp, synthetic construct
  source 1..28: mol_type = other DNA
ttagaaatgggtcaggttactgaaatgg

SEQ ID NO: 7523 - DNA, 28 bp, synthetic construct
  source 1..28: mol_type = other DNA
tagaaatgggtcaggttactgaaatggg

SEQ ID NO: 7524 - DNA, 28 bp, synthetic construct
  source 1..28: mol_type = other DNA
tgaaatggtcttctctggttctcagagg

SEQ ID NO: 7525 - DNA, 28 bp, synthetic construct
  source 1..28: mol_type = other DNA
gaaccagagaagaccatttcatagttgg

SEQ ID NO: 7526 - DNA, 28 bp, synthetic construct
  source 1..28: mol_type = other DNA
aatccaactatgaaatggtcttctctgg

SEQ ID NO: 7527 - DNA, 28 bp, synthetic construct
  source 1..28: mol_type = other DNA
gaagaccatttcatagttggattcctgg

SEQ ID NO: 7528 - DNA, 28 bp, synthetic construct
  source 1..28: mol_type = other DNA
tgtctccaggaatccaactatgaaatgg

SEQ ID NO: 7529 - DNA, 28 bp, synthetic construct
  source 1..28: mol_type = other DNA
tacgtggtggatagcgcatgtctccagg

SEQ ID NO: 7530 - DNA, 28 bp, synthetic construct
  source 1..28: mol_type = other DNA
ccaccacgtagccactttccacatgtgg

SEQ ID NO: 7531 - DNA, 28 bp, synthetic construct
  source 1..28: mol_type = other DNA
tggccacatgtggaaagtggctacgtgg

SEQ ID NO: 7532 - DNA, 28 bp, synthetic construct
  source 1..28: mol_type = other DNA
gtggttgatggccacatgtggaaagtgg

SEQ ID NO: 7533 - DNA, 28 bp, synthetic construct
  source 1..28: mol_type = other DNA
atcttaagtggttgatggccacatgtgg

SEQ ID NO: 7534 - DNA, 28 bp, synthetic construct
  source 1..28: mol_type = other DNA
acatgtggccatcaaccacttaagatgg

SEQ ID NO: 7535 - DNA, 28 bp, synthetic construct
  source 1..28: mol_type = other DNA
catgtggccatcaaccacttaagatggg

SEQ ID NO: 7536 - DNA, 28 bp, synthetic construct
  source 1..28: mol_type = other DNA
atgtggccatcaaccacttaagatgggg

SEQ ID NO: 7537 - DNA, 28 bp, synthetic construct
  source 1..28: mol_type = other DNA
aactaaccccatcttaagtggttgatgg

SEQ ID NO: 7538 - DNA, 28 bp, synthetic construct
  source 1..28: mol_type = other DNA
tgatttaaactaaccccatcttaagtgg

SEQ ID NO: 7539 - DNA, 28 bp, synthetic construct
  source 1..28: mol_type = other DNA
ttaaatcaagatgtgctgttataattgg

SEQ ID NO: 7540 - DNA, 28 bp, synthetic construct
  source 1..28: mol_type = other DNA
ataagcataaaatcacactagattctgg

SEQ ID NO: 7541 - DNA, 28 bp, synthetic construct
  source 1..28: mol_type = other DNA
aataagaatactatttcagtagttttgg

SEQ ID NO: 7542 - DNA, 28 bp, synthetic construct
  source 1..28: mol_type = other DNA
ttgtgtgtcaaaaatgataatattttgg

SEQ ID NO: 7543 - DNA, 28 bp, synthetic construct
  source 1..28: mol_type = other DNA
aaaaatgataatattttggatgtattgg

SEQ ID NO: 7544 - DNA, 28 bp, synthetic construct
  source 1..28: mol_type = other DNA
aaaatgataatattttggatgtattggg

SEQ ID NO: 7545 - RNA, 20 nt, synthetic construct
  source 1..20: mol_type = other RNA
acttttcacttacatacgaa

SEQ ID NO: 7546 - RNA, 20 nt, synthetic construct
  source 1..20: mol_type = other RNA
cactttagacatttgtagaa

SEQ ID NO: 7547 - RNA, 20 nt, synthetic construct
  source 1..20: mol_type = other RNA
acactttagacatttgtaga

SEQ ID NO: 7548 - RNA, 20 nt, synthetic construct
  source 1..20: mol_type = other RNA
agattcactgacataattat

SEQ ID NO: 7549 - RNA, 20 nt, synthetic construct
  source 1..20: mol_type = other RNA
tactgtatgcacggatcgct

SEQ ID NO: 7550 - RNA, 20 nt, synthetic construct
  source 1..20: mol_type = other RNA
gatccgtgcatacagtacag

SEQ ID NO: 7551 - RNA, 20 nt, synthetic construct
  source 1..20: mol_type = other RNA
atccgtgcatacagtacagt

SEQ ID NO: 7552 - RNA, 20 nt, synthetic construct
  source 1..20: mol_type = other RNA
tccgtgcatacagtacagtg

SEQ ID NO: 7553 - RNA, 20 nt, synthetic construct
  source 1..20: mol_type = other RNA
ccgtgcatacagtacagtgg

SEQ ID NO: 7554 - RNA, 20 nt, synthetic construct
  source 1..20: mol_type = other RNA
cccccactgtactgtatgca

SEQ ID NO: 7555 - RNA, 20 nt, synthetic construct
  source 1..20: mol_type = other RNA
cttgtacacacctcttactc

SEQ ID NO: 7556 - RNA, 20 nt, synthetic construct
  source 1..20: mol_type = other RNA
cacacctcttactctggtat

SEQ ID NO: 7557 - RNA, 20 nt, synthetic construct
  source 1..20: mol_type = other RNA
tagtcctataccagagtaag

SEQ ID NO: 7558 - RNA, 20 nt, synthetic construct
  source 1..20: mol_type = other RNA
gactaagatttctagtactg

SEQ ID NO: 7559 - RNA, 20 nt, synthetic construct
  source 1..20: mol_type = other RNA
actaagatttctagtactgt

SEQ ID NO: 7560 - RNA, 20 nt, synthetic construct
  source 1..20: mol_type = other RNA
agatttctagtactgtggga

SEQ ID NO: 7561 - RNA, 20 nt, synthetic construct
  source 1..20: mol_type = other RNA
gatttctagtactgtgggaa

SEQ ID NO: 7562 - RNA, 20 nt, synthetic construct
  source 1..20: mol_type = other RNA
tctagtactgtgggaagggt

SEQ ID NO: 7563 - RNA, 20 nt, synthetic construct
  source 1..20: mol_type = other RNA
ctagtactgtgggaagggtt

SEQ ID NO: 7564 - RNA, 20 nt, synthetic construct
  source 1..20: mol_type = other RNA
ctgtgggaagggttgggaaa

SEQ ID NO: 7565 - RNA, 20 nt, synthetic construct
  source 1..20: mol_type = other RNA
gggaagggttgggaaatggc

SEQ ID NO: 7566 - RNA, 20 nt, synthetic construct
  source 1..20: mol_type = other RNA
cccagttctaattacaaccc

SEQ ID NO: 7567 - RNA, 20 nt, synthetic construct
  source 1..20: mol_type = other RNA
cctgggttgtaattagaact

SEQ ID NO: 7568 - RNA, 20 nt, synthetic construct
  source 1..20: mol_type = other RNA
acctgggttgtaattagaac

SEQ ID NO: 7569 - RNA, 20 nt, synthetic construct
  source 1..20: mol_type = other RNA
caggtagagagacacccatc

SEQ ID NO: 7570 - RNA, 20 nt, synthetic construct
  source 1..20: mol_type = other RNA
aggtagagagacacccatca

SEQ ID NO: 7571 - RNA, 20 nt, synthetic construct
  source 1..20: mol_type = other RNA
tgatgggtgtctctctacct

SEQ ID NO: 7572 - RNA, 20 nt, synthetic construct
  source 1..20: mol_type = other RNA
tagagagacacccatcaggg

SEQ ID NO: 7573 - RNA, 20 nt, synthetic construct
  source 1..20: mol_type = other RNA
agacacccatcagggaggtg

SEQ ID NO: 7574 - RNA, 20 nt, synthetic construct
  source 1..20: mol_type = other RNA
ccatcagggaggtgtggaga

SEQ ID NO: 7575 - RNA, 20 nt, synthetic construct
  source 1..20: mol_type = other RNA
cttctccacacctccctgat

SEQ ID NO: 7576 - RNA, 20 nt, synthetic construct
  source 1..20: mol_type = other RNA
ccttctccacacctccctga

SEQ ID NO: 7577 - RNA, 20 nt, synthetic construct
  source 1..20: mol_type = other RNA
gggaggtgtggagaaggcca

SEQ ID NO: 7578 - RNA, 20 nt, synthetic construct
  source 1..20: mol_type = other RNA
ggctgagttaaatcttcagc

SEQ ID NO: 7579 - RNA, 20 nt, synthetic construct
  source 1..20: mol_type = other RNA
ctgaagatttaactcagcca

SEQ ID NO: 7580 - RNA, 20 nt, synthetic construct
  source 1..20: mol_type = other RNA
aaactatccagctcagcagt

SEQ ID NO: 7581 - RNA, 20 nt, synthetic construct
  source 1..20: mol_type = other RNA
ccagctcagcagttggaccc

SEQ ID NO: 7582 - RNA, 20 nt, synthetic construct
  source 1..20: mol_type = other RNA
ctcagcagttggacccaggc

SEQ ID NO: 7583 - RNA, 20 nt, synthetic construct
  source 1..20: mol_type = other RNA
tcagcagttggacccaggct

SEQ ID NO: 7584 - RNA, 20 nt, synthetic construct
  source 1..20: mol_type = other RNA
cagcagttggacccaggctg

SEQ ID NO: 7585 - RNA, 20 nt, synthetic construct
  source 1..20: mol_type = other RNA
ttcagacacttccccagcct

SEQ ID NO: 7586 - RNA, 20 nt, synthetic construct
  source 1..20: mol_type = other RNA
gttcagacacttccccagcc

SEQ ID NO: 7587 - RNA, 20 nt, synthetic construct
  source 1..20: mol_type = other RNA
ggaagtgtctgaacaaaaca

SEQ ID NO: 7588 - RNA, 20 nt, synthetic construct
  source 1..20: mol_type = other RNA
aaacaaggaacaaaaatgag

SEQ ID NO: 7589 - RNA, 20 nt, synthetic construct
  source 1..20: mol_type = other RNA
aacaaggaacaaaaatgagt

SEQ ID NO: 7590 - RNA, 20 nt, synthetic construct
  source 1..20: mol_type = other RNA
aaggaacaaaaatgagtggg

SEQ ID NO: 7591 - RNA, 20 nt, synthetic construct
  source 1..20: mol_type = other RNA
aggaacaaaaatgagtgggt

SEQ ID NO: 7592 - RNA, 20 nt, synthetic construct
  source 1..20: mol_type = other RNA
aatgagtgggtgggatgaga

SEQ ID NO: 7593 - RNA, 20 nt, synthetic construct
  source 1..20: mol_type = other RNA
tgacgtatttaggttctttg

SEQ ID NO: 7594 - RNA, 20 nt, synthetic construct
  source 1..20: mol_type = other RNA
gtgacgtatttaggttcttt

SEQ ID NO: 7595 - RNA, 20 nt, synthetic construct
  source 1..20: mol_type = other RNA
tgtgacgtatttaggttctt

SEQ ID NO: 7596 - RNA, 20 nt, synthetic construct
  source 1..20: mol_type = other RNA
taaatacgtcacacttgaag

SEQ ID NO: 7597 - RNA, 20 nt, synthetic construct
  source 1..20: mol_type = other RNA
acttcaagtgtgacgtattt

SEQ ID NO: 7598 - RNA, 20 nt, synthetic construct
  source 1..20: mol_type = other RNA
tcacacttgaagtggcacag

SEQ ID NO: 7599 - RNA, 20 nt, synthetic construct
  source 1..20: mol_type = other RNA
tatatgagaaagtgcctgag

SEQ ID NO: 7600 - RNA, 20 nt, synthetic construct
  source 1..20: mol_type = other RNA
atatgagaaagtgcctgagt

SEQ ID NO: 7601 - RNA, 20 nt, synthetic construct
  source 1..20: mol_type = other RNA
agaaagtgcctgagtgggca

SEQ ID NO: 7602 - RNA, 20 nt, synthetic construct
  source 1..20: mol_type = other RNA
ttcgatgtccatgcccactc

SEQ ID NO: 7603 - RNA, 20 nt, synthetic construct
  source 1..20: mol_type = other RNA
gggcatggacatcgaagaag

SEQ ID NO: 7604 - RNA, 20 nt, synthetic construct
  source 1..20: mol_type = other RNA
ggcatggacatcgaagaagt

SEQ ID NO: 7605 - RNA, 20 nt, synthetic construct
  source 1..20: mol_type = other RNA
gcatggacatcgaagaagtg

SEQ ID NO: 7606 - RNA, 20 nt, synthetic construct
  source 1..20: mol_type = other RNA
catggacatcgaagaagtgg

SEQ ID NO: 7607 - RNA, 20 nt, synthetic construct
  source 1..20: mol_type = other RNA
atggacatcgaagaagtggg

SEQ ID NO: 7608 - RNA, 20 nt, synthetic construct
  source 1..20: mol_type = other RNA
cgaagaagtggggggacctc

SEQ ID NO: 7609 - RNA, 20 nt, synthetic construct
  source 1..20: mol_type = other RNA
gaagtggggggacctctggc

SEQ ID NO: 7610 - RNA, 20 nt, synthetic construct
  source 1..20: mol_type = other RNA
tggttcaggcatccagccag

SEQ ID NO: 7611 - RNA, 20 nt, synthetic construct
  source 1..20: mol_type = other RNA
tgcctgaaccacaccctcac

SEQ ID NO: 7612 - RNA, 20 nt, synthetic construct
  source 1..20: mol_type = other RNA
gcctgaaccacaccctcaca

SEQ ID NO: 7613 - RNA, 20 nt, synthetic construct
  source 1..20: mol_type = other RNA
tgaaccacaccctcacaggg

SEQ ID NO: 7614 - RNA, 20 nt, synthetic construct
  source 1..20: mol_type = other RNA
tccctgtgagggtgtggttc

SEQ ID NO: 7615 - RNA, 20 nt, synthetic construct
  source 1..20: mol_type = other RNA
cacaccctcacagggaggtt

SEQ ID NO: 7616 - RNA, 20 nt, synthetic construct
  source 1..20: mol_type = other RNA
caaacctccctgtgagggtg

SEQ ID NO: 7617 - RNA, 20 nt, synthetic construct
  source 1..20: mol_type = other RNA
tctgccaaacctccctgtga

SEQ ID NO: 7618 - RNA, 20 nt, synthetic construct
  source 1..20: mol_type = other RNA
atctgccaaacctccctgtg

SEQ ID NO: 7619 - RNA, 20 nt, synthetic construct
  source 1..20: mol_type = other RNA
ggcagatccaaagacaataa

SEQ ID NO: 7620 - RNA, 20 nt, synthetic construct
  source 1..20: mol_type = other RNA
aagacaataaaggacctttc

SEQ ID NO: 7621 - RNA, 20 nt, synthetic construct
  source 1..20: mol_type = other RNA
gaaaggtcctttattgtctt

SEQ ID NO: 7622 - RNA, 20 nt, synthetic construct
  source 1..20: mol_type = other RNA
ggacctttcaggtcaaaaag

SEQ ID NO: 7623 - RNA, 20 nt, synthetic construct
  source 1..20: mol_type = other RNA
gacctttcaggtcaaaaaga

SEQ ID NO: 7624 - RNA, 20 nt, synthetic construct
  source 1..20: mol_type = other RNA
acctttcaggtcaaaaagag

SEQ ID NO: 7625 - RNA, 20 nt, synthetic construct
  source 1..20: mol_type = other RNA
tcccctctttttgacctgaa

SEQ ID NO: 7626 - RNA, 20 nt, synthetic construct
  source 1..20: mol_type = other RNA
aggtcaaaaagaggggatgt

SEQ ID NO: 7627 - RNA, 20 nt, synthetic construct
  source 1..20: mol_type = other RNA
atacttgtatcttacatctt

SEQ ID NO: 7628 - RNA, 20 nt, synthetic construct
  source 1..20: mol_type = other RNA
tacttgtatcttacatctta

SEQ ID NO: 7629 - RNA, 20 nt, synthetic construct
  source 1..20: mol_type = other RNA
acttgtatcttacatcttag

SEQ ID NO: 7630 - RNA, 20 nt, synthetic construct
  source 1..20: mol_type = other RNA
tacatcttaggggctcttct

SEQ ID NO: 7631 - RNA, 20 nt, synthetic construct
  source 1..20: mol_type = other RNA
acatcttaggggctcttctt

SEQ ID NO: 7632 - RNA, 20 nt, synthetic construct
  source 1..20: mol_type = other RNA
tgggcgtcacccgtgccttg

SEQ ID NO: 7633 - RNA, 20 nt, synthetic construct
  source 1..20: mol_type = other RNA
cgtcacccgtgccttgtggc

SEQ ID NO: 7634 - RNA, 20 nt, synthetic construct
  source 1..20: mol_type = other RNA
gtcacccgtgccttgtggct

SEQ ID NO: 7635 - RNA, 20 nt, synthetic construct
  source 1..20: mol_type = other RNA
tcacccgtgccttgtggctg

SEQ ID NO: 7636 - RNA, 20 nt, synthetic construct
  source 1..20: mol_type = other RNA
atgccccagccacaaggcac

SEQ ID NO: 7637 - RNA, 20 nt, synthetic construct
  source 1..20: mol_type = other RNA
catgccccagccacaaggca

SEQ ID NO: 7638 - RNA, 20 nt, synthetic construct
  source 1..20: mol_type = other RNA
atgtacatgccccagccaca

SEQ ID NO: 7639 - RNA, 20 nt, synthetic construct
  source 1..20: mol_type = other RNA
ggggcatgtacatacacaag

SEQ ID NO: 7640 - RNA, 20 nt, synthetic construct
  source 1..20: mol_type = other RNA
acatacacaagtggacacac

SEQ ID NO: 7641 - RNA, 20 nt, synthetic construct
  source 1..20: mol_type = other RNA
acaggcagagcagccacctg

SEQ ID NO: 7642 - RNA, 20 nt, synthetic construct
  source 1..20: mol_type = other RNA
caggcagagcagccacctgt

SEQ ID NO: 7643 - RNA, 20 nt, synthetic construct
  source 1..20: mol_type = other RNA
cagccacctgtgggctttct

SEQ ID NO: 7644 - RNA, 20 nt, synthetic construct
  source 1..20: mol_type = other RNA
acctgtgggctttcttggac

SEQ ID NO: 7645 - RNA, 20 nt, synthetic construct
  source 1..20: mol_type = other RNA
tgtccaagaaagcccacagg

SEQ ID NO: 7646 - RNA, 20 nt, synthetic construct
  source 1..20: mol_type = other RNA
tcctgtccaagaaagcccac

SEQ ID NO: 7647 - RNA, 20 nt, synthetic construct
  source 1..20: mol_type = other RNA
ggaatgtgtgtgtatgtgca

SEQ ID NO: 7648 - RNA, 20 nt, synthetic construct
  source 1..20: mol_type = other RNA
gaatgtgtgtgtatgtgcat

SEQ ID NO: 7649 - RNA, 20 nt, synthetic construct
  source 1..20: mol_type = other RNA
aatgtgtgtgtatgtgcatg

SEQ ID NO: 7650 - RNA, 20 nt, synthetic construct
  source 1..20: mol_type = other RNA
atgtgtgtgtatgtgcatgg

SEQ ID NO: 7651 - RNA, 20 nt, synthetic construct
  source 1..20: mol_type = other RNA
tgtgtgtgtatgtgcatggg

SEQ ID NO: 7652 - RNA, 20 nt, synthetic construct
  source 1..20: mol_type = other RNA
gtgtatgtgcatggggggtg

SEQ ID NO: 7653 - RNA, 20 nt, synthetic construct
  source 1..20: mol_type = other RNA
ggggggtgaggatcctattt

SEQ ID NO: 7654 - RNA, 20 nt, synthetic construct
  source 1..20: mol_type = other RNA
gggggtgaggatcctatttt

SEQ ID NO: 7655 - RNA, 20 nt, synthetic construct
  source 1..20: mol_type = other RNA
ggggtgaggatcctattttg

SEQ ID NO: 7656 - RNA, 20 nt, synthetic construct
  source 1..20: mol_type = other RNA
gggtgaggatcctattttgg

SEQ ID NO: 7657 - RNA, 20 nt, synthetic construct
  source 1..20: mol_type = other RNA
aagtctacatcccccaaaat

SEQ ID NO: 7658 - RNA, 20 nt, synthetic construct
  source 1..20: mol_type = other RNA
gacttatatctaagagtatc

SEQ ID NO: 7659 - RNA, 20 nt, synthetic construct
  source 1..20: mol_type = other RNA
taaccctgagcttaaatgaa

SEQ ID NO: 7660 - RNA, 20 nt, synthetic construct
  source 1..20: mol_type = other RNA
ccctgagcttaaatgaaagg

SEQ ID NO: 7661 - RNA, 20 nt, synthetic construct
  source 1..20: mol_type = other RNA
cctcctttcatttaagctca

SEQ ID NO: 7662 - RNA, 20 nt, synthetic construct
  source 1..20: mol_type = other RNA
tcctcctttcatttaagctc

SEQ ID NO: 7663 - RNA, 20 nt, synthetic construct
  source 1..20: mol_type = other RNA
cttaaatgaaaggaggagtt

SEQ ID NO: 7664 - RNA, 20 nt, synthetic construct
  source 1..20: mol_type = other RNA
tgaaaggaggagttaggttg

SEQ ID NO: 7665 - RNA, 20 nt, synthetic construct
  source 1..20: mol_type = other RNA
aggaggagttaggttgaggc

SEQ ID NO: 7666 - RNA, 20 nt, synthetic construct
  source 1..20: mol_type = other RNA
gagttaggttgaggcaggca

SEQ ID NO: 7667 - RNA, 20 nt, synthetic construct
  source 1..20: mol_type = other RNA
ttaggttgaggcaggcaagg

SEQ ID NO: 7668 - RNA, 20 nt, synthetic construct
  source 1..20: mol_type = other RNA
taggttgaggcaggcaaggt

SEQ ID NO: 7669 - RNA, 20 nt, synthetic construct
  source 1..20: mol_type = other RNA
ggcaggcaaggtgggagaag

SEQ ID NO: 7670 - RNA, 20 nt, synthetic construct
  source 1..20: mol_type = other RNA
gagaagtggcccaagtcctt

SEQ ID NO: 7671 - RNA, 20 nt, synthetic construct
  source 1..20: mol_type = other RNA
ggcccaagtcctttggtgag

SEQ ID NO: 7672 - RNA, 20 nt, synthetic construct
  source 1..20: mol_type = other RNA
gcccaagtcctttggtgagt

SEQ ID NO: 7673 - RNA, 20 nt, synthetic construct
  source 1..20: mol_type = other RNA
cccaagtcctttggtgagtg

SEQ ID NO: 7674 - RNA, 20 nt, synthetic construct
  source 1..20: mol_type = other RNA
ccaagtcctttggtgagtgg

SEQ ID NO: 7675 - RNA, 20 nt, synthetic construct
  source 1..20: mol_type = other RNA
caagtcctttggtgagtggg

SEQ ID NO: 7676 - RNA, 20 nt, synthetic construct
  source 1..20: mol_type = other RNA
ccccactcaccaaaggactt

SEQ ID NO: 7677 - RNA, 20 nt, synthetic construct
  source 1..20: mol_type = other RNA
cccccactcaccaaaggact

SEQ ID NO: 7678 - RNA, 20 nt, synthetic construct
  source 1..20: mol_type = other RNA
cctttggtgagtggggggac

SEQ ID NO: 7679 - RNA, 20 nt, synthetic construct
  source 1..20: mol_type = other RNA
tggtgagtggggggacagga

SEQ ID NO: 7680 - RNA, 20 nt, synthetic construct
  source 1..20: mol_type = other RNA
cctgtccccccactcaccaa

SEQ ID NO: 7681 - RNA, 20 nt, synthetic construct
  source 1..20: mol_type = other RNA
gtggggggacaggatggagt

SEQ ID NO: 7682 - RNA, 20 nt, synthetic construct
  source 1..20: mol_type = other RNA
tggggggacaggatggagta

SEQ ID NO: 7683 - RNA, 20 nt, synthetic construct
  source 1..20: mol_type = other RNA
ggggggacaggatggagtag

SEQ ID NO: 7684 - RNA, 20 nt, synthetic construct
  source 1..20: mol_type = other RNA
gggggacaggatggagtagg

SEQ ID NO: 7685 - RNA, 20 nt, synthetic construct
  source 1..20: mol_type = other RNA
ggggacaggatggagtaggg

SEQ ID NO: 7686 - RNA, 20 nt, synthetic construct
  source 1..20: mol_type = other RNA
caggatggagtaggggggac

SEQ ID NO: 7687 - RNA, 20 nt, synthetic construct
  source 1..20: mol_type = other RNA
atggagtaggggggacagga

SEQ ID NO: 7688 - RNA, 20 nt, synthetic construct
  source 1..20: mol_type = other RNA
taggggggacaggatggagt

SEQ ID NO: 7689 - RNA, 20 nt, synthetic construct
  source 1..20: mol_type = other RNA
aggggggacaggatggagta

SEQ ID NO: 7690 - RNA, 20 nt, synthetic construct
  source 1..20: mol_type = other RNA
ggggacaggatggagtaggg

SEQ ID NO: 7691 - RNA, 20 nt, synthetic construct
  source 1..20: mol_type = other RNA
gacaggatggagtagggtgg

SEQ ID NO: 7692 - RNA, 20 nt, synthetic construct
  source 1..20: mol_type = other RNA
acaggatggagtagggtgga

SEQ ID NO: 7693 - RNA, 20 nt, synthetic construct
  source 1..20: mol_type = other RNA
caggatggagtagggtggag

SEQ ID NO: 7694 - RNA, 20 nt, synthetic construct
  source 1..20: mol_type = other RNA
tggaggggaagaatactgtc

SEQ ID NO: 7695 - RNA, 20 nt, synthetic construct
  source 1..20: mol_type = other RNA
gaagaatactgtctggagtc

SEQ ID NO: 7696 - RNA, 20 nt, synthetic construct
  source 1..20: mol_type = other RNA
atactgtctggagtctggcc

SEQ ID NO: 7697 - RNA, 20 nt, synthetic construct
  source 1..20: mol_type = other RNA
tactgtctggagtctggcca

SEQ ID NO: 7698 - RNA, 20 nt, synthetic construct
  source 1..20: mol_type = other RNA
ggtgtgctctagcagaaccc

SEQ ID NO: 7699 - RNA, 20 nt, synthetic construct
  source 1..20: mol_type = other RNA
gcacaccctccacctcagcc

SEQ ID NO: 7700 - RNA, 20 nt, synthetic construct
  source 1..20: mol_type = other RNA
cacaccctccacctcagcca

SEQ ID NO: 7701 - RNA, 20 nt, synthetic construct
  source 1..20: mol_type = other RNA
cacctcagccagggtccaca

SEQ ID NO: 7702 - RNA, 20 nt, synthetic construct
  source 1..20: mol_type = other RNA
gtggaccctggctgaggtgg

SEQ ID NO: 7703 - RNA, 20 nt, synthetic construct
  source 1..20: mol_type = other RNA
tcagccagggtccacaagga

SEQ ID NO: 7704 - RNA, 20 nt, synthetic construct
  source 1..20: mol_type = other RNA
cagccagggtccacaaggat

SEQ ID NO: 7705 - RNA, 20 nt, synthetic construct
  source 1..20: mol_type = other RNA
atccttgtggaccctggctg

SEQ ID NO: 7706 - RNA, 20 nt, synthetic construct
  source 1..20: mol_type = other RNA
gggtccacaaggatgggtac

SEQ ID NO: 7707 - RNA, 20 nt, synthetic construct
  source 1..20: mol_type = other RNA
ggtccacaaggatgggtacc

SEQ ID NO: 7708 - RNA, 20 nt, synthetic construct
  source 1..20: mol_type = other RNA
gtacccatccttgtggaccc

SEQ ID NO: 7709 - RNA, 20 nt, synthetic construct
  source 1..20: mol_type = other RNA
gagcccggtacccatccttg

SEQ ID NO: 7710 - RNA, 20 nt, synthetic construct
  source 1..20: mol_type = other RNA
tgaagctgtgacgcagagcc

SEQ ID NO: 7711 - RNA, 20 nt, synthetic construct
  source 1..20: mol_type = other RNA
tctgcgtcacagcttcagct

SEQ ID NO: 7712 - RNA, 20 nt, synthetic construct
  source 1..20: mol_type = other RNA
ctgcgtcacagcttcagctt

SEQ ID NO: 7713 - RNA, 20 nt, synthetic construct
  source 1..20: mol_type = other RNA
tgcgtcacagcttcagcttg

SEQ ID NO: 7714 - RNA, 20 nt, synthetic construct
  source 1..20: mol_type = other RNA
gtcacagcttcagcttgggg

SEQ ID NO: 7715 - RNA, 20 nt, synthetic construct
  source 1..20: mol_type = other RNA
gtggttgctatgagtctgcg

SEQ ID NO: 7716 - RNA, 20 nt, synthetic construct
  source 1..20: mol_type = other RNA
agtctgcgtggctcccgccc

SEQ ID NO: 7717 - RNA, 20 nt, synthetic construct
  source 1..20: mol_type = other RNA
gtctgcgtggctcccgccca

SEQ ID NO: 7718 - RNA, 20 nt, synthetic construct
  source 1..20: mol_type = other RNA
ggctcccgcccagggcagac

SEQ ID NO: 7719 - RNA, 20 nt, synthetic construct
  source 1..20: mol_type = other RNA
gctcccgcccagggcagaca

SEQ ID NO: 7720 - RNA, 20 nt, synthetic construct
  source 1..20: mol_type = other RNA
cgcccagggcagacagggac

SEQ ID NO: 7721 - RNA, 20 nt, synthetic construct
  source 1..20: mol_type = other RNA
tgtccctgtctgccctgggc

SEQ ID NO: 7722 - RNA, 20 nt, synthetic construct
  source 1..20: mol_type = other RNA
ctgtccctgtctgccctggg

SEQ ID NO: 7723 - RNA, 20 nt, synthetic construct
  source 1..20: mol_type = other RNA
ggcagacagggacaggtcac

SEQ ID NO: 7724 - RNA, 20 nt, synthetic construct
  source 1..20: mol_type = other RNA
tgacctgtccctgtctgccc

SEQ ID NO: 7725 - RNA, 20 nt, synthetic construct
  source 1..20: mol_type = other RNA
acagggacaggtcacaggag

SEQ ID NO: 7726 - RNA, 20 nt, synthetic construct
  source 1..20: mol_type = other RNA
cagggacaggtcacaggaga

SEQ ID NO: 7727 - RNA, 20 nt, synthetic construct
  source 1..20: mol_type = other RNA
agggacaggtcacaggagag

SEQ ID NO: 7728 - RNA, 20 nt, synthetic construct
  source 1..20: mol_type = other RNA
caggtcacaggagaggggct

SEQ ID NO: 7729 - RNA, 20 nt, synthetic construct
  source 1..20: mol_type = other RNA
gagaggggctaggtaatccc

SEQ ID NO: 7730 - RNA, 20 nt, synthetic construct
  source 1..20: mol_type = other RNA
tggcagtagttcctgtacag

SEQ ID NO: 7731 - RNA, 20 nt, synthetic construct
  source 1..20: mol_type = other RNA
ctgtacaggaactactgcca

SEQ ID NO: 7732 - RNA, 20 nt, synthetic construct
  source 1..20: mol_type = other RNA
cagtagttcctgtacagagg

SEQ ID NO: 7733 - RNA, 20 nt, synthetic construct
  source 1..20: mol_type = other RNA
gttcctgtacagaggtggtc

SEQ ID NO: 7734 - RNA, 20 nt, synthetic construct
  source 1..20: mol_type = other RNA
ttcctgtacagaggtggtct

SEQ ID NO: 7735 - RNA, 20 nt, synthetic construct
  source 1..20: mol_type = other RNA
tcctgtacagaggtggtctg

SEQ ID NO: 7736 - RNA, 20 nt, synthetic construct
  source 1..20: mol_type = other RNA
acagaggtggtctggggtcc

SEQ ID NO: 7737 - RNA, 20 nt, synthetic construct
  source 1..20: mol_type = other RNA
cagaggtggtctggggtcca

SEQ ID NO: 7738 - RNA, 20 nt, synthetic construct
  source 1..20: mol_type = other RNA
agaggtggtctggggtccag

SEQ ID NO: 7739 - RNA, 20 nt, synthetic construct
  source 1..20: mol_type = other RNA
gaggtggtctggggtccagg

SEQ ID NO: 7740 - RNA, 20 nt, synthetic construct
  source 1..20: mol_type = other RNA
ctggggtccagggggtcccc

SEQ ID NO: 7741 - RNA, 20 nt, synthetic construct
  source 1..20: mol_type = other RNA
tggggtccagggggtcccct

SEQ ID NO: 7742 - RNA, 20 nt, synthetic construct
  source 1..20: mol_type = other RNA
gggtcccctgggcctagcct

SEQ ID NO: 7743 - RNA, 20 nt, synthetic construct
  source 1..20: mol_type = other RNA
gttgcctaggctaggcccag

SEQ ID NO: 7744 - RNA, 20 nt, synthetic construct
  source 1..20: mol_type = other RNA
ggcctagcctaggcaacagt

SEQ ID NO: 7745 - RNA, 20 nt, synthetic construct
  source 1..20: mol_type = other RNA
ctgttgcctaggctaggccc

SEQ ID NO: 7746 - RNA, 20 nt, synthetic construct
  source 1..20: mol_type = other RNA
aaccaactgttgcctaggct

SEQ ID NO: 7747 - RNA, 20 nt, synthetic construct
  source 1..20: mol_type = other RNA
ttgtgaaccaactgttgcct

SEQ ID NO: 7748 - RNA, 20 nt, synthetic construct
  source 1..20: mol_type = other RNA
ttggttcacaaagaaatgtc

SEQ ID NO: 7749 - RNA, 20 nt, synthetic construct
  source 1..20: mol_type = other RNA
tggttcacaaagaaatgtca

SEQ ID NO: 7750 - RNA, 20 nt, synthetic construct
  source 1..20: mol_type = other RNA
catctctctttttttaatgc

SEQ ID NO: 7751 - RNA, 20 nt, synthetic construct
  source 1..20: mol_type = other RNA
catttggtctgtactgatca

SEQ ID NO: 7752 - RNA, 20 nt, synthetic construct
  source 1..20: mol_type = other RNA
tcatacggtgaatatgcatt

SEQ ID NO: 7753 - RNA, 20 nt, synthetic construct
  source 1..20: mol_type = other RNA
tgactggtttgactttcata

SEQ ID NO: 7754 - RNA, 20 nt, synthetic construct
  source 1..20: mol_type = other RNA
cagtcagtgactccagagtt

SEQ ID NO: 7755 - RNA, 20 nt, synthetic construct
  source 1..20: mol_type = other RNA
caaactctggagtcactgac

SEQ ID NO: 7756 - RNA, 20 nt, synthetic construct
  source 1..20: mol_type = other RNA
ccagagtttggccaacactg

SEQ ID NO: 7757 - RNA, 20 nt, synthetic construct
  source 1..20: mol_type = other RNA
cctcagtgttggccaaactc

SEQ ID NO: 7758 - RNA, 20 nt, synthetic construct
  source 1..20: mol_type = other RNA
acactgaggcaccagcgtcg

SEQ ID NO: 7759 - RNA, 20 nt, synthetic construct
  source 1..20: mol_type = other RNA
cgacgctggtgcctcagtgt

SEQ ID NO: 7760 - RNA, 20 nt, synthetic construct
  source 1..20: mol_type = other RNA
accagcgtcgtggtgtagag

SEQ ID NO: 7761 - RNA, 20 nt, synthetic construct
  source 1..20: mol_type = other RNA
ccagcgtcgtggtgtagagt

SEQ ID NO: 7762 - RNA, 20 nt, synthetic construct
  source 1..20: mol_type = other RNA
cccactctacaccacgacgc

SEQ ID NO: 7763 - RNA, 20 nt, synthetic construct
  source 1..20: mol_type = other RNA
tggtgtagagtgggttctca

SEQ ID NO: 7764 - RNA, 20 nt, synthetic construct
  source 1..20: mol_type = other RNA
atggcacgcgtaacctcacc

SEQ ID NO: 7765 - RNA, 20 nt, synthetic construct
  source 1..20: mol_type = other RNA
tggcacgcgtaacctcacca

SEQ ID NO: 7766 - RNA, 20 nt, synthetic construct
  source 1..20: mol_type = other RNA
ggcacgcgtaacctcaccag

SEQ ID NO: 7767 - RNA, 20 nt, synthetic construct
  source 1..20: mol_type = other RNA
tataattggagcccctggtg

SEQ ID NO: 7768 - RNA, 20 nt, synthetic construct
  source 1..20: mol_type = other RNA
atttttataattggagcccc

SEQ ID NO: 7769 - RNA, 20 nt, synthetic construct
  source 1..20: mol_type = other RNA
ttttttttaatttttataat

SEQ ID NO: 7770 - RNA, 20 nt, synthetic construct
  source 1..20: mol_type = other RNA
aaaaaaaaaaaaaaaaagca

SEQ ID NO: 7771 - RNA, 20 nt, synthetic construct
  source 1..20: mol_type = other RNA
aaaaaaaaaaaaaaaagcat

SEQ ID NO: 7772 - RNA, 20 nt, synthetic construct
  source 1..20: mol_type = other RNA
aaaaaaaaaaaagcatgggc

SEQ ID NO: 7773 - RNA, 20 nt, synthetic construct
  source 1..20: mol_type = other RNA
aaaaaaagcatgggcaggag

SEQ ID NO: 7774 - RNA, 20 nt, synthetic construct
  source 1..20: mol_type = other RNA
catgggcaggagcggccagc

SEQ ID NO: 7775 - RNA, 20 nt, synthetic construct
  source 1..20: mol_type = other RNA
ggcaggagcggccagctggt

SEQ ID NO: 7776 - RNA, 20 nt, synthetic construct
  source 1..20: mol_type = other RNA
gcaggagcggccagctggtt

SEQ ID NO: 7777 - RNA, 20 nt, synthetic construct
  source 1..20: mol_type = other RNA
caggagcggccagctggttg

SEQ ID NO: 7778 - RNA, 20 nt, synthetic construct
  source 1..20: mol_type = other RNA
agcggccagctggttggggc

SEQ ID NO: 7779 - RNA, 20 nt, synthetic construct
  source 1..20: mol_type = other RNA
gcggccagctggttggggct

SEQ ID NO: 7780 - RNA, 20 nt, synthetic construct
  source 1..20: mol_type = other RNA
gctggttggggctgggcgcc

SEQ ID NO: 7781 - RNA, 20 nt, synthetic construct
  source 1..20: mol_type = other RNA
ggcgcccagccccaaccagc

SEQ ID NO: 7782 - RNA, 20 nt, synthetic construct
  source 1..20: mol_type = other RNA
gttggggctgggcgccaggt

SEQ ID NO: 7783 - RNA, 20 nt, synthetic construct
  source 1..20: mol_type = other RNA
ttggggctgggcgccaggta

SEQ ID NO: 7784 - RNA, 20 nt, synthetic construct
  source 1..20: mol_type = other RNA
tggggctgggcgccaggtag

SEQ ID NO: 7785 - RNA, 20 nt, synthetic construct
  source 1..20: mol_type = other RNA
aaggcagagactcccctacc

SEQ ID NO: 7786 - RNA, 20 nt, synthetic construct
  source 1..20: mol_type = other RNA
ggagtctctgccttagtctg

SEQ ID NO: 7787 - RNA, 20 nt, synthetic construct
  source 1..20: mol_type = other RNA
ccttagtctgtggcgccccc

SEQ ID NO: 7788 - RNA, 20 nt, synthetic construct
  source 1..20: mol_type = other RNA
cttagtctgtggcgccccca

SEQ ID NO: 7789 - RNA, 20 nt, synthetic construct
  source 1..20: mol_type = other RNA
cctgggggcgccacagacta

SEQ ID NO: 7790 - RNA, 20 nt, synthetic construct
  source 1..20: mol_type = other RNA
tctgtggcgcccccagggcc

SEQ ID NO: 7791 - RNA, 20 nt, synthetic construct
  source 1..20: mol_type = other RNA
aggtgggaaccgggccctgg

SEQ ID NO: 7792 - RNA, 20 nt, synthetic construct
  source 1..20: mol_type = other RNA
gaggtgggaaccgggccctg

SEQ ID NO: 7793 - RNA, 20 nt, synthetic construct
  source 1..20: mol_type = other RNA
tgaggtgggaaccgggccct

SEQ ID NO: 7794 - RNA, 20 nt, synthetic construct
  source 1..20: mol_type = other RNA
atgaggtgggaaccgggccc

SEQ ID NO: 7795 - RNA, 20 nt, synthetic construct
  source 1..20: mol_type = other RNA
ccggttcccacctcatccct

SEQ ID NO: 7796 - RNA, 20 nt, synthetic construct
  source 1..20: mol_type = other RNA
caagggatgaggtgggaacc

SEQ ID NO: 7797 - RNA, 20 nt, synthetic construct
  source 1..20: mol_type = other RNA
ccaagggatgaggtgggaac

SEQ ID NO: 7798 - RNA, 20 nt, synthetic construct
  source 1..20: mol_type = other RNA
gaagggccaagggatgaggt

SEQ ID NO: 7799 - RNA, 20 nt, synthetic construct
  source 1..20: mol_type = other RNA
ggaagggccaagggatgagg

SEQ ID NO: 7800 - RNA, 20 nt, synthetic construct
  source 1..20: mol_type = other RNA
aaaggaagggccaagggatg

SEQ ID NO: 7801 - RNA, 20 nt, synthetic construct
  source 1..20: mol_type = other RNA
actgagaaaggaagggccaa

SEQ ID NO: 7802 - RNA, 20 nt, synthetic construct
  source 1..20: mol_type = other RNA
tactgagaaaggaagggcca

SEQ ID NO: 7803 - RNA, 20 nt, synthetic construct
  source 1..20: mol_type = other RNA
gttttttactgagaaaggaa

SEQ ID NO: 7804 - RNA, 20 nt, synthetic construct
  source 1..20: mol_type = other RNA
tgttttttactgagaaagga

SEQ ID NO: 7805 - RNA, 20 nt, synthetic construct
  source 1..20: mol_type = other RNA
tttttgttttttactgagaa

SEQ ID NO: 7806 - RNA, 20 nt, synthetic construct
  source 1..20: mol_type = other RNA
tgagttggtttttttggttt

SEQ ID NO: 7807 - RNA, 20 nt, synthetic construct
  source 1..20: mol_type = other RNA
atctgttgagttggtttttt

SEQ ID NO: 7808 - RNA, 20 nt, synthetic construct
  source 1..20: mol_type = other RNA
taatgtcagatctgttgagt

SEQ ID NO: 7809 - RNA, 20 nt, synthetic construct
  source 1..20: mol_type = other RNA
aaaacaaaaaagccaacaaa

SEQ ID NO: 7810 - RNA, 20 nt, synthetic construct
  source 1..20: mol_type = other RNA
aaacaaaaaagccaacaaat

SEQ ID NO: 7811 - RNA, 20 nt, synthetic construct
  source 1..20: mol_type = other RNA
caaaaaagccaacaaatggg

SEQ ID NO: 7812 - RNA, 20 nt, synthetic construct
  source 1..20: mol_type = other RNA
aaaaaagccaacaaatgggt

SEQ ID NO: 7813 - RNA, 20 nt, synthetic construct
  source 1..20: mol_type = other RNA
aaaaagccaacaaatgggtg

SEQ ID NO: 7814 - RNA, 20 nt, synthetic construct
  source 1..20: mol_type = other RNA
aaaagccaacaaatgggtgg

SEQ ID NO: 7815 - RNA, 20 nt, synthetic construct
  source 1..20: mol_type = other RNA
aaagccaacaaatgggtggg

SEQ ID NO: 7816 - RNA, 20 nt, synthetic construct
  source 1..20: mol_type = other RNA
aagccaacaaatgggtgggg

SEQ ID NO: 7817 - RNA, 20 nt, synthetic construct
  source 1..20: mol_type = other RNA
agccaacaaatgggtggggg

SEQ ID NO: 7818 - RNA, 20 nt, synthetic construct
  source 1..20: mol_type = other RNA
gccaacaaatgggtgggggg

SEQ ID NO: 7819 - RNA, 20 nt, synthetic construct
  source 1..20: mol_type = other RNA
ccaacaaatgggtggggggg

SEQ ID NO: 7820 - RNA, 20 nt, synthetic construct
  source 1..20: mol_type = other RNA
caacaaatgggtgggggggg

SEQ ID NO: 7821 - RNA, 20 nt, synthetic construct
  source 1..20: mol_type = other RNA
aacaaatgggtggggggggg

SEQ ID NO: 7822 - RNA, 20 nt, synthetic construct
  source 1..20: mol_type = other RNA
acaaatgggtgggggggggg

SEQ ID NO: 7823 - RNA, 20 nt, synthetic construct
  source 1..20: mol_type = other RNA
caaatgggtggggggggggg

SEQ ID NO: 7824 - RNA, 20 nt, synthetic construct
  source 1..20: mol_type = other RNA
ccccccccccacccatttgt

SEQ ID NO: 7825 - RNA, 20 nt, synthetic construct
  source 1..20: mol_type = other RNA
atgggtgggggggggggggg

SEQ ID NO: 7826 - RNA, 20 nt, synthetic construct
  source 1..20: mol_type = other RNA
ggtggggggggggggggtgg

SEQ ID NO: 7827 - RNA, 20 nt, synthetic construct
  source 1..20: mol_type = other RNA
gtggggggggggggggtgga

SEQ ID NO: 7828 - RNA, 20 nt, synthetic construct
  source 1..20: mol_type = other RNA
tggggggggggggggtggag

SEQ ID NO: 7829 - RNA, 20 nt, synthetic construct
  source 1..20: mol_type = other RNA
gaaaagaaattgtagctttc

SEQ ID NO: 7830 - RNA, 20 nt, synthetic construct
  source 1..20: mol_type = other RNA
tttgaaactgagtaaaatat

SEQ ID NO: 7831 - RNA, 20 nt, synthetic construct
  source 1..20: mol_type = other RNA
aaactgagtaaaatataggc

SEQ ID NO: 7832 - RNA, 20 nt, synthetic construct
  source 1..20: mol_type = other RNA
ttgtgtgttttgtctttttg

SEQ ID NO: 7833 - RNA, 20 nt, synthetic construct
  source 1..20: mol_type = other RNA
tttcttttttcacaccagtt

SEQ ID NO: 7834 - RNA, 20 nt, synthetic construct
  source 1..20: mol_type = other RNA
cttttttcacaccagtttgg

SEQ ID NO: 7835 - RNA, 20 nt, synthetic construct
  source 1..20: mol_type = other RNA
tgttggtgactccaccaaac

SEQ ID NO: 7836 - RNA, 20 nt, synthetic construct
  source 1..20: mol_type = other RNA
tatctttgtttgaagtttgt

SEQ ID NO: 7837 - RNA, 20 nt, synthetic construct
  source 1..20: mol_type = other RNA
tactgtatagtgaacatagt

SEQ ID NO: 7838 - RNA, 20 nt, synthetic construct
  source 1..20: mol_type = other RNA
ttcactatacagtacagcca

SEQ ID NO: 7839 - RNA, 20 nt, synthetic construct
  source 1..20: mol_type = other RNA
gtcacacactacccacagcg

SEQ ID NO: 7840 - RNA, 20 nt, synthetic construct
  source 1..20: mol_type = other RNA
acacactacccacagcgcgg

SEQ ID NO: 7841 - RNA, 20 nt, synthetic construct
  source 1..20: mol_type = other RNA
agcggctgccaccgcgctgt

SEQ ID NO: 7842 - RNA, 20 nt, synthetic construct
  source 1..20: mol_type = other RNA
cagcggctgccaccgcgctg

SEQ ID NO: 7843 - RNA, 20 nt, synthetic construct
  source 1..20: mol_type = other RNA
gtggcagccgctgctcaatg

SEQ ID NO: 7844 - RNA, 20 nt, synthetic construct
  source 1..20: mol_type = other RNA
atcgtctcctcattgagcag

SEQ ID NO: 7845 - RNA, 20 nt, synthetic construct
  source 1..20: mol_type = other RNA
aggagacgatcacaccattt

SEQ ID NO: 7846 - RNA, 20 nt, synthetic construct
  source 1..20: mol_type = other RNA
ggcactgcttatctccgaaa

SEQ ID NO: 7847 - RNA, 20 nt, synthetic construct
  source 1..20: mol_type = other RNA
ataagcagtgccattgtgtc

SEQ ID NO: 7848 - RNA, 20 nt, synthetic construct
  source 1..20: mol_type = other RNA
agcagtgccattgtgtctgg

SEQ ID NO: 7849 - RNA, 20 nt, synthetic construct
  source 1..20: mol_type = other RNA
ctcttctcctccagacacaa

SEQ ID NO: 7850 - RNA, 20 nt, synthetic construct
  source 1..20: mol_type = other RNA
aaaaaacgaaacagaaacac

SEQ ID NO: 7851 - RNA, 20 nt, synthetic construct
  source 1..20: mol_type = other RNA
aaacgaaacagaaacacagg

SEQ ID NO: 7852 - RNA, 20 nt, synthetic construct
  source 1..20: mol_type = other RNA
aacgaaacagaaacacaggt

SEQ ID NO: 7853 - RNA, 20 nt, synthetic construct
  source 1..20: mol_type = other RNA
aaacagaaacacaggtggga

SEQ ID NO: 7854 - RNA, 20 nt, synthetic construct
  source 1..20: mol_type = other RNA
aggtgggaaggaactgactt

SEQ ID NO: 7855 - RNA, 20 nt, synthetic construct
  source 1..20: mol_type = other RNA
gggaaggaactgactttggt

SEQ ID NO: 7856 - RNA, 20 nt, synthetic construct
  source 1..20: mol_type = other RNA
aaggaactgactttggttgg

SEQ ID NO: 7857 - RNA, 20 nt, synthetic construct
  source 1..20: mol_type = other RNA
tggttggtggcctcactccc

SEQ ID NO: 7858 - RNA, 20 nt, synthetic construct
  source 1..20: mol_type = other RNA
gtggcctcactccccggccg

SEQ ID NO: 7859 - RNA, 20 nt, synthetic construct
  source 1..20: mol_type = other RNA
tggcctcactccccggccga

SEQ ID NO: 7860 - RNA, 20 nt, synthetic construct
  source 1..20: mol_type = other RNA
tagccctcggccggggagtg

SEQ ID NO: 7861 - RNA, 20 nt, synthetic construct
  source 1..20: mol_type = other RNA
cggccgagggctacccacgc

SEQ ID NO: 7862 - RNA, 20 nt, synthetic construct
  source 1..20: mol_type = other RNA
gcgtgggtagccctcggccg

SEQ ID NO: 7863 - RNA, 20 nt, synthetic construct
  source 1..20: mol_type = other RNA
tgcgtgggtagccctcggcc

SEQ ID NO: 7864 - RNA, 20 nt, synthetic construct
  source 1..20: mol_type = other RNA
ctgcgtgggtagccctcggc

SEQ ID NO: 7865 - RNA, 20 nt, synthetic construct
  source 1..20: mol_type = other RNA
tgtcctgcgtgggtagccct

SEQ ID NO: 7866 - RNA, 20 nt, synthetic construct
  source 1..20: mol_type = other RNA
gcaggacagtcgcctcgctc

SEQ ID NO: 7867 - RNA, 20 nt, synthetic construct
  source 1..20: mol_type = other RNA
agcgaggcgactgtcctgcg

SEQ ID NO: 7868 - RNA, 20 nt, synthetic construct
  source 1..20: mol_type = other RNA
tcgcctcgctccggatgcca

SEQ ID NO: 7869 - RNA, 20 nt, synthetic construct
  source 1..20: mol_type = other RNA
tgtccatggcatccggagcg

SEQ ID NO: 7870 - RNA, 20 nt, synthetic construct
  source 1..20: mol_type = other RNA
gtgtgtgtgtccatggcatc

SEQ ID NO: 7871 - RNA, 20 nt, synthetic construct
  source 1..20: mol_type = other RNA
catggacacacacacctcca

SEQ ID NO: 7872 - RNA, 20 nt, synthetic construct
  source 1..20: mol_type = other RNA
cgtggaggtgtgtgtgtcca

SEQ ID NO: 7873 - RNA, 20 nt, synthetic construct
  source 1..20: mol_type = other RNA
aaaagggaatagtgccgtgg

SEQ ID NO: 7874 - RNA, 20 nt, synthetic construct
  source 1..20: mol_type = other RNA
tgcaaaagggaatagtgccg

SEQ ID NO: 7875 - RNA, 20 nt, synthetic construct
  source 1..20: mol_type = other RNA
aagtgtttgcttgtgcaaaa

SEQ ID NO: 7876 - RNA, 20 nt, synthetic construct
  source 1..20: mol_type = other RNA
taagtgtttgcttgtgcaaa

SEQ ID NO: 7877 - RNA, 20 nt, synthetic construct
  source 1..20: mol_type = other RNA
aagcaaacacttacagagag

SEQ ID NO: 7878 - RNA, 20 nt, synthetic construct
  source 1..20: mol_type = other RNA
agagagcggctctcaattaa

SEQ ID NO: 7879 - RNA, 20 nt, synthetic construct
  source 1..20: mol_type = other RNA
ggctctcaattaaaggcttg

SEQ ID NO: 7880 - RNA, 20 nt, synthetic construct
  source 1..20: mol_type = other RNA
gctctcaattaaaggcttgt

SEQ ID NO: 7881 - RNA, 20 nt, synthetic construct
  source 1..20: mol_type = other RNA
ctctcaattaaaggcttgtg

SEQ ID NO: 7882 - RNA, 20 nt, synthetic construct
  source 1..20: mol_type = other RNA
tctcaattaaaggcttgtgg

SEQ ID NO: 7883 - RNA, 20 nt, synthetic construct
  source 1..20: mol_type = other RNA
caattaaaggcttgtggggg

SEQ ID NO: 7884 - RNA, 20 nt, synthetic construct
  source 1..20: mol_type = other RNA
aattaaaggcttgtggggga

SEQ ID NO: 7885 - RNA, 20 nt, synthetic construct
  source 1..20: mol_type = other RNA
aaaggcttgtgggggagggt

SEQ ID NO: 7886 - RNA, 20 nt, synthetic construct
  source 1..20: mol_type = other RNA
aaggcttgtgggggagggtc

SEQ ID NO: 7887 - RNA, 20 nt, synthetic construct
  source 1..20: mol_type = other RNA
aggcttgtgggggagggtcg

SEQ ID NO: 7888 - RNA, 20 nt, synthetic construct
  source 1..20: mol_type = other RNA
ggcttgtgggggagggtcgg

SEQ ID NO: 7889 - RNA, 20 nt, synthetic construct
  source 1..20: mol_type = other RNA
gcttgtgggggagggtcggg

SEQ ID NO: 7890 - RNA, 20 nt, synthetic construct
  source 1..20: mol_type = other RNA
agggtcggggggtctgttca

SEQ ID NO: 7891 - RNA, 20 nt, synthetic construct
  source 1..20: mol_type = other RNA
aggcaaagtcagtgccagcg

SEQ ID NO: 7892 - RNA, 20 nt, synthetic construct
  source 1..20: mol_type = other RNA
ggcaaagtcagtgccagcga

SEQ ID NO: 7893 - RNA, 20 nt, synthetic construct
  source 1..20: mol_type = other RNA
gcaaagtcagtgccagcgag

SEQ ID NO: 7894 - RNA, 20 nt, synthetic construct
  source 1..20: mol_type = other RNA
caaagtcagtgccagcgagg

SEQ ID NO: 7895 - RNA, 20 nt, synthetic construct
  source 1..20: mol_type = other RNA
agtcagtgccagcgaggggg

SEQ ID NO: 7896 - RNA, 20 nt, synthetic construct
  source 1..20: mol_type = other RNA
gtcagtgccagcgagggggt

SEQ ID NO: 7897 - RNA, 20 nt, synthetic construct
  source 1..20: mol_type = other RNA
gtgccagcgagggggtgggc

SEQ ID NO: 7898 - RNA, 20 nt, synthetic construct
  source 1..20: mol_type = other RNA
aggccggcccaccccctcgc

SEQ ID NO: 7899 - RNA, 20 nt, synthetic construct
  source 1..20: mol_type = other RNA
gggctggaggcgggcgaggc

SEQ ID NO: 7900 - RNA, 20 nt, synthetic construct
  source 1..20: mol_type = other RNA
cgcccgcctccagcccacgc

SEQ ID NO: 7901 - RNA, 20 nt, synthetic construct
  source 1..20: mol_type = other RNA
gcgtgggctggaggcgggcg

SEQ ID NO: 7902 - RNA, 20 nt, synthetic construct
  source 1..20: mol_type = other RNA
ggcctgcgtgggctggaggc

SEQ ID NO: 7903 - RNA, 20 nt, synthetic construct
  source 1..20: mol_type = other RNA
aggcctgcgtgggctggagg

SEQ ID NO: 7904 - RNA, 20 nt, synthetic construct
  source 1..20: mol_type = other RNA
cagcccacgcaggcctgccc

SEQ ID NO: 7905 - RNA, 20 nt, synthetic construct
  source 1..20: mol_type = other RNA
ggcaggcctgcgtgggctgg

SEQ ID NO: 7906 - RNA, 20 nt, synthetic construct
  source 1..20: mol_type = other RNA
cagggcaggcctgcgtgggc

SEQ ID NO: 7907 - RNA, 20 nt, synthetic construct
  source 1..20: mol_type = other RNA
gcaggcctgccctggcctcc

SEQ ID NO: 7908 - RNA, 20 nt, synthetic construct
  source 1..20: mol_type = other RNA
caggcctgccctggcctcct

SEQ ID NO: 7909 - RNA, 20 nt, synthetic construct
  source 1..20: mol_type = other RNA
ctgccctggcctcctgggag

SEQ ID NO: 7910 - RNA, 20 nt, synthetic construct
  source 1..20: mol_type = other RNA
tgccctggcctcctgggagc

SEQ ID NO: 7911 - RNA, 20 nt, synthetic construct
  source 1..20: mol_type = other RNA
cctggcctcctgggagcggg

SEQ ID NO: 7912 - RNA, 20 nt, synthetic construct
  source 1..20: mol_type = other RNA
cgcccgctcccaggaggcca

SEQ ID NO: 7913 - RNA, 20 nt, synthetic construct
  source 1..20: mol_type = other RNA
ccgcccgctcccaggaggcc

SEQ ID NO: 7914 - RNA, 20 nt, synthetic construct
  source 1..20: mol_type = other RNA
ctcctgggagcgggcggcga

SEQ ID NO: 7915 - RNA, 20 nt, synthetic construct
  source 1..20: mol_type = other RNA
tgggagcgggcggcgatggc

SEQ ID NO: 7916 - RNA, 20 nt, synthetic construct
  source 1..20: mol_type = other RNA
gggagcgggcggcgatggct

SEQ ID NO: 7917 - RNA, 20 nt, synthetic construct
  source 1..20: mol_type = other RNA
ggagcgggcggcgatggctg

SEQ ID NO: 7918 - RNA, 20 nt, synthetic construct
  source 1..20: mol_type = other RNA
agccatcgccgcccgctccc

SEQ ID NO: 7919 - RNA, 20 nt, synthetic construct
  source 1..20: mol_type = other RNA
gggcggcgatggctggggtg

SEQ ID NO: 7920 - RNA, 20 nt, synthetic construct
  source 1..20: mol_type = other RNA
ggcggcgatggctggggtgt

SEQ ID NO: 7921 - RNA, 20 nt, synthetic construct
  source 1..20: mol_type = other RNA
gcggcgatggctggggtgtg

SEQ ID NO: 7922 - RNA, 20 nt, synthetic construct
  source 1..20: mol_type = other RNA
ggggtgtggggaaagactcc

SEQ ID NO: 7923 - RNA, 20 nt, synthetic construct
  source 1..20: mol_type = other RNA
gtgtggggaaagactcccgg

SEQ ID NO: 7924 - RNA, 20 nt, synthetic construct
  source 1..20: mol_type = other RNA
tgtggggaaagactcccggc

SEQ ID NO: 7925 - RNA, 20 nt, synthetic construct
  source 1..20: mol_type = other RNA
gggaaagactcccggcgggc

SEQ ID NO: 7926 - RNA, 20 nt, synthetic construct
  source 1..20: mol_type = other RNA
ttcgtgatgtcctgcccgcc

SEQ ID NO: 7927 - RNA, 20 nt, synthetic construct
  source 1..20: mol_type = other RNA
gttcgtgatgtcctgcccgc

SEQ ID NO: 7928 - RNA, 20 nt, synthetic construct
  source 1..20: mol_type = other RNA
catcacgaacgtcacgttct

SEQ ID NO: 7929 - RNA, 20 nt, synthetic construct
  source 1..20: mol_type = other RNA
atcacgaacgtcacgttctt

SEQ ID NO: 7930 - RNA, 20 nt, synthetic construct
  source 1..20: mol_type = other RNA
tcacgaacgtcacgttcttg

SEQ ID NO: 7931 - RNA, 20 nt, synthetic construct
  source 1..20: mol_type = other RNA
tggggacagaaaaccagtca

SEQ ID NO: 7932 - RNA, 20 nt, synthetic construct
  source 1..20: mol_type = other RNA
ggacagaaaaccagtcacgg

SEQ ID NO: 7933 - RNA, 20 nt, synthetic construct
  source 1..20: mol_type = other RNA
atcgttgctgccgccgtgac

SEQ ID NO: 7934 - RNA, 20 nt, synthetic construct
  source 1..20: mol_type = other RNA
gtgtatactgtgtagacatt

SEQ ID NO: 7935 - RNA, 20 nt, synthetic construct
  source 1..20: mol_type = other RNA
aatgtctacacagtatacac

SEQ ID NO: 7936 - RNA, 20 nt, synthetic construct
  source 1..20: mol_type = other RNA
tatactgtgtagacatttgg

SEQ ID NO: 7937 - RNA, 20 nt, synthetic construct
  source 1..20: mol_type = other RNA
gtagacatttggcggagaga

SEQ ID NO: 7938 - RNA, 20 nt, synthetic construct
  source 1..20: mol_type = other RNA
tagacatttggcggagagaa

SEQ ID NO: 7939 - RNA, 20 nt, synthetic construct
  source 1..20: mol_type = other RNA
aagggcctctgccccgcatg

SEQ ID NO: 7940 - RNA, 20 nt, synthetic construct
  source 1..20: mol_type = other RNA
agggcctctgccccgcatgt

SEQ ID NO: 7941 - RNA, 20 nt, synthetic construct
  source 1..20: mol_type = other RNA
gggcctctgccccgcatgtg

SEQ ID NO: 7942 - RNA, 20 nt, synthetic construct
  source 1..20: mol_type = other RNA
tgccccgcatgtggggatgc

SEQ ID NO: 7943 - RNA, 20 nt, synthetic construct
  source 1..20: mol_type = other RNA
gccccgcatgtggggatgca

SEQ ID NO: 7944 - RNA, 20 nt, synthetic construct
  source 1..20: mol_type = other RNA
gcatgtggggatgcagggct

SEQ ID NO: 7945 - RNA, 20 nt, synthetic construct
  source 1..20: mol_type = other RNA
catgtggggatgcagggctt

SEQ ID NO: 7946 - RNA, 20 nt, synthetic construct
  source 1..20: mol_type = other RNA
agccctgcatccccacatgc

SEQ ID NO: 7947 - RNA, 20 nt, synthetic construct
  source 1..20: mol_type = other RNA
aagccctgcatccccacatg

SEQ ID NO: 7948 - RNA, 20 nt, synthetic construct
  source 1..20: mol_type = other RNA
atgcagggcttgggtccagc

SEQ ID NO: 7949 - RNA, 20 nt, synthetic construct
  source 1..20: mol_type = other RNA
gccggcacttgctcgtaaca

SEQ ID NO: 7950 - RNA, 20 nt, synthetic construct
  source 1..20: mol_type = other RNA
tgttacgagcaagtgccggc

SEQ ID NO: 7951 - RNA, 20 nt, synthetic construct
  source 1..20: mol_type = other RNA
gccttgttacgagcaagtgc

SEQ ID NO: 7952 - RNA, 20 nt, synthetic construct
  source 1..20: mol_type = other RNA
gtaacaaggcgtgtgctgag

SEQ ID NO: 7953 - RNA, 20 nt, synthetic construct
  source 1..20: mol_type = other RNA
tgctgagcggacgtcctgtg

SEQ ID NO: 7954 - RNA, 20 nt, synthetic construct
  source 1..20: mol_type = other RNA
gctgagcggacgtcctgtga

SEQ ID NO: 7955 - RNA, 20 nt, synthetic construct
  source 1..20: mol_type = other RNA
ctgagcggacgtcctgtgag

SEQ ID NO: 7956 - RNA, 20 nt, synthetic construct
  source 1..20: mol_type = other RNA
agcggacgtcctgtgagggg

SEQ ID NO: 7957 - RNA, 20 nt, synthetic construct
  source 1..20: mol_type = other RNA
ggacgtcctgtgaggggtgg

SEQ ID NO: 7958 - RNA, 20 nt, synthetic construct
  source 1..20: mol_type = other RNA
gacgtcctgtgaggggtggt

SEQ ID NO: 7959 - RNA, 20 nt, synthetic construct
  source 1..20: mol_type = other RNA
gtcctgtgaggggtggtggg

SEQ ID NO: 7960 - RNA, 20 nt, synthetic construct
  source 1..20: mol_type = other RNA
ctgtgaggggtggtgggtgg

SEQ ID NO: 7961 - RNA, 20 nt, synthetic construct
  source 1..20: mol_type = other RNA
tgtgaggggtggtgggtggc

SEQ ID NO: 7962 - RNA, 20 nt, synthetic construct
  source 1..20: mol_type = other RNA
cgccacccaccacccctcac

SEQ ID NO: 7963 - RNA, 20 nt, synthetic construct
  source 1..20: mol_type = other RNA
tggcgggacgtctgtccgac

SEQ ID NO: 7964 - RNA, 20 nt, synthetic construct
  source 1..20: mol_type = other RNA
cgtctgtccgactggccgta

SEQ ID NO: 7965 - RNA, 20 nt, synthetic construct
  source 1..20: mol_type = other RNA
cgactggccgtaaggcagac

SEQ ID NO: 7966 - RNA, 20 nt, synthetic construct
  source 1..20: mol_type = other RNA
ctgtctgccttacggccagt

SEQ ID NO: 7967 - RNA, 20 nt, synthetic construct
  source 1..20: mol_type = other RNA
tgcagagcctgtctgcctta

SEQ ID NO: 7968 - RNA, 20 nt, synthetic construct
  source 1..20: mol_type = other RNA
gcaatcctcagctgcccgtc

SEQ ID NO: 7969 - RNA, 20 nt, synthetic construct
  source 1..20: mol_type = other RNA
gctgcccgtcaggcctgccc

SEQ ID NO: 7970 - RNA, 20 nt, synthetic construct
  source 1..20: mol_type = other RNA
ctgcccgtcaggcctgcccc

SEQ ID NO: 7971 - RNA, 20 nt, synthetic construct
  source 1..20: mol_type = other RNA
atgcccggggcaggcctgac

SEQ ID NO: 7972 - RNA, 20 nt, synthetic construct
  source 1..20: mol_type = other RNA
tatgcccggggcaggcctga

SEQ ID NO: 7973 - RNA, 20 nt, synthetic construct
  source 1..20: mol_type = other RNA
ctgccccgggcatagcatgc

SEQ ID NO: 7974 - RNA, 20 nt, synthetic construct
  source 1..20: mol_type = other RNA
ccccgggcatagcatgcagg

SEQ ID NO: 7975 - RNA, 20 nt, synthetic construct
  source 1..20: mol_type = other RNA
cccgggcatagcatgcagga

SEQ ID NO: 7976 - RNA, 20 nt, synthetic construct
  source 1..20: mol_type = other RNA
cctcctgcatgctatgcccg

SEQ ID NO: 7977 - RNA, 20 nt, synthetic construct
  source 1..20: mol_type = other RNA
gcatagcatgcaggagggcc

SEQ ID NO: 7978 - RNA, 20 nt, synthetic construct
  source 1..20: mol_type = other RNA
gccctcctgcatgctatgcc

SEQ ID NO: 7979 - RNA, 20 nt, synthetic construct
  source 1..20: mol_type = other RNA
tgcaggagggccaggccctg

SEQ ID NO: 7980 - RNA, 20 nt, synthetic construct
  source 1..20: mol_type = other RNA
ccaggccctgaggcatcccc

SEQ ID NO: 7981 - RNA, 20 nt, synthetic construct
  source 1..20: mol_type = other RNA
ccaggggatgcctcagggcc

SEQ ID NO: 7982 - RNA, 20 nt, synthetic construct
  source 1..20: mol_type = other RNA
agcggccaggggatgcctca

SEQ ID NO: 7983 - RNA, 20 nt, synthetic construct
  source 1..20: mol_type = other RNA
cagcggccaggggatgcctc

SEQ ID NO: 7984 - RNA, 20 nt, synthetic construct
  source 1..20: mol_type = other RNA
gaggtgggatcagcggccag

SEQ ID NO: 7985 - RNA, 20 nt, synthetic construct
  source 1..20: mol_type = other RNA
ggaggtgggatcagcggcca

SEQ ID NO: 7986 - RNA, 20 nt, synthetic construct
  source 1..20: mol_type = other RNA
tggaggtgggatcagcggcc

SEQ ID NO: 7987 - RNA, 20 nt, synthetic construct
  source 1..20: mol_type = other RNA
ggtggtggaggtgggatcag

SEQ ID NO: 7988 - RNA, 20 nt, synthetic construct
  source 1..20: mol_type = other RNA
ttaggggcggtggtggaggt

SEQ ID NO: 7989 - RNA, 20 nt, synthetic construct
  source 1..20: mol_type = other RNA
gttaggggcggtggtggagg

SEQ ID NO: 7990 - RNA, 20 nt, synthetic construct
  source 1..20: mol_type = other RNA
caccaccgcccctaacacta

SEQ ID NO: 7991 - RNA, 20 nt, synthetic construct
  source 1..20: mol_type = other RNA
agtgttaggggcggtggtgg

SEQ ID NO: 7992 - RNA, 20 nt, synthetic construct
  source 1..20: mol_type = other RNA
catagtgttaggggcggtgg

SEQ ID NO: 7993 - RNA, 20 nt, synthetic construct
  source 1..20: mol_type = other RNA
ttccatagtgttaggggcgg

SEQ ID NO: 7994 - RNA, 20 nt, synthetic construct
  source 1..20: mol_type = other RNA
actttccatagtgttagggg

SEQ ID NO: 7995 - RNA, 20 nt, synthetic construct
  source 1..20: mol_type = other RNA
ttgactttccatagtgttag

SEQ ID NO: 7996 - RNA, 20 nt, synthetic construct
  source 1..20: mol_type = other RNA
attgactttccatagtgtta

SEQ ID NO: 7997 - RNA, 20 nt, synthetic construct
  source 1..20: mol_type = other RNA
cattgactttccatagtgtt

SEQ ID NO: 7998 - RNA, 20 nt, synthetic construct
  source 1..20: mol_type = other RNA
ggcttctgactttgattttc

SEQ ID NO: 7999 - RNA, 20 nt, synthetic construct
  source 1..20: mol_type = other RNA
atcaaagtcagaagccacct

SEQ ID NO: 8000 - RNA, 20 nt, synthetic construct
  source 1..20: mol_type = other RNA
cttttctgagcgcacctagg

SEQ ID NO: 8001 - RNA, 20 nt, synthetic construct
  source 1..20: mol_type = other RNA
aatcttttctgagcgcacct

SEQ ID NO: 8002 - RNA, 20 nt, synthetic construct
  source 1..20: mol_type = other RNA
atattgacaatagatcactc

SEQ ID NO: 8003 - RNA, 20 nt, synthetic construct
  source 1..20: mol_type = other RNA
actctggaaattcatgtcaa

SEQ ID NO: 8004 - RNA, 20 nt, synthetic construct
  source 1..20: mol_type = other RNA
tgtcaatggtagctgccatc

SEQ ID NO: 8005 - RNA, 20 nt, synthetic construct
  source 1..20: mol_type = other RNA
caatggtagctgccatctgg

SEQ ID NO: 8006 - RNA, 20 nt, synthetic construct
  source 1..20: mol_type = other RNA
agctgccatctggaggagaa

SEQ ID NO: 8007 - RNA, 20 nt, synthetic construct
  source 1..20: mol_type = other RNA
gccatctggaggagaaagga

SEQ ID NO: 8008 - RNA, 20 nt, synthetic construct
  source 1..20: mol_type = other RNA
atctggaggagaaaggaagg

SEQ ID NO: 8009 - RNA, 20 nt, synthetic construct
  source 1..20: mol_type = other RNA
tctggaggagaaaggaagga

SEQ ID NO: 8010 - RNA, 20 nt, synthetic construct
  source 1..20: mol_type = other RNA
tccttcctttctcctccaga

SEQ ID NO: 8011 - RNA, 20 nt, synthetic construct
  source 1..20: mol_type = other RNA
ccaccaggcctccagactca

SEQ ID NO: 8012 - RNA, 20 nt, synthetic construct
  source 1..20: mol_type = other RNA
gtgagtctggaggcctggtg

SEQ ID NO: 8013 - RNA, 20 nt, synthetic construct
  source 1..20: mol_type = other RNA
cgtgagtctggaggcctggt

SEQ ID NO: 8014 - RNA, 20 nt, synthetic construct
  source 1..20: mol_type = other RNA
ccgtgagtctggaggcctgg

SEQ ID NO: 8015 - RNA, 20 nt, synthetic construct
  source 1..20: mol_type = other RNA
cctccagactcacggcttcc

SEQ ID NO: 8016 - RNA, 20 nt, synthetic construct
  source 1..20: mol_type = other RNA
ccgggaagccgtgagtctgg

SEQ ID NO: 8017 - RNA, 20 nt, synthetic construct
  source 1..20: mol_type = other RNA
acgccgggaagccgtgagtc

SEQ ID NO: 8018 - RNA, 20 nt, synthetic construct
  source 1..20: mol_type = other RNA
ggagcaggagcgaagacgcc

SEQ ID NO: 8019 - RNA, 20 nt, synthetic construct
  source 1..20: mol_type = other RNA
gggagcaggagcgaagacgc

SEQ ID NO: 8020 - RNA, 20 nt, synthetic construct
  source 1..20: mol_type = other RNA
ttcgctcctgctcccgcttc

SEQ ID NO: 8021 - RNA, 20 nt, synthetic construct
  source 1..20: mol_type = other RNA
tcgctcctgctcccgcttcc

SEQ ID NO: 8022 - RNA, 20 nt, synthetic construct
  source 1..20: mol_type = other RNA
gttggcccggaagcgggagc

SEQ ID NO: 8023 - RNA, 20 nt, synthetic construct
  source 1..20: mol_type = other RNA
gagggagttggcccggaagc

SEQ ID NO: 8024 - RNA, 20 nt, synthetic construct
  source 1..20: mol_type = other RNA
tccgggccaactccctctgc

SEQ ID NO: 8025 - RNA, 20 nt, synthetic construct
  source 1..20: mol_type = other RNA
accagcagagggagttggcc

SEQ ID NO: 8026 - RNA, 20 nt, synthetic construct
  source 1..20: mol_type = other RNA
ctccctctgctggtccagca

SEQ ID NO: 8027 - RNA, 20 nt, synthetic construct
  source 1..20: mol_type = other RNA
gctggaccagcagagggagt

SEQ ID NO: 8028 - RNA, 20 nt, synthetic construct
  source 1..20: mol_type = other RNA
tctgctggtccagcatggac

SEQ ID NO: 8029 - RNA, 20 nt, synthetic construct
  source 1..20: mol_type = other RNA
ctgctggtccagcatggact

SEQ ID NO: 8030 - RNA, 20 nt, synthetic construct
  source 1..20: mol_type = other RNA
tgctggtccagcatggactg

SEQ ID NO: 8031 - RNA, 20 nt, synthetic construct
  source 1..20: mol_type = other RNA
agtccatgctggaccagcag

SEQ ID NO: 8032 - RNA, 20 nt, synthetic construct
  source 1..20: mol_type = other RNA
ggtccagcatggactggggc

SEQ ID NO: 8033 - RNA, 20 nt, synthetic construct
  source 1..20: mol_type = other RNA
gtccagcatggactggggct

SEQ ID NO: 8034 - RNA, 20 nt, synthetic construct
  source 1..20: mol_type = other RNA
ctcccagccccagtccatgc

SEQ ID NO: 8035 - RNA, 20 nt, synthetic construct
  source 1..20: mol_type = other RNA
tggactggggctgggagctc

SEQ ID NO: 8036 - RNA, 20 nt, synthetic construct
  source 1..20: mol_type = other RNA
ggactggggctgggagctct

SEQ ID NO: 8037 - RNA, 20 nt, synthetic construct
  source 1..20: mol_type = other RNA
ggctgggagctctgggcctg

SEQ ID NO: 8038 - RNA, 20 nt, synthetic construct
  source 1..20: mol_type = other RNA
gctgggagctctgggcctgt

SEQ ID NO: 8039 - RNA, 20 nt, synthetic construct
  source 1..20: mol_type = other RNA
ctgggagctctgggcctgtg

SEQ ID NO: 8040 - RNA, 20 nt, synthetic construct
  source 1..20: mol_type = other RNA
ggagctctgggcctgtgggg

SEQ ID NO: 8041 - RNA, 20 nt, synthetic construct
  source 1..20: mol_type = other RNA
gctctgggcctgtggggtgg

SEQ ID NO: 8042 - RNA, 20 nt, synthetic construct
  source 1..20: mol_type = other RNA
ctgggcctgtggggtggcgg

SEQ ID NO: 8043 - RNA, 20 nt, synthetic construct
  source 1..20: mol_type = other RNA
ggctgccgccgccaccccac

SEQ ID NO: 8044 - RNA, 20 nt, synthetic construct
  source 1..20: mol_type = other RNA
gcaacagcaagcagctgcgg

SEQ ID NO: 8045 - RNA, 20 nt, synthetic construct
  source 1..20: mol_type = other RNA
gcagcaacagcaagcagctg

SEQ ID NO: 8046 - RNA, 20 nt, synthetic construct
  source 1..20: mol_type = other RNA
gctgctgctgctgttgctcc

SEQ ID NO: 8047 - RNA, 20 nt, synthetic construct
  source 1..20: mol_type = other RNA
gcagcagcagcagcagcgcc

SEQ ID NO: 8048 - RNA, 20 nt, synthetic construct
  source 1..20: mol_type = other RNA
gctgctgctgctgctgctcc

SEQ ID NO: 8049 - RNA, 20 nt, synthetic construct
  source 1..20: mol_type = other RNA
ggcgccgacgtgcctcctca

SEQ ID NO: 8050 - RNA, 20 nt, synthetic construct
  source 1..20: mol_type = other RNA
gcgccgacgtgcctcctcat

SEQ ID NO: 8051 - RNA, 20 nt, synthetic construct
  source 1..20: mol_type = other RNA
tgaggaggcacgtcggcgcc

SEQ ID NO: 8052 - RNA, 20 nt, synthetic construct
  source 1..20: mol_type = other RNA
gtgcctcctcatgggcccgc

SEQ ID NO: 8053 - RNA, 20 nt, synthetic construct
  source 1..20: mol_type = other RNA
tgcctcctcatgggcccgcc

SEQ ID NO: 8054 - RNA, 20 nt, synthetic construct
  source 1..20: mol_type = other RNA
ggcccggcgggcccatgagg

SEQ ID NO: 8055 - RNA, 20 nt, synthetic construct
  source 1..20: mol_type = other RNA
gcaggcccggcgggcccatg

SEQ ID NO: 8056 - RNA, 20 nt, synthetic construct
  source 1..20: mol_type = other RNA
tgcgctggagcaggcccggc

SEQ ID NO: 8057 - RNA, 20 nt, synthetic construct
  source 1..20: mol_type = other RNA
atgcgctggagcaggcccgg

SEQ ID NO: 8058 - RNA, 20 nt, synthetic construct
  source 1..20: mol_type = other RNA
aggatgcgctggagcaggcc

SEQ ID NO: 8059 - RNA, 20 nt, synthetic construct
  source 1..20: mol_type = other RNA
ggacgaggatgcgctggagc

SEQ ID NO: 8060 - RNA, 20 nt, synthetic construct
  source 1..20: mol_type = other RNA
ccagcgcatcctcgtcctct

SEQ ID NO: 8061 - RNA, 20 nt, synthetic construct
  source 1..20: mol_type = other RNA
ccgagaggacgaggatgcgc

SEQ ID NO: 8062 - RNA, 20 nt, synthetic construct
  source 1..20: mol_type = other RNA
atcctcgtcctctcggctcc

SEQ ID NO: 8063 - RNA, 20 nt, synthetic construct
  source 1..20: mol_type = other RNA
tcctcgtcctctcggctcct

SEQ ID NO: 8064 - RNA, 20 nt, synthetic construct
  source 1..20: mol_type = other RNA
tcctctcggctcctgggcag

SEQ ID NO: 8065 - RNA, 20 nt, synthetic construct
  source 1..20: mol_type = other RNA
cctctcggctcctgggcaga

SEQ ID NO: 8066 - RNA, 20 nt, synthetic construct
  source 1..20: mol_type = other RNA
ccctctgcccaggagccgag

SEQ ID NO: 8067 - RNA, 20 nt, synthetic construct
  source 1..20: mol_type = other RNA
gcagagggtcccagtcagcc

SEQ ID NO: 8068 - RNA, 20 nt, synthetic construct
  source 1..20: mol_type = other RNA
gcgggtgtctgggtggggca

SEQ ID NO: 8069 - RNA, 20 nt, synthetic construct
  source 1..20: mol_type = other RNA
ggtgggcgggtgtctgggtg

SEQ ID NO: 8070 - RNA, 20 nt, synthetic construct
  source 1..20: mol_type = other RNA
aggtgggcgggtgtctgggt

SEQ ID NO: 8071 - RNA, 20 nt, synthetic construct
  source 1..20: mol_type = other RNA
gaggtgggcgggtgtctggg

SEQ ID NO: 8072 - RNA, 20 nt, synthetic construct
  source 1..20: mol_type = other RNA
catgaggtgggcgggtgtct

SEQ ID NO: 8073 - RNA, 20 nt, synthetic construct
  source 1..20: mol_type = other RNA
gcatgaggtgggcgggtgtc

SEQ ID NO: 8074 - RNA, 20 nt, synthetic construct
  source 1..20: mol_type = other RNA
caggagcgcatgaggtgggc

SEQ ID NO: 8075 - RNA, 20 nt, synthetic construct
  source 1..20: mol_type = other RNA
gcaggagcgcatgaggtggg

SEQ ID NO: 8076 - RNA, 20 nt, synthetic construct
  source 1..20: mol_type = other RNA
gcggcaggagcgcatgaggt

SEQ ID NO: 8077 - RNA, 20 nt, synthetic construct
  source 1..20: mol_type = other RNA
tgcggcaggagcgcatgagg

SEQ ID NO: 8078 - RNA, 20 nt, synthetic construct
  source 1..20: mol_type = other RNA
ggctgcggcaggagcgcatg

SEQ ID NO: 8079 - RNA, 20 nt, synthetic construct
  source 1..20: mol_type = other RNA
ggagaaggagcggctgcggc

SEQ ID NO: 8080 - RNA, 20 nt, synthetic construct
  source 1..20: mol_type = other RNA
agaaggagaaggagcggctg

SEQ ID NO: 8081 - RNA, 20 nt, synthetic construct
  source 1..20: mol_type = other RNA
acgctgagaaggagaaggag

SEQ ID NO: 8082 - RNA, 20 nt, synthetic construct
  source 1..20: mol_type = other RNA
cttctccttctcagcgtgct

SEQ ID NO: 8083 - RNA, 20 nt, synthetic construct
  source 1..20: mol_type = other RNA
cgagcacgctgagaaggaga

SEQ ID NO: 8084 - RNA, 20 nt, synthetic construct
  source 1..20: mol_type = other RNA
tcaggccgagcacgctgaga

SEQ ID NO: 8085 - RNA, 20 nt, synthetic construct
  source 1..20: mol_type = other RNA
cgtgctcggcctgagccttc

SEQ ID NO: 8086 - RNA, 20 nt, synthetic construct
  source 1..20: mol_type = other RNA
gtgctcggcctgagccttca

SEQ ID NO: 8087 - RNA, 20 nt, synthetic construct
  source 1..20: mol_type = other RNA
tgagaaggccctgaaggctc

SEQ ID NO: 8088 - RNA, 20 nt, synthetic construct
  source 1..20: mol_type = other RNA
ggagcgtgagaaggccctga

SEQ ID NO: 8089 - RNA, 20 nt, synthetic construct
  source 1..20: mol_type = other RNA
ggagaaagaggagcgtgaga

SEQ ID NO: 8090 - RNA, 20 nt, synthetic construct
  source 1..20: mol_type = other RNA
acgctcctctttctcccgag

SEQ ID NO: 8091 - RNA, 20 nt, synthetic construct
  source 1..20: mol_type = other RNA
cctctttctcccgagcggcg

SEQ ID NO: 8092 - RNA, 20 nt, synthetic construct
  source 1..20: mol_type = other RNA
ctttctcccgagcggcgcgg

SEQ ID NO: 8093 - RNA, 20 nt, synthetic construct
  source 1..20: mol_type = other RNA
ccgcgccgctcgggagaaag

SEQ ID NO: 8094 - RNA, 20 nt, synthetic construct
  source 1..20: mol_type = other RNA
gcagttccgccgcgccgctc

SEQ ID NO: 8095 - RNA, 20 nt, synthetic construct
  source 1..20: mol_type = other RNA
agcagttccgccgcgccgct

SEQ ID NO: 8096 - RNA, 20 nt, synthetic construct
  source 1..20: mol_type = other RNA
gaactgctcgaagctgtcgc

SEQ ID NO: 8097 - RNA, 20 nt, synthetic construct
  source 1..20: mol_type = other RNA
gaagctgtcgctggatgact

SEQ ID NO: 8098 - RNA, 20 nt, synthetic construct
  source 1..20: mol_type = other RNA
gtcgctggatgacttggctg

SEQ ID NO: 8099 - RNA, 20 nt, synthetic construct
  source 1..20: mol_type = other RNA
gctggatgacttggctgtgg

SEQ ID NO: 8100 - RNA, 20 nt, synthetic construct
  source 1..20: mol_type = other RNA
ggatgacttggctgtggagg

SEQ ID NO: 8101 - RNA, 20 nt, synthetic construct
  source 1..20: mol_type = other RNA
gatgacttggctgtggagga

SEQ ID NO: 8102 - RNA, 20 nt, synthetic construct
  source 1..20: mol_type = other RNA
atgacttggctgtggaggag

SEQ ID NO: 8103 - RNA, 20 nt, synthetic construct
  source 1..20: mol_type = other RNA
tgacttggctgtggaggagg

SEQ ID NO: 8104 - RNA, 20 nt, synthetic construct
  source 1..20: mol_type = other RNA
cttggctgtggaggaggggg

SEQ ID NO: 8105 - RNA, 20 nt, synthetic construct
  source 1..20: mol_type = other RNA
gctgtggaggagggggtggt

SEQ ID NO: 8106 - RNA, 20 nt, synthetic construct
  source 1..20: mol_type = other RNA
tggtcggatgcttctgcact

SEQ ID NO: 8107 - RNA, 20 nt, synthetic construct
  source 1..20: mol_type = other RNA
cggatgcttctgcactaggc

SEQ ID NO: 8108 - RNA, 20 nt, synthetic construct
  source 1..20: mol_type = other RNA
cttctgcactaggctggccc

SEQ ID NO: 8109 - RNA, 20 nt, synthetic construct
  source 1..20: mol_type = other RNA
aatcaagaacatgggctcct

SEQ ID NO: 8110 - RNA, 20 nt, synthetic construct
  source 1..20: mol_type = other RNA
agcccatgttcttgattttc

SEQ ID NO: 8111 - RNA, 20 nt, synthetic construct
  source 1..20: mol_type = other RNA
gacctgaaaatcaagaacat

SEQ ID NO: 8112 - RNA, 20 nt, synthetic construct
  source 1..20: mol_type = other RNA
ggacctgaaaatcaagaaca

SEQ ID NO: 8113 - RNA, 20 nt, synthetic construct
  source 1..20: mol_type = other RNA
tcaggtcctgcagaacagag

SEQ ID NO: 8114 - RNA, 20 nt, synthetic construct
  source 1..20: mol_type = other RNA
gtcctgcagaacagagaggt

SEQ ID NO: 8115 - RNA, 20 nt, synthetic construct
  source 1..20: mol_type = other RNA
tcctgcagaacagagaggtt

SEQ ID NO: 8116 - RNA, 20 nt, synthetic construct
  source 1..20: mol_type = other RNA
cctgcagaacagagaggttg

SEQ ID NO: 8117 - RNA, 20 nt, synthetic construct
  source 1..20: mol_type = other RNA
gcagaacagagaggttgggg

SEQ ID NO: 8118 - RNA, 20 nt, synthetic construct
  source 1..20: mol_type = other RNA
cagaacagagaggttggggt

SEQ ID NO: 8119 - RNA, 20 nt, synthetic construct
  source 1..20: mol_type = other RNA
ccccaacctctctgttctgc

SEQ ID NO: 8120 - RNA, 20 nt, synthetic construct
  source 1..20: mol_type = other RNA
aggttgggatggaggtccat

SEQ ID NO: 8121 - RNA, 20 nt, synthetic construct
  source 1..20: mol_type = other RNA
gacctccatcccaacctttt

SEQ ID NO: 8122 - RNA, 20 nt, synthetic construct
  source 1..20: mol_type = other RNA
acctccatcccaaccttttt

SEQ ID NO: 8123 - RNA, 20 nt, synthetic construct
  source 1..20: mol_type = other RNA
gcccaaaaaggttgggatgg

SEQ ID NO: 8124 - RNA, 20 nt, synthetic construct
  source 1..20: mol_type = other RNA
ccaacctttttgggcgcaac

SEQ ID NO: 8125 - RNA, 20 nt, synthetic construct
  source 1..20: mol_type = other RNA
cagttgcgcccaaaaaggtt

SEQ ID NO: 8126 - RNA, 20 nt, synthetic construct
  source 1..20: mol_type = other RNA
ccagttgcgcccaaaaaggt

SEQ ID NO: 8127 - RNA, 20 nt, synthetic construct
  source 1..20: mol_type = other RNA
ttgggcgcaactggagtctt

SEQ ID NO: 8128 - RNA, 20 nt, synthetic construct
  source 1..20: mol_type = other RNA
tgtttctgtttgtccttgtc

SEQ ID NO: 8129 - RNA, 20 nt, synthetic construct
  source 1..20: mol_type = other RNA
gtttctgtttgtccttgtca

SEQ ID NO: 8130 - RNA, 20 nt, synthetic construct
  source 1..20: mol_type = other RNA
tttctgtttgtccttgtcag

SEQ ID NO: 8131 - RNA, 20 nt, synthetic construct
  source 1..20: mol_type = other RNA
tgacaaggacaaacagaaac

SEQ ID NO: 8132 - RNA, 20 nt, synthetic construct
  source 1..20: mol_type = other RNA
ttgtccttgtcaggggcccc

SEQ ID NO: 8133 - RNA, 20 nt, synthetic construct
  source 1..20: mol_type = other RNA
tccttgtcaggggcccctgg

SEQ ID NO: 8134 - RNA, 20 nt, synthetic construct
  source 1..20: mol_type = other RNA
ttgtcaggggcccctggtgg

SEQ ID NO: 8135 - RNA, 20 nt, synthetic construct
  source 1..20: mol_type = other RNA
gccaccaggggcccctgaca

SEQ ID NO: 8136 - RNA, 20 nt, synthetic construct
  source 1..20: mol_type = other RNA
ggtggcggtgcgttctgctc

SEQ ID NO: 8137 - RNA, 20 nt, synthetic construct
  source 1..20: mol_type = other RNA
gtggcggtgcgttctgctct

SEQ ID NO: 8138 - RNA, 20 nt, synthetic construct
  source 1..20: mol_type = other RNA
tggcggtgcgttctgctctg

SEQ ID NO: 8139 - RNA, 20 nt, synthetic construct
  source 1..20: mol_type = other RNA
ggcggtgcgttctgctctgg

SEQ ID NO: 8140 - RNA, 20 nt, synthetic construct
  source 1..20: mol_type = other RNA
gtgcgttctgctctgggggc

SEQ ID NO: 8141 - RNA, 20 nt, synthetic construct
  source 1..20: mol_type = other RNA
tgctctgggggccggatcac

SEQ ID NO: 8142 - RNA, 20 nt, synthetic construct
  source 1..20: mol_type = other RNA
atgtcgggaggcctgtgatc

SEQ ID NO: 8143 - RNA, 20 nt, synthetic construct
  source 1..20: mol_type = other RNA
acaggcctcccgacatccac

SEQ ID NO: 8144 - RNA, 20 nt, synthetic construct
  source 1..20: mol_type = other RNA
tgaagcctgtggatgtcggg

SEQ ID NO: 8145 - RNA, 20 nt, synthetic construct
  source 1..20: mol_type = other RNA
acatccacaggcttcatttc

SEQ ID NO: 8146 - RNA, 20 nt, synthetic construct
  source 1..20: mol_type = other RNA
aaatgaagcctgtggatgtc

SEQ ID NO: 8147 - RNA, 20 nt, synthetic construct
  source 1..20: mol_type = other RNA
gaaatgaagcctgtggatgt

SEQ ID NO: 8148 - RNA, 20 nt, synthetic construct
  source 1..20: mol_type = other RNA
acaggcttcatttccggccc

SEQ ID NO: 8149 - RNA, 20 nt, synthetic construct
  source 1..20: mol_type = other RNA
agggccggaaatgaagcctg

SEQ ID NO: 8150 - RNA, 20 nt, synthetic construct
  source 1..20: mol_type = other RNA
ggccctggaacataaacagc

SEQ ID NO: 8151 - RNA, 20 nt, synthetic construct
  source 1..20: mol_type = other RNA
cctggaacataaacagccgg

SEQ ID NO: 8152 - RNA, 20 nt, synthetic construct
  source 1..20: mol_type = other RNA
ctggaacataaacagccggt

SEQ ID NO: 8153 - RNA, 20 nt, synthetic construct
  source 1..20: mol_type = other RNA
caccggctgtttatgttcca

SEQ ID NO: 8154 - RNA, 20 nt, synthetic construct
  source 1..20: mol_type = other RNA
ccaccggctgtttatgttcc

SEQ ID NO: 8155 - RNA, 20 nt, synthetic construct
  source 1..20: mol_type = other RNA
ggcagggagagcactcacgc

SEQ ID NO: 8156 - RNA, 20 nt, synthetic construct
  source 1..20: mol_type = other RNA
gcagggagagcactcacgct

SEQ ID NO: 8157 - RNA, 20 nt, synthetic construct
  source 1..20: mol_type = other RNA
cagggagagcactcacgctg

SEQ ID NO: 8158 - RNA, 20 nt, synthetic construct
  source 1..20: mol_type = other RNA
gagagcactcacgctggggc

SEQ ID NO: 8159 - RNA, 20 nt, synthetic construct
  source 1..20: mol_type = other RNA
agcactcacgctggggcagg

SEQ ID NO: 8160 - RNA, 20 nt, synthetic construct
  source 1..20: mol_type = other RNA
ctcacgctggggcaggtgga

SEQ ID NO: 8161 - RNA, 20 nt, synthetic construct
  source 1..20: mol_type = other RNA
tcacgctggggcaggtggac

SEQ ID NO: 8162 - RNA, 20 nt, synthetic construct
  source 1..20: mol_type = other RNA
cacgctggggcaggtggacg

SEQ ID NO: 8163 - RNA, 20 nt, synthetic construct
  source 1..20: mol_type = other RNA
acgctggggcaggtggacgg

SEQ ID NO: 8164 - RNA, 20 nt, synthetic construct
  source 1..20: mol_type = other RNA
acgggggccttgatgctctc

SEQ ID NO: 8165 - RNA, 20 nt, synthetic construct
  source 1..20: mol_type = other RNA
cgggggccttgatgctctcc

SEQ ID NO: 8166 - RNA, 20 nt, synthetic construct
  source 1..20: mol_type = other RNA
cttgatgctctccgggtgct

SEQ ID NO: 8167 - RNA, 20 nt, synthetic construct
  source 1..20: mol_type = other RNA
ttgatgctctccgggtgctt

SEQ ID NO: 8168 - RNA, 20 nt, synthetic construct
  source 1..20: mol_type = other RNA
tgatgctctccgggtgcttg

SEQ ID NO: 8169 - RNA, 20 nt, synthetic construct
  source 1..20: mol_type = other RNA
gatgctctccgggtgcttgg

SEQ ID NO: 8170 - RNA, 20 nt, synthetic construct
  source 1..20: mol_type = other RNA
atgctctccgggtgcttggg

SEQ ID NO: 8171 - RNA, 20 nt, synthetic construct
  source 1..20: mol_type = other RNA
tccgggtgcttggggggctc

SEQ ID NO: 8172 - RNA, 20 nt, synthetic construct
  source 1..20: mol_type = other RNA
gccggagccccccaagcacc

SEQ ID NO: 8173 - RNA, 20 nt, synthetic construct
  source 1..20: mol_type = other RNA
ggggggctccggccgcagcg

SEQ ID NO: 8174 - RNA, 20 nt, synthetic construct
  source 1..20: mol_type = other RNA
gggggctccggccgcagcga

SEQ ID NO: 8175 - RNA, 20 nt, synthetic construct
  source 1..20: mol_type = other RNA
ggggctccggccgcagcgag

SEQ ID NO: 8176 - RNA, 20 nt, synthetic construct
  source 1..20: mol_type = other RNA
cggccgcagcgaggggctga

SEQ ID NO: 8177 - RNA, 20 nt, synthetic construct
  source 1..20: mol_type = other RNA
ggccgcagcgaggggctgaa

SEQ ID NO: 8178 - RNA, 20 nt, synthetic construct
  source 1..20: mol_type = other RNA
cttcagcccctcgctgcggc

SEQ ID NO: 8179 - RNA, 20 nt, synthetic construct
  source 1..20: mol_type = other RNA
agcccttcagcccctcgctg

SEQ ID NO: 8180 - RNA, 20 nt, synthetic construct
  source 1..20: mol_type = other RNA
aggggctgaagggctcgctg

SEQ ID NO: 8181 - RNA, 20 nt, synthetic construct
  source 1..20: mol_type = other RNA
gaagggctcgctgcggatga

SEQ ID NO: 8182 - RNA, 20 nt, synthetic construct
  source 1..20: mol_type = other RNA
aagggctcgctgcggatgat

SEQ ID NO: 8183 - RNA, 20 nt, synthetic construct
  source 1..20: mol_type = other RNA
cgctgcggatgatgggtgag

SEQ ID NO: 8184 - RNA, 20 nt, synthetic construct
  source 1..20: mol_type = other RNA
tctcctccttcaccaccacg

SEQ ID NO: 8185 - RNA, 20 nt, synthetic construct
  source 1..20: mol_type = other RNA
ctcctccttcaccaccacga

SEQ ID NO: 8186 - RNA, 20 nt, synthetic construct
  source 1..20: mol_type = other RNA
tcctccttcaccaccacgag

SEQ ID NO: 8187 - RNA, 20 nt, synthetic construct
  source 1..20: mol_type = other RNA
ccttcaccaccacgaggggc

SEQ ID NO: 8188 - RNA, 20 nt, synthetic construct
  source 1..20: mol_type = other RNA
cttcaccaccacgaggggct

SEQ ID NO: 8189 - RNA, 20 nt, synthetic construct
  source 1..20: mol_type = other RNA
ttcaccaccacgaggggctg

SEQ ID NO: 8190 - RNA, 20 nt, synthetic construct
  source 1..20: mol_type = other RNA
ccagcccctcgtggtggtga

SEQ ID NO: 8191 - RNA, 20 nt, synthetic construct
  source 1..20: mol_type = other RNA
ccaccacgaggggctggggc

SEQ ID NO: 8192 - RNA, 20 nt, synthetic construct
  source 1..20: mol_type = other RNA
ccagccccagcccctcgtgg

SEQ ID NO: 8193 - RNA, 20 nt, synthetic construct
  source 1..20: mol_type = other RNA
gaggggctggggctggacca

SEQ ID NO: 8194 - RNA, 20 nt, synthetic construct
  source 1..20: mol_type = other RNA
ggtccagccccagcccctcg

SEQ ID NO: 8195 - RNA, 20 nt, synthetic construct
  source 1..20: mol_type = other RNA
gggctggggctggaccacgg

SEQ ID NO: 8196 - RNA, 20 nt, synthetic construct
  source 1..20: mol_type = other RNA
cggaggcagcacgcagctcc

SEQ ID NO: 8197 - RNA, 20 nt, synthetic construct
  source 1..20: mol_type = other RNA
ggaggcagcacgcagctcct

SEQ ID NO: 8198 - RNA, 20 nt, synthetic construct
  source 1..20: mol_type = other RNA
ggagctgcgtgctgcctccg

SEQ ID NO: 8199 - RNA, 20 nt, synthetic construct
  source 1..20: mol_type = other RNA
gcagcacgcagctcctggga

SEQ ID NO: 8200 - RNA, 20 nt, synthetic construct
  source 1..20: mol_type = other RNA
cgcagctcctgggatggcac

SEQ ID NO: 8201 - RNA, 20 nt, synthetic construct
  source 1..20: mol_type = other RNA
ctgggatggcacaggcacag

SEQ ID NO: 8202 - RNA, 20 nt, synthetic construct
  source 1..20: mol_type = other RNA
gatggcacaggcacagcggc

SEQ ID NO: 8203 - RNA, 20 nt, synthetic construct
  source 1..20: mol_type = other RNA
aacaggtaactggcagggct

SEQ ID NO: 8204 - RNA, 20 nt, synthetic construct
  source 1..20: mol_type = other RNA
aaacaggtaactggcagggc

SEQ ID NO: 8205 - RNA, 20 nt, synthetic construct
  source 1..20: mol_type = other RNA
ctgccagttacctgtttctt

SEQ ID NO: 8206 - RNA, 20 nt, synthetic construct
  source 1..20: mol_type = other RNA
taagaaacaggtaactggca

SEQ ID NO: 8207 - RNA, 20 nt, synthetic construct
  source 1..20: mol_type = other RNA
cagttacctgtttcttaggc

SEQ ID NO: 8208 - RNA, 20 nt, synthetic construct
  source 1..20: mol_type = other RNA
cagcctaagaaacaggtaac

SEQ ID NO: 8209 - RNA, 20 nt, synthetic construct
  source 1..20: mol_type = other RNA
aaacgtccagcctaagaaac

SEQ ID NO: 8210 - RNA, 20 nt, synthetic construct
  source 1..20: mol_type = other RNA
tcttaggctggacgttttgc

SEQ ID NO: 8211 - RNA, 20 nt, synthetic construct
  source 1..20: mol_type = other RNA
cttaggctggacgttttgct

SEQ ID NO: 8212 - RNA, 20 nt, synthetic construct
  source 1..20: mol_type = other RNA
ttaggctggacgttttgctg

SEQ ID NO: 8213 - RNA, 20 nt, synthetic construct
  source 1..20: mol_type = other RNA
ggctggacgttttgctgggg

SEQ ID NO: 8214 - RNA, 20 nt, synthetic construct
  source 1..20: mol_type = other RNA
cgttttgctggggtggagac

SEQ ID NO: 8215 - RNA, 20 nt, synthetic construct
  source 1..20: mol_type = other RNA
tttgctggggtggagactgg

SEQ ID NO: 8216 - RNA, 20 nt, synthetic construct
  source 1..20: mol_type = other RNA
ttgctggggtggagactggt

SEQ ID NO: 8217 - RNA, 20 nt, synthetic construct
  source 1..20: mol_type = other RNA
ggggtggagactggtgggtc

SEQ ID NO: 8218 - RNA, 20 nt, synthetic construct
  source 1..20: mol_type = other RNA
gagactggtgggtcaggctc

SEQ ID NO: 8219 - RNA, 20 nt, synthetic construct
  source 1..20: mol_type = other RNA
ggctctggaactgtgacatc

SEQ ID NO: 8220 - RNA, 20 nt, synthetic construct
  source 1..20: mol_type = other RNA
gctctggaactgtgacatct

SEQ ID NO: 8221 - RNA, 20 nt, synthetic construct
  source 1..20: mol_type = other RNA
ctctggaactgtgacatctg

SEQ ID NO: 8222 - RNA, 20 nt, synthetic construct
  source 1..20: mol_type = other RNA
tctggaactgtgacatctgg

SEQ ID NO: 8223 - RNA, 20 nt, synthetic construct
  source 1..20: mol_type = other RNA
ctggaactgtgacatctggg

SEQ ID NO: 8224 - RNA, 20 nt, synthetic construct
  source 1..20: mol_type = other RNA
tggggggaatgtatcataag

SEQ ID NO: 8225 - RNA, 20 nt, synthetic construct
  source 1..20: mol_type = other RNA
ggggggaatgtatcataagc

SEQ ID NO: 8226 - RNA, 20 nt, synthetic construct
  source 1..20: mol_type = other RNA
gggggaatgtatcataagcg

SEQ ID NO: 8227 - RNA, 20 nt, synthetic construct
  source 1..20: mol_type = other RNA
ggaatgtatcataagcgggg

SEQ ID NO: 8228 - RNA, 20 nt, synthetic construct
  source 1..20: mol_type = other RNA
gaatgtatcataagcgggga

SEQ ID NO: 8229 - RNA, 20 nt, synthetic construct
  source 1..20: mol_type = other RNA
aatgtatcataagcggggag

SEQ ID NO: 8230 - RNA, 20 nt, synthetic construct
  source 1..20: mol_type = other RNA
atgtatcataagcggggagg

SEQ ID NO: 8231 - RNA, 20 nt, synthetic construct
  source 1..20: mol_type = other RNA
taagcggggagggggcttcg

SEQ ID NO: 8232 - RNA, 20 nt, synthetic construct
  source 1..20: mol_type = other RNA
gcggggagggggcttcgcgg

SEQ ID NO: 8233 - RNA, 20 nt, synthetic construct
  source 1..20: mol_type = other RNA
gggcttcgcggaggtgacct

SEQ ID NO: 8234 - RNA, 20 nt, synthetic construct
  source 1..20: mol_type = other RNA
cgcggaggtgacctaggaga

SEQ ID NO: 8235 - RNA, 20 nt, synthetic construct
  source 1..20: mol_type = other RNA
gcggaggtgacctaggagaa

SEQ ID NO: 8236 - RNA, 20 nt, synthetic construct
  source 1..20: mol_type = other RNA
gtgacctaggagaagggaca

SEQ ID NO: 8237 - RNA, 20 nt, synthetic construct
  source 1..20: mol_type = other RNA
cattccttgtcccttctcct

SEQ ID NO: 8238 - RNA, 20 nt, synthetic construct
  source 1..20: mol_type = other RNA
tacgggtgaggaccacttac

SEQ ID NO: 8239 - RNA, 20 nt, synthetic construct
  source 1..20: mol_type = other RNA
ggaccacttaccggttgagt

SEQ ID NO: 8240 - RNA, 20 nt, synthetic construct
  source 1..20: mol_type = other RNA
gaccacttaccggttgagta

SEQ ID NO: 8241 - RNA, 20 nt, synthetic construct
  source 1..20: mol_type = other RNA
accacttaccggttgagtag

SEQ ID NO: 8242 - RNA, 20 nt, synthetic construct
  source 1..20: mol_type = other RNA
acccctactcaaccggtaag

SEQ ID NO: 8243 - RNA, 20 nt, synthetic construct
  source 1..20: mol_type = other RNA
ttgagtaggggtccgacttg

SEQ ID NO: 8244 - RNA, 20 nt, synthetic construct
  source 1..20: mol_type = other RNA
aagtcggacccctactcaac

SEQ ID NO: 8245 - RNA, 20 nt, synthetic construct
  source 1..20: mol_type = other RNA
aggggtccgacttgtggtgc

SEQ ID NO: 8246 - RNA, 20 nt, synthetic construct
  source 1..20: mol_type = other RNA
ggggtccgacttgtggtgcc

SEQ ID NO: 8247 - RNA, 20 nt, synthetic construct
  source 1..20: mol_type = other RNA
gggtccgacttgtggtgccg

SEQ ID NO: 8248 - RNA, 20 nt, synthetic construct
  source 1..20: mol_type = other RNA
acttgtggtgccggggtgaa

SEQ ID NO: 8249 - RNA, 20 nt, synthetic construct
  source 1..20: mol_type = other RNA
ttcaccccggcaccacaagt

SEQ ID NO: 8250 - RNA, 20 nt, synthetic construct
  source 1..20: mol_type = other RNA
tgtggtgccggggtgaatgg

SEQ ID NO: 8251 - RNA, 20 nt, synthetic construct
  source 1..20: mol_type = other RNA
gccggggtgaatggtggtgc

SEQ ID NO: 8252 - RNA, 20 nt, synthetic construct
  source 1..20: mol_type = other RNA
tccagcaccaccattcaccc

SEQ ID NO: 8253 - RNA, 20 nt, synthetic construct
  source 1..20: mol_type = other RNA
tggtgctggatgacttgctg

SEQ ID NO: 8254 - RNA, 20 nt, synthetic construct
  source 1..20: mol_type = other RNA
ctggatgacttgctgaggct

SEQ ID NO: 8255 - RNA, 20 nt, synthetic construct
  source 1..20: mol_type = other RNA
atgacttgctgaggcttggc

SEQ ID NO: 8256 - RNA, 20 nt, synthetic construct
  source 1..20: mol_type = other RNA
tgctgaggcttggcaggctg

SEQ ID NO: 8257 - RNA, 20 nt, synthetic construct
  source 1..20: mol_type = other RNA
tgaggcttggcaggctgcgg

SEQ ID NO: 8258 - RNA, 20 nt, synthetic construct
  source 1..20: mol_type = other RNA
gaggcttggcaggctgcggc

SEQ ID NO: 8259 - RNA, 20 nt, synthetic construct
  source 1..20: mol_type = other RNA
aggcttggcaggctgcggcg

SEQ ID NO: 8260 - RNA, 20 nt, synthetic construct
  source 1..20: mol_type = other RNA
ggcttggcaggctgcggcgg

SEQ ID NO: 8261 - RNA, 20 nt, synthetic construct
  source 1..20: mol_type = other RNA
ttggcaggctgcggcggggg

SEQ ID NO: 8262 - RNA, 20 nt, synthetic construct
  source 1..20: mol_type = other RNA
gctgcggcgggggtggctgc

SEQ ID NO: 8263 - RNA, 20 nt, synthetic construct
  source 1..20: mol_type = other RNA
ggcgggggtggctgctggcc

SEQ ID NO: 8264 - RNA, 20 nt, synthetic construct
  source 1..20: mol_type = other RNA
gcgggggtggctgctggcct

SEQ ID NO: 8265 - RNA, 20 nt, synthetic construct
  source 1..20: mol_type = other RNA
cgggggtggctgctggcctg

SEQ ID NO: 8266 - RNA, 20 nt, synthetic construct
  source 1..20: mol_type = other RNA
gggggtggctgctggcctgg

SEQ ID NO: 8267 - RNA, 20 nt, synthetic construct
  source 1..20: mol_type = other RNA
ggtggctgctggcctggggg

SEQ ID NO: 8268 - RNA, 20 nt, synthetic construct
  source 1..20: mol_type = other RNA
gctgctggcctgggggcgga

SEQ ID NO: 8269 - RNA, 20 nt, synthetic construct
  source 1..20: mol_type = other RNA
ctgctggcctgggggcggat

SEQ ID NO: 8270 - RNA, 20 nt, synthetic construct
  source 1..20: mol_type = other RNA
tgctggcctgggggcggatg

SEQ ID NO: 8271 - RNA, 20 nt, synthetic construct
  source 1..20: mol_type = other RNA
gctggcctgggggcggatgg

SEQ ID NO: 8272 - RNA, 20 nt, synthetic construct
  source 1..20: mol_type = other RNA
ctggcctgggggcggatggg

SEQ ID NO: 8273 - RNA, 20 nt, synthetic construct
  source 1..20: mol_type = other RNA
tggcctgggggcggatgggg

SEQ ID NO: 8274 - RNA, 20 nt, synthetic construct
  source 1..20: mol_type = other RNA
ggggcggatgggggggctgc

SEQ ID NO: 8275 - RNA, 20 nt, synthetic construct
  source 1..20: mol_type = other RNA
cagcccccccatccgccccc

SEQ ID NO: 8276 - RNA, 20 nt, synthetic construct
  source 1..20: mol_type = other RNA
gatgggggggctgctggccc

SEQ ID NO: 8277 - RNA, 20 nt, synthetic construct
  source 1..20: mol_type = other RNA
atgggggggctgctggccct

SEQ ID NO: 8278 - RNA, 20 nt, synthetic construct
  source 1..20: mol_type = other RNA
tgggggggctgctggccctg

SEQ ID NO: 8279 - RNA, 20 nt, synthetic construct
  source 1..20: mol_type = other RNA
gggggctgctggccctgggg

SEQ ID NO: 8280 - RNA, 20 nt, synthetic construct
  source 1..20: mol_type = other RNA
ggctgctggccctggggtgg

SEQ ID NO: 8281 - RNA, 20 nt, synthetic construct
  source 1..20: mol_type = other RNA
gctgctggccctggggtggc

SEQ ID NO: 8282 - RNA, 20 nt, synthetic construct
  source 1..20: mol_type = other RNA
ctgctggccctggggtggcg

SEQ ID NO: 8283 - RNA, 20 nt, synthetic construct
  source 1..20: mol_type = other RNA
tgctggccctggggtggcgg

SEQ ID NO: 8284 - RNA, 20 nt, synthetic construct
  source 1..20: mol_type = other RNA
cctggggtggcgggggctgt

SEQ ID NO: 8285 - RNA, 20 nt, synthetic construct
  source 1..20: mol_type = other RNA
caacagcccccgccacccca

SEQ ID NO: 8286 - RNA, 20 nt, synthetic construct
  source 1..20: mol_type = other RNA
ccaacagcccccgccacccc

SEQ ID NO: 8287 - RNA, 20 nt, synthetic construct
  source 1..20: mol_type = other RNA
gtggcgggggctgttggatg

SEQ ID NO: 8288 - RNA, 20 nt, synthetic construct
  source 1..20: mol_type = other RNA
tggcgggggctgttggatgt

SEQ ID NO: 8289 - RNA, 20 nt, synthetic construct
  source 1..20: mol_type = other RNA
cgggggctgttggatgtggg

SEQ ID NO: 8290 - RNA, 20 nt, synthetic construct
  source 1..20: mol_type = other RNA
gatgtgggtggaaaactgca

SEQ ID NO: 8291 - RNA, 20 nt, synthetic construct
  source 1..20: mol_type = other RNA
atgtgggtggaaaactgcat

SEQ ID NO: 8292 - RNA, 20 nt, synthetic construct
  source 1..20: mol_type = other RNA
ctgcatgggctgcaagtgca

SEQ ID NO: 8293 - RNA, 20 nt, synthetic construct
  source 1..20: mol_type = other RNA
tgcatgggctgcaagtgcac

SEQ ID NO: 8294 - RNA, 20 nt, synthetic construct
  source 1..20: mol_type = other RNA
ggctgcaagtgcacgggccg

SEQ ID NO: 8295 - RNA, 20 nt, synthetic construct
  source 1..20: mol_type = other RNA
tgcaagtgcacgggccgtgg

SEQ ID NO: 8296 - RNA, 20 nt, synthetic construct
  source 1..20: mol_type = other RNA
gcaagtgcacgggccgtgga

SEQ ID NO: 8297 - RNA, 20 nt, synthetic construct
  source 1..20: mol_type = other RNA
caagtgcacgggccgtggag

SEQ ID NO: 8298 - RNA, 20 nt, synthetic construct
  source 1..20: mol_type = other RNA
aagtgcacgggccgtggagg

SEQ ID NO: 8299 - RNA, 20 nt, synthetic construct
  source 1..20: mol_type = other RNA
gagggggctgatgctgctgc

SEQ ID NO: 8300 - RNA, 20 nt, synthetic construct
  source 1..20: mol_type = other RNA
agggggctgatgctgctgct

SEQ ID NO: 8301 - RNA, 20 nt, synthetic construct
  source 1..20: mol_type = other RNA
gggggctgatgctgctgctg

SEQ ID NO: 8302 - RNA, 20 nt, synthetic construct
  source 1..20: mol_type = other RNA
ggctgatgctgctgctgggg

SEQ ID NO: 8303 - RNA, 20 nt, synthetic construct
  source 1..20: mol_type = other RNA
tgatgctgctgctggggtgg

SEQ ID NO: 8304 - RNA, 20 nt, synthetic construct
  source 1..20: mol_type = other RNA
gctgctgctggggtggaggc

SEQ ID NO: 8305 - RNA, 20 nt, synthetic construct
  source 1..20: mol_type = other RNA
ctgctgctggggtggaggct

SEQ ID NO: 8306 - RNA, 20 nt, synthetic construct
  source 1..20: mol_type = other RNA
tgctgctggggtggaggctg

SEQ ID NO: 8307 - RNA, 20 nt, synthetic construct
  source 1..20: mol_type = other RNA
gctggggtggaggctggggc

SEQ ID NO: 8308 - RNA, 20 nt, synthetic construct
  source 1..20: mol_type = other RNA
ctggggtggaggctggggct

SEQ ID NO: 8309 - RNA, 20 nt, synthetic construct
  source 1..20: mol_type = other RNA
tggggtggaggctggggctg

SEQ ID NO: 8310 - RNA, 20 nt, synthetic construct
  source 1..20: mol_type = other RNA
ggtggaggctggggctgggg

SEQ ID NO: 8311 - RNA, 20 nt, synthetic construct
  source 1..20: mol_type = other RNA
ggaggctggggctggggtgg

SEQ ID NO: 8312 - RNA, 20 nt, synthetic construct
  source 1..20: mol_type = other RNA
gaggctggggctggggtggt

SEQ ID NO: 8313 - RNA, 20 nt, synthetic construct
  source 1..20: mol_type = other RNA
aggctggggctggggtggtg

SEQ ID NO: 8314 - RNA, 20 nt, synthetic construct
  source 1..20: mol_type = other RNA
ggctggggctggggtggtgg

SEQ ID NO: 8315 - RNA, 20 nt, synthetic construct
  source 1..20: mol_type = other RNA
tggggctggggtggtggggg

SEQ ID NO: 8316 - RNA, 20 nt, synthetic construct
  source 1..20: mol_type = other RNA
ggctggggtggtgggggtgg

SEQ ID NO: 8317 - RNA, 20 nt, synthetic construct
  source 1..20: mol_type = other RNA
tggggtggtgggggtggtgg

SEQ ID NO: 8318 - RNA, 20 nt, synthetic construct
  source 1..20: mol_type = other RNA
ctgcagctgctgctgcacag

SEQ ID NO: 8319 - RNA, 20 nt, synthetic construct
  source 1..20: mol_type = other RNA
tgcagctgctgctgcacaga

SEQ ID NO: 8320 - RNA, 20 nt, synthetic construct
  source 1..20: mol_type = other RNA
gcagctgctgctgcacagag

SEQ ID NO: 8321 - RNA, 20 nt, synthetic construct
  source 1..20: mol_type = other RNA
gctgctgctgcacagagggg

SEQ ID NO: 8322 - RNA, 20 nt, synthetic construct
  source 1..20: mol_type = other RNA
ctgctgctgcacagaggggt

SEQ ID NO: 8323 - RNA, 20 nt, synthetic construct
  source 1..20: mol_type = other RNA
tgctgctgcacagaggggtg

SEQ ID NO: 8324 - RNA, 20 nt, synthetic construct
  source 1..20: mol_type = other RNA
tgctgcacagaggggtgggg

SEQ ID NO: 8325 - RNA, 20 nt, synthetic construct
  source 1..20: mol_type = other RNA
gctgcacagaggggtggggt

SEQ ID NO: 8326 - RNA, 20 nt, synthetic construct
  source 1..20: mol_type = other RNA
ctgcacagaggggtggggtg

SEQ ID NO: 8327 - RNA, 20 nt, synthetic construct
  source 1..20: mol_type = other RNA
tgcacagaggggtggggtgg

SEQ ID NO: 8328 - RNA, 20 nt, synthetic construct
  source 1..20: mol_type = other RNA
acagaggggtggggtggggg

SEQ ID NO: 8329 - RNA, 20 nt, synthetic construct
  source 1..20: mol_type = other RNA
aggggtggggtgggggcggc

SEQ ID NO: 8330 - RNA, 20 nt, synthetic construct
  source 1..20: mol_type = other RNA
ggggtggggtgggggcggca

SEQ ID NO: 8331 - RNA, 20 nt, synthetic construct
  source 1..20: mol_type = other RNA
gggtggggtgggggcggcag

SEQ ID NO: 8332 - RNA, 20 nt, synthetic construct
  source 1..20: mol_type = other RNA
ggtggggtgggggcggcagg

SEQ ID NO: 8333 - RNA, 20 nt, synthetic construct
  source 1..20: mol_type = other RNA
gtggggtgggggcggcaggg

SEQ ID NO: 8334 - RNA, 20 nt, synthetic construct
  source 1..20: mol_type = other RNA
tggggtgggggcggcagggg

SEQ ID NO: 8335 - RNA, 20 nt, synthetic construct
  source 1..20: mol_type = other RNA
ggtgggggcggcaggggggg

SEQ ID NO: 8336 - RNA, 20 nt, synthetic construct
  source 1..20: mol_type = other RNA
gtgggggcggcagggggggt

SEQ ID NO: 8337 - RNA, 20 nt, synthetic construct
  source 1..20: mol_type = other RNA
tgggggcggcagggggggtg

SEQ ID NO: 8338 - RNA, 20 nt, synthetic construct
  source 1..20: mol_type = other RNA
gggggcggcagggggggtgg

SEQ ID NO: 8339 - RNA, 20 nt, synthetic construct
  source 1..20: mol_type = other RNA
gcggcagggggggtgggggc

SEQ ID NO: 8340 - RNA, 20 nt, synthetic construct
  source 1..20: mol_type = other RNA
cggcagggggggtgggggct

SEQ ID NO: 8341 - RNA, 20 nt, synthetic construct
  source 1..20: mol_type = other RNA
gggctgggactgcaccttca

SEQ ID NO: 8342 - RNA, 20 nt, synthetic construct
  source 1..20: mol_type = other RNA
tgggactgcaccttcacgga

SEQ ID NO: 8343 - RNA, 20 nt, synthetic construct
  source 1..20: mol_type = other RNA
gggactgcaccttcacggaa

SEQ ID NO: 8344 - RNA, 20 nt, synthetic construct
  source 1..20: mol_type = other RNA
accttcacggaagggagtag

SEQ ID NO: 8345 - RNA, 20 nt, synthetic construct
  source 1..20: mol_type = other RNA
acggaagggagtagcggcgt

SEQ ID NO: 8346 - RNA, 20 nt, synthetic construct
  source 1..20: mol_type = other RNA
cggaagggagtagcggcgta

SEQ ID NO: 8347 - RNA, 20 nt, synthetic construct
  source 1..20: mol_type = other RNA
ggaagggagtagcggcgtag

SEQ ID NO: 8348 - RNA, 20 nt, synthetic construct
  source 1..20: mol_type = other RNA
gaagggagtagcggcgtagg

SEQ ID NO: 8349 - RNA, 20 nt, synthetic construct
  source 1..20: mol_type = other RNA
gcaccttctgcagctgctgc

SEQ ID NO: 8350 - RNA, 20 nt, synthetic construct
  source 1..20: mol_type = other RNA
gtacctgcagcagctgcaga

SEQ ID NO: 8351 - RNA, 20 nt, synthetic construct
  source 1..20: mol_type = other RNA
caggtacagctgcatctgca

SEQ ID NO: 8352 - RNA, 20 nt, synthetic construct
  source 1..20: mol_type = other RNA
gtacagctgcatctgcatgg

SEQ ID NO: 8353 - RNA, 20 nt, synthetic construct
  source 1..20: mol_type = other RNA
gctgcatctgcatggaggtg

SEQ ID NO: 8354 - RNA, 20 nt, synthetic construct
  source 1..20: mol_type = other RNA
ctgcatctgcatggaggtga

SEQ ID NO: 8355 - RNA, 20 nt, synthetic construct
  source 1..20: mol_type = other RNA
tgcatctgcatggaggtgag

SEQ ID NO: 8356 - RNA, 20 nt, synthetic construct
  source 1..20: mol_type = other RNA
atctgcatggaggtgagggg

SEQ ID NO: 8357 - RNA, 20 nt, synthetic construct
  source 1..20: mol_type = other RNA
tctgcatggaggtgaggggt

SEQ ID NO: 8358 - RNA, 20 nt, synthetic construct
  source 1..20: mol_type = other RNA
ctgcatggaggtgaggggtg

SEQ ID NO: 8359 - RNA, 20 nt, synthetic construct
  source 1..20: mol_type = other RNA
atggaggtgaggggtggggc

SEQ ID NO: 8360 - RNA, 20 nt, synthetic construct
  source 1..20: mol_type = other RNA
gaggtgaggggtggggcagg

SEQ ID NO: 8361 - RNA, 20 nt, synthetic construct
  source 1..20: mol_type = other RNA
cttcatcctccagcagcact

SEQ ID NO: 8362 - RNA, 20 nt, synthetic construct
  source 1..20: mol_type = other RNA
ttcatcctccagcagcactt

SEQ ID NO: 8363 - RNA, 20 nt, synthetic construct
  source 1..20: mol_type = other RNA
tcatcctccagcagcacttg

SEQ ID NO: 8364 - RNA, 20 nt, synthetic construct
  source 1..20: mol_type = other RNA
catcctccagcagcacttgg

SEQ ID NO: 8365 - RNA, 20 nt, synthetic construct
  source 1..20: mol_type = other RNA
atcctccagcagcacttggg

SEQ ID NO: 8366 - RNA, 20 nt, synthetic construct
  source 1..20: mol_type = other RNA
tcctccagcagcacttgggg

SEQ ID NO: 8367 - RNA, 20 nt, synthetic construct
  source 1..20: mol_type = other RNA
ccagcagcacttgggggggt

SEQ ID NO: 8368 - RNA, 20 nt, synthetic construct
  source 1..20: mol_type = other RNA
cagcagcacttgggggggtt

SEQ ID NO: 8369 - RNA, 20 nt, synthetic construct
  source 1..20: mol_type = other RNA
acccccccaagtgctgctgg

SEQ ID NO: 8370 - RNA, 20 nt, synthetic construct
  source 1..20: mol_type = other RNA
ccaacccccccaagtgctgc

SEQ ID NO: 8371 - RNA, 20 nt, synthetic construct
  source 1..20: mol_type = other RNA
cacttgggggggttgggcca

SEQ ID NO: 8372 - RNA, 20 nt, synthetic construct
  source 1..20: mol_type = other RNA
acttgggggggttgggccat

SEQ ID NO: 8373 - RNA, 20 nt, synthetic construct
  source 1..20: mol_type = other RNA
cttgggggggttgggccatg

SEQ ID NO: 8374 - RNA, 20 nt, synthetic construct
  source 1..20: mol_type = other RNA
ttgggggggttgggccatgg

SEQ ID NO: 8375 - RNA, 20 nt, synthetic construct
  source 1..20: mol_type = other RNA
tgggggggttgggccatggg

SEQ ID NO: 8376 - RNA, 20 nt, synthetic construct
  source 1..20: mol_type = other RNA
ggttgggccatggggggctg

SEQ ID NO: 8377 - RNA, 20 nt, synthetic construct
  source 1..20: mol_type = other RNA
gttgggccatggggggctgt

SEQ ID NO: 8378 - RNA, 20 nt, synthetic construct
  source 1..20: mol_type = other RNA
ccatggggggctgtgggagc

SEQ ID NO: 8379 - RNA, 20 nt, synthetic construct
  source 1..20: mol_type = other RNA
catggggggctgtgggagca

SEQ ID NO: 8380 - RNA, 20 nt, synthetic construct
  source 1..20: mol_type = other RNA
atggggggctgtgggagcag

SEQ ID NO: 8381 - RNA, 20 nt, synthetic construct
  source 1..20: mol_type = other RNA
cctgctcccacagcccccca

SEQ ID NO: 8382 - RNA, 20 nt, synthetic construct
  source 1..20: mol_type = other RNA
gctgtgggagcaggggtgtt

SEQ ID NO: 8383 - RNA, 20 nt, synthetic construct
  source 1..20: mol_type = other RNA
ctgtgggagcaggggtgttt

SEQ ID NO: 8384 - RNA, 20 nt, synthetic construct
  source 1..20: mol_type = other RNA
gagcaggggtgtttgggtca

SEQ ID NO: 8385 - RNA, 20 nt, synthetic construct
  source 1..20: mol_type = other RNA
aggggtgtttgggtcaaggc

SEQ ID NO: 8386 - RNA, 20 nt, synthetic construct
  source 1..20: mol_type = other RNA
ttgggtcaaggctggtgaca

SEQ ID NO: 8387 - RNA, 20 nt, synthetic construct
  source 1..20: mol_type = other RNA
gtcaaggctggtgacacggc

SEQ ID NO: 8388 - RNA, 20 nt, synthetic construct
  source 1..20: mol_type = other RNA
tcaaggctggtgacacggct

SEQ ID NO: 8389 - RNA, 20 nt, synthetic construct
  source 1..20: mol_type = other RNA
caaggctggtgacacggctg

SEQ ID NO: 8390 - RNA, 20 nt, synthetic construct
  source 1..20: mol_type = other RNA
aaggctggtgacacggctgg

SEQ ID NO: 8391 - RNA, 20 nt, synthetic construct
  source 1..20: mol_type = other RNA
ctggtgacacggctgggggc

SEQ ID NO: 8392 - RNA, 20 nt, synthetic construct
  source 1..20: mol_type = other RNA
tggtgacacggctgggggcc

SEQ ID NO: 8393 - RNA, 20 nt, synthetic construct
  source 1..20: mol_type = other RNA
tgacacggctgggggccggg

SEQ ID NO: 8394 - RNA, 20 nt, synthetic construct
  source 1..20: mol_type = other RNA
gacacggctgggggccgggc

SEQ ID NO: 8395 - RNA, 20 nt, synthetic construct
  source 1..20: mol_type = other RNA
ggctgggggccgggcgggct

SEQ ID NO: 8396 - RNA, 20 nt, synthetic construct
  source 1..20: mol_type = other RNA
gctgggggccgggcgggctt

SEQ ID NO: 8397 - RNA, 20 nt, synthetic construct
  source 1..20: mol_type = other RNA
gggggccgggcgggcttggg

SEQ ID NO: 8398 - RNA, 20 nt, synthetic construct
  source 1..20: mol_type = other RNA
gccgggcgggcttgggaggc

SEQ ID NO: 8399 - RNA, 20 nt, synthetic construct
  source 1..20: mol_type = other RNA
ccgggcgggcttgggaggca

SEQ ID NO: 8400 - RNA, 20 nt, synthetic construct
  source 1..20: mol_type = other RNA
ccctgcctcccaagcccgcc

SEQ ID NO: 8401 - RNA, 20 nt, synthetic construct
  source 1..20: mol_type = other RNA
gggcttgggaggcagggcag

SEQ ID NO: 8402 - RNA, 20 nt, synthetic construct
  source 1..20: mol_type = other RNA
tgggaggcagggcagcggct

SEQ ID NO: 8403 - RNA, 20 nt, synthetic construct
  source 1..20: mol_type = other RNA
cagggcagcggctcggttgc

SEQ ID NO: 8404 - RNA, 20 nt, synthetic construct
  source 1..20: mol_type = other RNA
agggcagcggctcggttgct

SEQ ID NO: 8405 - RNA, 20 nt, synthetic construct
  source 1..20: mol_type = other RNA
gctcggttgctgggccgtga

SEQ ID NO: 8406 - RNA, 20 nt, synthetic construct
  source 1..20: mol_type = other RNA
tgctgggccgtgatggctgc

SEQ ID NO: 8407 - RNA, 20 nt, synthetic construct
  source 1..20: mol_type = other RNA
gctgggccgtgatggctgct

SEQ ID NO: 8408 - RNA, 20 nt, synthetic construct
  source 1..20: mol_type = other RNA
ctgggccgtgatggctgctg

SEQ ID NO: 8409 - RNA, 20 nt, synthetic construct
  source 1..20: mol_type = other RNA
cactaccccagcagccatca

SEQ ID NO: 8410 - RNA, 20 nt, synthetic construct
  source 1..20: mol_type = other RNA
ggtagtgcgttgtgcaaagc

SEQ ID NO: 8411 - RNA, 20 nt, synthetic construct
  source 1..20: mol_type = other RNA
gctggaagaacacaacaccg

SEQ ID NO: 8412 - RNA, 20 nt, synthetic construct
  source 1..20: mol_type = other RNA
ggaagaacacaacaccgagg

SEQ ID NO: 8413 - RNA, 20 nt, synthetic construct
  source 1..20: mol_type = other RNA
gccgtggcctgccccagtgt

SEQ ID NO: 8414 - RNA, 20 nt, synthetic construct
  source 1..20: mol_type = other RNA
agccgtggcctgccccagtg

SEQ ID NO: 8415 - RNA, 20 nt, synthetic construct
  source 1..20: mol_type = other RNA
ggggcaggccacggctcacc

SEQ ID NO: 8416 - RNA, 20 nt, synthetic construct
  source 1..20: mol_type = other RNA
gcaggccacggctcacctgg

SEQ ID NO: 8417 - RNA, 20 nt, synthetic construct
  source 1..20: mol_type = other RNA
tctctcctccaggtgagccg

SEQ ID NO: 8418 - RNA, 20 nt, synthetic construct
  source 1..20: mol_type = other RNA
gaggagagaccactgcgtgc

SEQ ID NO: 8419 - RNA, 20 nt, synthetic construct
  source 1..20: mol_type = other RNA
cacgcagtggtctctcctcc

SEQ ID NO: 8420 - RNA, 20 nt, synthetic construct
  source 1..20: mol_type = other RNA
ccactgcgtgctggttgaga

SEQ ID NO: 8421 - RNA, 20 nt, synthetic construct
  source 1..20: mol_type = other RNA
cactgcgtgctggttgagat

SEQ ID NO: 8422 - RNA, 20 nt, synthetic construct
  source 1..20: mol_type = other RNA
actgcgtgctggttgagatg

SEQ ID NO: 8423 - RNA, 20 nt, synthetic construct
  source 1..20: mol_type = other RNA
gcgtgctggttgagatgggg

SEQ ID NO: 8424 - RNA, 20 nt, synthetic construct
  source 1..20: mol_type = other RNA
tggggtggagtgctgtgctc

SEQ ID NO: 8425 - RNA, 20 nt, synthetic construct
  source 1..20: mol_type = other RNA
ggtggagtgctgtgctcagg

SEQ ID NO: 8426 - RNA, 20 nt, synthetic construct
  source 1..20: mol_type = other RNA
gagtgctgtgctcaggcggc

SEQ ID NO: 8427 - RNA, 20 nt, synthetic construct
  source 1..20: mol_type = other RNA
agtgctgtgctcaggcggct

SEQ ID NO: 8428 - RNA, 20 nt, synthetic construct
  source 1..20: mol_type = other RNA
gtgctgtgctcaggcggctg

SEQ ID NO: 8429 - RNA, 20 nt, synthetic construct
  source 1..20: mol_type = other RNA
tgtgctcaggcggctggggc

SEQ ID NO: 8430 - RNA, 20 nt, synthetic construct
  source 1..20: mol_type = other RNA
tcaggcggctggggcaggtg

SEQ ID NO: 8431 - RNA, 20 nt, synthetic construct
  source 1..20: mol_type = other RNA
caggcggctggggcaggtga

SEQ ID NO: 8432 - RNA, 20 nt, synthetic construct
  source 1..20: mol_type = other RNA
aggcggctggggcaggtgag

SEQ ID NO: 8433 - RNA, 20 nt, synthetic construct
  source 1..20: mol_type = other RNA
ggcggctggggcaggtgagg

SEQ ID NO: 8434 - RNA, 20 nt, synthetic construct
  source 1..20: mol_type = other RNA
ggcaggtgagggggcagctc

SEQ ID NO: 8435 - RNA, 20 nt, synthetic construct
  source 1..20: mol_type = other RNA
tgagggggcagctcaggctg

SEQ ID NO: 8436 - RNA, 20 nt, synthetic construct
  source 1..20: mol_type = other RNA
ggggcagctcaggctgcggc

SEQ ID NO: 8437 - RNA, 20 nt, synthetic construct
  source 1..20: mol_type = other RNA
gctcaggctgcggcaggtgc

SEQ ID NO: 8438 - RNA, 20 nt, synthetic construct
  source 1..20: mol_type = other RNA
aggctgcggcaggtgcagga

SEQ ID NO: 8439 - RNA, 20 nt, synthetic construct
  source 1..20: mol_type = other RNA
ggctgcggcaggtgcaggat

SEQ ID NO: 8440 - RNA, 20 nt, synthetic construct
  source 1..20: mol_type = other RNA
gcggcaggtgcaggatgggc

SEQ ID NO: 8441 - RNA, 20 nt, synthetic construct
  source 1..20: mol_type = other RNA
cggcaggtgcaggatgggct

SEQ ID NO: 8442 - RNA, 20 nt, synthetic construct
  source 1..20: mol_type = other RNA
gcaggatgggctgggtgaag

SEQ ID NO: 8443 - RNA, 20 nt, synthetic construct
  source 1..20: mol_type = other RNA
gggctgggtgaagtggccga

SEQ ID NO: 8444 - RNA, 20 nt, synthetic construct
  source 1..20: mol_type = other RNA
ggctgggtgaagtggccgat

SEQ ID NO: 8445 - RNA, 20 nt, synthetic construct
  source 1..20: mol_type = other RNA
gctgggtgaagtggccgatg

SEQ ID NO: 8446 - RNA, 20 nt, synthetic construct
  source 1..20: mol_type = other RNA
atggggtcaaagacgctgcc

SEQ ID NO: 8447 - RNA, 20 nt, synthetic construct
  source 1..20: mol_type = other RNA
tggggtcaaagacgctgcct

SEQ ID NO: 8448 - RNA, 20 nt, synthetic construct
  source 1..20: mol_type = other RNA
ggcagcgtctttgaccccat

SEQ ID NO: 8449 - RNA, 20 nt, synthetic construct
  source 1..20: mol_type = other RNA
caaagacgctgcctgggagc

SEQ ID NO: 8450 - RNA, 20 nt, synthetic construct
  source 1..20: mol_type = other RNA
aaagacgctgcctgggagct

SEQ ID NO: 8451 - RNA, 20 nt, synthetic construct
  source 1..20: mol_type = other RNA
aagacgctgcctgggagctg

SEQ ID NO: 8452 - RNA, 20 nt, synthetic construct
  source 1..20: mol_type = other RNA
tgcctgggagctggggctcc

SEQ ID NO: 8453 - RNA, 20 nt, synthetic construct
  source 1..20: mol_type = other RNA
tgggagctggggctccagga

SEQ ID NO: 8454 - RNA, 20 nt, synthetic construct
  source 1..20: mol_type = other RNA
gggagctggggctccaggac

SEQ ID NO: 8455 - RNA, 20 nt, synthetic construct
  source 1..20: mol_type = other RNA
gtcctggagccccagctccc

SEQ ID NO: 8456 - RNA, 20 nt, synthetic construct
  source 1..20: mol_type = other RNA
ggggctccaggacgggcacc

SEQ ID NO: 8457 - RNA, 20 nt, synthetic construct
  source 1..20: mol_type = other RNA
gggctccaggacgggcacct

SEQ ID NO: 8458 - RNA, 20 nt, synthetic construct
  source 1..20: mol_type = other RNA
ctccaggacgggcacctggg

SEQ ID NO: 8459 - RNA, 20 nt, synthetic construct
  source 1..20: mol_type = other RNA
tgccacccaggtgcccgtcc

SEQ ID NO: 8460 - RNA, 20 nt, synthetic construct
  source 1..20: mol_type = other RNA
gggcacctgggtggcaatga

SEQ ID NO: 8461 - RNA, 20 nt, synthetic construct
  source 1..20: mol_type = other RNA
ggcacctgggtggcaatgaa

SEQ ID NO: 8462 - RNA, 20 nt, synthetic construct
  source 1..20: mol_type = other RNA
acctgggtggcaatgaaggg

SEQ ID NO: 8463 - RNA, 20 nt, synthetic construct
  source 1..20: mol_type = other RNA
cctgggtggcaatgaagggt

SEQ ID NO: 8464 - RNA, 20 nt, synthetic construct
  source 1..20: mol_type = other RNA
ctgggtggcaatgaagggtg

SEQ ID NO: 8465 - RNA, 20 nt, synthetic construct
  source 1..20: mol_type = other RNA
tgggtggcaatgaagggtgg

SEQ ID NO: 8466 - RNA, 20 nt, synthetic construct
  source 1..20: mol_type = other RNA
cccacccttcattgccaccc

SEQ ID NO: 8467 - RNA, 20 nt, synthetic construct
  source 1..20: mol_type = other RNA
ggcaatgaagggtgggggcg

SEQ ID NO: 8468 - RNA, 20 nt, synthetic construct
  source 1..20: mol_type = other RNA
gggggcgaggacttcatcgc

SEQ ID NO: 8469 - RNA, 20 nt, synthetic construct
  source 1..20: mol_type = other RNA
ggggcgaggacttcatcgcc

SEQ ID NO: 8470 - RNA, 20 nt, synthetic construct
  source 1..20: mol_type = other RNA
gggcgaggacttcatcgccg

SEQ ID NO: 8471 - RNA, 20 nt, synthetic construct
  source 1..20: mol_type = other RNA
atcgccggggctgcctgctg

SEQ ID NO: 8472 - RNA, 20 nt, synthetic construct
  source 1..20: mol_type = other RNA
cggggctgcctgctgcggca

SEQ ID NO: 8473 - RNA, 20 nt, synthetic construct
  source 1..20: mol_type = other RNA
ggctgcctgctgcggcatgg

SEQ ID NO: 8474 - RNA, 20 nt, synthetic construct
  source 1..20: mol_type = other RNA
gctgcctgctgcggcatgga

SEQ ID NO: 8475 - RNA, 20 nt, synthetic construct
  source 1..20: mol_type = other RNA
gcctgctgcggcatggaggg

SEQ ID NO: 8476 - RNA, 20 nt, synthetic construct
  source 1..20: mol_type = other RNA
cctgctgcggcatggagggt

SEQ ID NO: 8477 - RNA, 20 nt, synthetic construct
  source 1..20: mol_type = other RNA
ctgctgcggcatggagggtg

SEQ ID NO: 8478 - RNA, 20 nt, synthetic construct
  source 1..20: mol_type = other RNA
tgctgcggcatggagggtgg

SEQ ID NO: 8479 - RNA, 20 nt, synthetic construct
  source 1..20: mol_type = other RNA
tgcggcatggagggtggggg

SEQ ID NO: 8480 - RNA, 20 nt, synthetic construct
  source 1..20: mol_type = other RNA
ggcatggagggtgggggagg

SEQ ID NO: 8481 - RNA, 20 nt, synthetic construct
  source 1..20: mol_type = other RNA
gcatggagggtgggggaggc

SEQ ID NO: 8482 - RNA, 20 nt, synthetic construct
  source 1..20: mol_type = other RNA
catggagggtgggggaggcg

SEQ ID NO: 8483 - RNA, 20 nt, synthetic construct
  source 1..20: mol_type = other RNA
atggagggtgggggaggcgg

SEQ ID NO: 8484 - RNA, 20 nt, synthetic construct
  source 1..20: mol_type = other RNA
gagggtgggggaggcggggg

SEQ ID NO: 8485 - RNA, 20 nt, synthetic construct
  source 1..20: mol_type = other RNA
ggtgggggaggcgggggtgg

SEQ ID NO: 8486 - RNA, 20 nt, synthetic construct
  source 1..20: mol_type = other RNA
ggcggctgctgttgctgctg

SEQ ID NO: 8487 - RNA, 20 nt, synthetic construct
  source 1..20: mol_type = other RNA
ggctgctgttgctgctgcgg

SEQ ID NO: 8488 - RNA, 20 nt, synthetic construct
  source 1..20: mol_type = other RNA
tgctgttgctgctgcggagg

SEQ ID NO: 8489 - RNA, 20 nt, synthetic construct
  source 1..20: mol_type = other RNA
tgttgctgctgcggaggtgg

SEQ ID NO: 8490 - RNA, 20 nt, synthetic construct
  source 1..20: mol_type = other RNA
tgctgctgcggaggtggagg

SEQ ID NO: 8491 - RNA, 20 nt, synthetic construct
  source 1..20: mol_type = other RNA
tgctgcggaggtggaggcgg

SEQ ID NO: 8492 - RNA, 20 nt, synthetic construct
  source 1..20: mol_type = other RNA
gctgcggaggtggaggcggt

SEQ ID NO: 8493 - RNA, 20 nt, synthetic construct
  source 1..20: mol_type = other RNA
ctgcggaggtggaggcggtg

SEQ ID NO: 8494 - RNA, 20 nt, synthetic construct
  source 1..20: mol_type = other RNA
tgcggaggtggaggcggtgg

SEQ ID NO: 8495 - RNA, 20 nt, synthetic construct
  source 1..20: mol_type = other RNA
gtggaggcggtgggggctgc

SEQ ID NO: 8496 - RNA, 20 nt, synthetic construct
  source 1..20: mol_type = other RNA
tggaggcggtgggggctgct

SEQ ID NO: 8497 - RNA, 20 nt, synthetic construct
  source 1..20: mol_type = other RNA
ggaggcggtgggggctgctg

SEQ ID NO: 8498 - RNA, 20 nt, synthetic construct
  source 1..20: mol_type = other RNA
ggcggtgggggctgctgggg

SEQ ID NO: 8499 - RNA, 20 nt, synthetic construct
  source 1..20: mol_type = other RNA
ggtgggggctgctggggagg

SEQ ID NO: 8500 - RNA, 20 nt, synthetic construct
  source 1..20: mol_type = other RNA
gtgggggctgctggggaggc

SEQ ID NO: 8501 - RNA, 20 nt, synthetic construct
  source 1..20: mol_type = other RNA
tgggggctgctggggaggcg

SEQ ID NO: 8502 - RNA, 20 nt, synthetic construct
  source 1..20: mol_type = other RNA
gggggctgctggggaggcgg

SEQ ID NO: 8503 - RNA, 20 nt, synthetic construct
  source 1..20: mol_type = other RNA
ggctgctggggaggcggggg

SEQ ID NO: 8504 - RNA, 20 nt, synthetic construct
  source 1..20: mol_type = other RNA
ggggaggcgggggcggctgc

SEQ ID NO: 8505 - RNA, 20 nt, synthetic construct
  source 1..20: mol_type = other RNA
gggaggcgggggcggctgct

SEQ ID NO: 8506 - RNA, 20 nt, synthetic construct
  source 1..20: mol_type = other RNA
ggaggcgggggcggctgctg

SEQ ID NO: 8507 - RNA, 20 nt, synthetic construct
  source 1..20: mol_type = other RNA
gggggcggctgctggggcac

SEQ ID NO: 8508 - RNA, 20 nt, synthetic construct
  source 1..20: mol_type = other RNA
ggctgctggggcacaggagc

SEQ ID NO: 8509 - RNA, 20 nt, synthetic construct
  source 1..20: mol_type = other RNA
gctgctggggcacaggagcc

SEQ ID NO: 8510 - RNA, 20 nt, synthetic construct
  source 1..20: mol_type = other RNA
ctgctggggcacaggagccg

SEQ ID NO: 8511 - RNA, 20 nt, synthetic construct
  source 1..20: mol_type = other RNA
gggcctgctgcatctgctga

SEQ ID NO: 8512 - RNA, 20 nt, synthetic construct
  source 1..20: mol_type = other RNA
tcagcagatgcagcaggccc

SEQ ID NO: 8513 - RNA, 20 nt, synthetic construct
  source 1..20: mol_type = other RNA
cctgctgcatctgctgatgg

SEQ ID NO: 8514 - RNA, 20 nt, synthetic construct
  source 1..20: mol_type = other RNA
ccaccatcagcagatgcagc

SEQ ID NO: 8515 - RNA, 20 nt, synthetic construct
  source 1..20: mol_type = other RNA
tctgctgatggtggtgatga

SEQ ID NO: 8516 - RNA, 20 nt, synthetic construct
  source 1..20: mol_type = other RNA
aagaaggtacatgggctcag

SEQ ID NO: 8517 - RNA, 20 nt, synthetic construct
  source 1..20: mol_type = other RNA
gaagaaggtacatgggctca

SEQ ID NO: 8518 - RNA, 20 nt, synthetic construct
  source 1..20: mol_type = other RNA
agaagaaggtacatgggctc

SEQ ID NO: 8519 - RNA, 20 nt, synthetic construct
  source 1..20: mol_type = other RNA
gggagcagaagaaggtacat

SEQ ID NO: 8520 - RNA, 20 nt, synthetic construct
  source 1..20: mol_type = other RNA
taccttcttctgctccctcc

SEQ ID NO: 8521 - RNA, 20 nt, synthetic construct
  source 1..20: mol_type = other RNA
accttcttctgctccctccc

SEQ ID NO: 8522 - RNA, 20 nt, synthetic construct
  source 1..20: mol_type = other RNA
ccttcttctgctccctcccg

SEQ ID NO: 8523 - RNA, 20 nt, synthetic construct
  source 1..20: mol_type = other RNA
ccccgggagggagcagaaga

SEQ ID NO: 8524 - RNA, 20 nt, synthetic construct
  source 1..20: mol_type = other RNA
aaagaaggggcaccccggga

SEQ ID NO: 8525 - RNA, 20 nt, synthetic construct
  source 1..20: mol_type = other RNA
aaaagaaggggcaccccggg

SEQ ID NO: 8526 - RNA, 20 nt, synthetic construct
  source 1..20: mol_type = other RNA
caaaaaagaaggggcacccc

SEQ ID NO: 8527 - RNA, 20 nt, synthetic construct
  source 1..20: mol_type = other RNA
tcaaaaaagaaggggcaccc

SEQ ID NO: 8528 - RNA, 20 nt, synthetic construct
  source 1..20: mol_type = other RNA
tgccccttcttttttgactt

SEQ ID NO: 8529 - RNA, 20 nt, synthetic construct
  source 1..20: mol_type = other RNA
ctccgaagtcaaaaaagaag

SEQ ID NO: 8530 - RNA, 20 nt, synthetic construct
  source 1..20: mol_type = other RNA
gctccgaagtcaaaaaagaa

SEQ ID NO: 8531 - RNA, 20 nt, synthetic construct
  source 1..20: mol_type = other RNA
ggctccgaagtcaaaaaaga

SEQ ID NO: 8532 - RNA, 20 nt, synthetic construct
  source 1..20: mol_type = other RNA
cttcggagccatctctgcag

SEQ ID NO: 8533 - RNA, 20 nt, synthetic construct
  source 1..20: mol_type = other RNA
tctctgcagaggaaaagaga

SEQ ID NO: 8534 - RNA, 20 nt, synthetic construct
  source 1..20: mol_type = other RNA
tctcttttcctctgcagaga

SEQ ID NO: 8535 - RNA, 20 nt, synthetic construct
  source 1..20: mol_type = other RNA
tagaaagggttacatgaaga

SEQ ID NO: 8536 - RNA, 20 nt, synthetic construct
  source 1..20: mol_type = other RNA
catgaagatggcctcaagta

SEQ ID NO: 8537 - RNA, 20 nt, synthetic construct
  source 1..20: mol_type = other RNA
taaagatcacaccgtacttg

SEQ ID NO: 8538 - RNA, 20 nt, synthetic construct
  source 1..20: mol_type = other RNA
tgttgagttgaagattgtca

SEQ ID NO: 8539 - RNA, 20 nt, synthetic construct
  source 1..20: mol_type = other RNA
cacaaatttcatctttacat

SEQ ID NO: 8540 - RNA, 20 nt, synthetic construct
  source 1..20: mol_type = other RNA
aatttcatctttacatagga

SEQ ID NO: 8541 - RNA, 20 nt, synthetic construct
  source 1..20: mol_type = other RNA
ggtggaatcagtgttttaat

SEQ ID NO: 8542 - RNA, 20 nt, synthetic construct
  source 1..20: mol_type = other RNA
gagtggggctggggggtggg

SEQ ID NO: 8543 - RNA, 20 nt, synthetic construct
  source 1..20: mol_type = other RNA
ctggagtggggctggggggt

SEQ ID NO: 8544 - RNA, 20 nt, synthetic construct
  source 1..20: mol_type = other RNA
ccccagccccactccagtga

SEQ ID NO: 8545 - RNA, 20 nt, synthetic construct
  source 1..20: mol_type = other RNA
cagccccactccagtgaagg

SEQ ID NO: 8546 - RNA, 20 nt, synthetic construct
  source 1..20: mol_type = other RNA
cttcactggagtggggctgg

SEQ ID NO: 8547 - RNA, 20 nt, synthetic construct
  source 1..20: mol_type = other RNA
ccttcactggagtggggctg

SEQ ID NO: 8548 - RNA, 20 nt, synthetic construct
  source 1..20: mol_type = other RNA
tccttcactggagtggggct

SEQ ID NO: 8549 - RNA, 20 nt, synthetic construct
  source 1..20: mol_type = other RNA
ctccttcactggagtggggc

SEQ ID NO: 8550 - RNA, 20 nt, synthetic construct
  source 1..20: mol_type = other RNA
cactccagtgaaggaggtaa

SEQ ID NO: 8551 - RNA, 20 nt, synthetic construct
  source 1..20: mol_type = other RNA
ttacctccttcactggagtg

SEQ ID NO: 8552 - RNA, 20 nt, synthetic construct
  source 1..20: mol_type = other RNA
tccagtgaaggaggtaatgg

SEQ ID NO: 8553 - RNA, 20 nt, synthetic construct
  source 1..20: mol_type = other RNA
ccagtgaaggaggtaatgga

SEQ ID NO: 8554 - RNA, 20 nt, synthetic construct
  source 1..20: mol_type = other RNA
gaaggaggtaatggagggta

SEQ ID NO: 8555 - RNA, 20 nt, synthetic construct
  source 1..20: mol_type = other RNA
aggtaatggagggtaaggtc

SEQ ID NO: 8556 - RNA, 20 nt, synthetic construct
  source 1..20: mol_type = other RNA
ggtaatggagggtaaggtca

SEQ ID NO: 8557 - RNA, 20 nt, synthetic construct
  source 1..20: mol_type = other RNA
ggagggtaaggtcagggcag

SEQ ID NO: 8558 - RNA, 20 nt, synthetic construct
  source 1..20: mol_type = other RNA
gtaaggtcagggcagaggag

SEQ ID NO: 8559 - RNA, 20 nt, synthetic construct
  source 1..20: mol_type = other RNA
gagtccccatctgcactgag

SEQ ID NO: 8560 - RNA, 20 nt, synthetic construct
  source 1..20: mol_type = other RNA
gcggccgctcagtgcagatg

SEQ ID NO: 8561 - RNA, 20 nt, synthetic construct
  source 1..20: mol_type = other RNA
ggcggccgctcagtgcagat

SEQ ID NO: 8562 - RNA, 20 nt, synthetic construct
  source 1..20: mol_type = other RNA
aggcggccgctcagtgcaga

SEQ ID NO: 8563 - RNA, 20 nt, synthetic construct
  source 1..20: mol_type = other RNA
gccgcctcccgcccctcctc

SEQ ID NO: 8564 - RNA, 20 nt, synthetic construct
  source 1..20: mol_type = other RNA
tcctgaggaggggcgggagg

SEQ ID NO: 8565 - RNA, 20 nt, synthetic construct
  source 1..20: mol_type = other RNA
gggtcctgaggaggggcggg

SEQ ID NO: 8566 - RNA, 20 nt, synthetic construct
  source 1..20: mol_type = other RNA
tgtgggtcctgaggaggggc

SEQ ID NO: 8567 - RNA, 20 nt, synthetic construct
  source 1..20: mol_type = other RNA
ctgtgggtcctgaggagggg

SEQ ID NO: 8568 - RNA, 20 nt, synthetic construct
  source 1..20: mol_type = other RNA
cctcaggacccacagccagc

SEQ ID NO: 8569 - RNA, 20 nt, synthetic construct
  source 1..20: mol_type = other RNA
ctggctgtgggtcctgagga

SEQ ID NO: 8570 - RNA, 20 nt, synthetic construct
  source 1..20: mol_type = other RNA
gctggctgtgggtcctgagg

SEQ ID NO: 8571 - RNA, 20 nt, synthetic construct
  source 1..20: mol_type = other RNA
ccagctggctgtgggtcctg

SEQ ID NO: 8572 - RNA, 20 nt, synthetic construct
  source 1..20: mol_type = other RNA
cacagccagctggtgcgtcg

SEQ ID NO: 8573 - RNA, 20 nt, synthetic construct
  source 1..20: mol_type = other RNA
tcgacgcaccagctggctgt

SEQ ID NO: 8574 - RNA, 20 nt, synthetic construct
  source 1..20: mol_type = other RNA
ctcgacgcaccagctggctg

SEQ ID NO: 8575 - RNA, 20 nt, synthetic construct
  source 1..20: mol_type = other RNA
ccagctggtgcgtcgaggcc

SEQ ID NO: 8576 - RNA, 20 nt, synthetic construct
  source 1..20: mol_type = other RNA
ctggtgcgtcgaggcccggc

SEQ ID NO: 8577 - RNA, 20 nt, synthetic construct
  source 1..20: mol_type = other RNA
ccgggcctcgacgcaccagc

SEQ ID NO: 8578 - RNA, 20 nt, synthetic construct
  source 1..20: mol_type = other RNA
ccggctggcacttcctgcac

SEQ ID NO: 8579 - RNA, 20 nt, synthetic construct
  source 1..20: mol_type = other RNA
gctggcacttcctgcacagg

SEQ ID NO: 8580 - RNA, 20 nt, synthetic construct
  source 1..20: mol_type = other RNA
ctgtgcaggaagtgccagcc

SEQ ID NO: 8581 - RNA, 20 nt, synthetic construct
  source 1..20: mol_type = other RNA
cctgtgcaggaagtgccagc

SEQ ID NO: 8582 - RNA, 20 nt, synthetic construct
  source 1..20: mol_type = other RNA
ttgttggcagcctcctgtgc

SEQ ID NO: 8583 - RNA, 20 nt, synthetic construct
  source 1..20: mol_type = other RNA
ggctgccaacaagaagtgag

SEQ ID NO: 8584 - RNA, 20 nt, synthetic construct
  source 1..20: mol_type = other RNA
gctgccaacaagaagtgagt

SEQ ID NO: 8585 - RNA, 20 nt, synthetic construct
  source 1..20: mol_type = other RNA
agtgcccactcacttcttgt

SEQ ID NO: 8586 - RNA, 20 nt, synthetic construct
  source 1..20: mol_type = other RNA
tgagtgggcactgtcctctc

SEQ ID NO: 8587 - RNA, 20 nt, synthetic construct
  source 1..20: mol_type = other RNA
ctgtcctctctggctgttcc

SEQ ID NO: 8588 - RNA, 20 nt, synthetic construct
  source 1..20: mol_type = other RNA
tgtcctctctggctgttcct

SEQ ID NO: 8589 - RNA, 20 nt, synthetic construct
  source 1..20: mol_type = other RNA
gtcctctctggctgttcctg

SEQ ID NO: 8590 - RNA, 20 nt, synthetic construct
  source 1..20: mol_type = other RNA
tgccccaggaacagccagag

SEQ ID NO: 8591 - RNA, 20 nt, synthetic construct
  source 1..20: mol_type = other RNA
gttcctggggcaccaagcac

SEQ ID NO: 8592 - RNA, 20 nt, synthetic construct
  source 1..20: mol_type = other RNA
tcacctgtgcttggtgcccc

SEQ ID NO: 8593 - RNA, 20 nt, synthetic construct
  source 1..20: mol_type = other RNA
cttaagctgtcacctgtgct

SEQ ID NO: 8594 - RNA, 20 nt, synthetic construct
  source 1..20: mol_type = other RNA
cctgaacgttctctgccaga

SEQ ID NO: 8595 - RNA, 20 nt, synthetic construct
  source 1..20: mol_type = other RNA
catctggcagagaacgttca

SEQ ID NO: 8596 - RNA, 20 nt, synthetic construct
  source 1..20: mol_type = other RNA
ccatctggcagagaacgttc

SEQ ID NO: 8597 - RNA, 20 nt, synthetic construct
  source 1..20: mol_type = other RNA
tctgccagatggaagcccca

SEQ ID NO: 8598 - RNA, 20 nt, synthetic construct
  source 1..20: mol_type = other RNA
ctgccagatggaagccccac

SEQ ID NO: 8599 - RNA, 20 nt, synthetic construct
  source 1..20: mol_type = other RNA
tggaagccccacgggcaaga

SEQ ID NO: 8600 - RNA, 20 nt, synthetic construct
  source 1..20: mol_type = other RNA
gccccacgggcaagaaggac

SEQ ID NO: 8601 - RNA, 20 nt, synthetic construct
  source 1..20: mol_type = other RNA
ccccacgggcaagaaggaca

SEQ ID NO: 8602 - RNA, 20 nt, synthetic construct
  source 1..20: mol_type = other RNA
ccctgtccttcttgcccgtg

SEQ ID NO: 8603 - RNA, 20 nt, synthetic construct
  source 1..20: mol_type = other RNA
accctgtccttcttgcccgt

SEQ ID NO: 8604 - RNA, 20 nt, synthetic construct
  source 1..20: mol_type = other RNA
ggcaagaaggacagggtccc

SEQ ID NO: 8605 - RNA, 20 nt, synthetic construct
  source 1..20: mol_type = other RNA
gacagggtccctggacagcg

SEQ ID NO: 8606 - RNA, 20 nt, synthetic construct
  source 1..20: mol_type = other RNA
ccctggacagcgaggttgaa

SEQ ID NO: 8607 - RNA, 20 nt, synthetic construct
  source 1..20: mol_type = other RNA
cctttcaacctcgctgtcca

SEQ ID NO: 8608 - RNA, 20 nt, synthetic construct
  source 1..20: mol_type = other RNA
tcctttcaacctcgctgtcc

SEQ ID NO: 8609 - RNA, 20 nt, synthetic construct
  source 1..20: mol_type = other RNA
cagcgaggttgaaaggaccc

SEQ ID NO: 8610 - RNA, 20 nt, synthetic construct
  source 1..20: mol_type = other RNA
cgaggttgaaaggaccctgg

SEQ ID NO: 8611 - RNA, 20 nt, synthetic construct
  source 1..20: mol_type = other RNA
aaaggaccctggaggagagc

SEQ ID NO: 8612 - RNA, 20 nt, synthetic construct
  source 1..20: mol_type = other RNA
cctggaggagagctggcttg

SEQ ID NO: 8613 - RNA, 20 nt, synthetic construct
  source 1..20: mol_type = other RNA
cacaagccagctctcctcca

SEQ ID NO: 8614 - RNA, 20 nt, synthetic construct
  source 1..20: mol_type = other RNA
ccacaagccagctctcctcc

SEQ ID NO: 8615 - RNA, 20 nt, synthetic construct
  source 1..20: mol_type = other RNA
ggagagctggcttgtggcta

SEQ ID NO: 8616 - RNA, 20 nt, synthetic construct
  source 1..20: mol_type = other RNA
gcgcacacacgtgtgcacat

SEQ ID NO: 8617 - RNA, 20 nt, synthetic construct
  source 1..20: mol_type = other RNA
cgcgcacacacgtgtgcaca

SEQ ID NO: 8618 - RNA, 20 nt, synthetic construct
  source 1..20: mol_type = other RNA
gtgcgcgtgcgtgcgtgtgt

SEQ ID NO: 8619 - RNA, 20 nt, synthetic construct
  source 1..20: mol_type = other RNA
tgcgcgtgcgtgcgtgtgtc

SEQ ID NO: 8620 - RNA, 20 nt, synthetic construct
  source 1..20: mol_type = other RNA
gcgcgtgcgtgcgtgtgtcg

SEQ ID NO: 8621 - RNA, 20 nt, synthetic construct
  source 1..20: mol_type = other RNA
cgcgtgcgtgcgtgtgtcgg

SEQ ID NO: 8622 - RNA, 20 nt, synthetic construct
  source 1..20: mol_type = other RNA
gtgtgtcgggggcagcatgc

SEQ ID NO: 8623 - RNA, 20 nt, synthetic construct
  source 1..20: mol_type = other RNA
gcagcatgcaggcccgacac

SEQ ID NO: 8624 - RNA, 20 nt, synthetic construct
  source 1..20: mol_type = other RNA
caggcccgacactggtaatc

SEQ ID NO: 8625 - RNA, 20 nt, synthetic construct
  source 1..20: mol_type = other RNA
gcagcctgattaccagtgtc

SEQ ID NO: 8626 - RNA, 20 nt, synthetic construct
  source 1..20: mol_type = other RNA
ggcagcctgattaccagtgt

SEQ ID NO: 8627 - RNA, 20 nt, synthetic construct
  source 1..20: mol_type = other RNA
ctggtaatcaggctgccatt

SEQ ID NO: 8628 - RNA, 20 nt, synthetic construct
  source 1..20: mol_type = other RNA
ttctgctttcttggaccaaa

SEQ ID NO: 8629 - RNA, 20 nt, synthetic construct
  source 1..20: mol_type = other RNA
ctgggaagattctgctttct

SEQ ID NO: 8630 - RNA, 20 nt, synthetic construct
  source 1..20: mol_type = other RNA
gctgctggcattgtctttct

SEQ ID NO: 8631 - RNA, 20 nt, synthetic construct
  source 1..20: mol_type = other RNA
agctgctggcattgtctttc

SEQ ID NO: 8632 - RNA, 20 nt, synthetic construct
  source 1..20: mol_type = other RNA
gcagctccccaattgtcctg

SEQ ID NO: 8633 - RNA, 20 nt, synthetic construct
  source 1..20: mol_type = other RNA
cagctccccaattgtcctgt

SEQ ID NO: 8634 - RNA, 20 nt, synthetic construct
  source 1..20: mol_type = other RNA
caggacaattggggagctgc

SEQ ID NO: 8635 - RNA, 20 nt, synthetic construct
  source 1..20: mol_type = other RNA
ccaattgtcctgtgggaatc

SEQ ID NO: 8636 - RNA, 20 nt, synthetic construct
  source 1..20: mol_type = other RNA
caattgtcctgtgggaatct

SEQ ID NO: 8637 - RNA, 20 nt, synthetic construct
  source 1..20: mol_type = other RNA
agattcccacaggacaattg

SEQ ID NO: 8638 - RNA, 20 nt, synthetic construct
  source 1..20: mol_type = other RNA
cagattcccacaggacaatt

SEQ ID NO: 8639 - RNA, 20 nt, synthetic construct
  source 1..20: mol_type = other RNA
ccagattcccacaggacaat

SEQ ID NO: 8640 - RNA, 20 nt, synthetic construct
  source 1..20: mol_type = other RNA
ctgtgggaatctgggcatga

SEQ ID NO: 8641 - RNA, 20 nt, synthetic construct
  source 1..20: mol_type = other RNA
cttcatgcccagattcccac

SEQ ID NO: 8642 - RNA, 20 nt, synthetic construct
  source 1..20: mol_type = other RNA
ctcctgcctgctcctgtctc

SEQ ID NO: 8643 - RNA, 20 nt, synthetic construct
  source 1..20: mol_type = other RNA
tgcctgctcctgtctcaggc

SEQ ID NO: 8644 - RNA, 20 nt, synthetic construct
  source 1..20: mol_type = other RNA
ctgctcctgtctcaggcagg

SEQ ID NO: 8645 - RNA, 20 nt, synthetic construct
  source 1..20: mol_type = other RNA
tgctcctgtctcaggcaggc

SEQ ID NO: 8646 - RNA, 20 nt, synthetic construct
  source 1..20: mol_type = other RNA
cgcctgcctgagacaggagc

SEQ ID NO: 8647 - RNA, 20 nt, synthetic construct
  source 1..20: mol_type = other RNA
cagtcccgcctgcctgagac

SEQ ID NO: 8648 - RNA, 20 nt, synthetic construct
  source 1..20: mol_type = other RNA
caggcaggcgggactgcaac

SEQ ID NO: 8649 - RNA, 20 nt, synthetic construct
  source 1..20: mol_type = other RNA
gactgcaacaggaacacatc

SEQ ID NO: 8650 - RNA, 20 nt, synthetic construct
  source 1..20: mol_type = other RNA
aacaggaacacatcaggcgc

SEQ ID NO: 8651 - RNA, 20 nt, synthetic construct
  source 1..20: mol_type = other RNA
acacatcaggcgcaggccaa

SEQ ID NO: 8652 - RNA, 20 nt, synthetic construct
  source 1..20: mol_type = other RNA
cacatcaggcgcaggccaaa

SEQ ID NO: 8653 - RNA, 20 nt, synthetic construct
  source 1..20: mol_type = other RNA
aactattctcagctgccctt

SEQ ID NO: 8654 - RNA, 20 nt, synthetic construct
  source 1..20: mol_type = other RNA
gcagctgagaatagtttgtt

SEQ ID NO: 8655 - RNA, 20 nt, synthetic construct
  source 1..20: mol_type = other RNA
tttggcaaacagagcttaac

SEQ ID NO: 8656 - RNA, 20 nt, synthetic construct
  source 1..20: mol_type = other RNA
aacagagcttaactggaagc

SEQ ID NO: 8657 - RNA, 20 nt, synthetic construct
  source 1..20: mol_type = other RNA
tggaagctggatgcccagaa

SEQ ID NO: 8658 - RNA, 20 nt, synthetic construct
  source 1..20: mol_type = other RNA
gaaaggatcaagagcagccc

SEQ ID NO: 8659 - RNA, 20 nt, synthetic construct
  source 1..20: mol_type = other RNA
ggctgctcttgatcctttct

SEQ ID NO: 8660 - RNA, 20 nt, synthetic construct
  source 1..20: mol_type = other RNA
gggctgctcttgatcctttc

SEQ ID NO: 8661 - RNA, 20 nt, synthetic construct
  source 1..20: mol_type = other RNA
gaactcctgagcatcaatgc

SEQ ID NO: 8662 - RNA, 20 nt, synthetic construct
  source 1..20: mol_type = other RNA
aactcctgagcatcaatgca

SEQ ID NO: 8663 - RNA, 20 nt, synthetic construct
  source 1..20: mol_type = other RNA
tgagcatcaatgcagggccc

SEQ ID NO: 8664 - RNA, 20 nt, synthetic construct
  source 1..20: mol_type = other RNA
gagcatcaatgcagggcccc

SEQ ID NO: 8665 - RNA, 20 nt, synthetic construct
  source 1..20: mol_type = other RNA
ggggccctgcattgatgctc

SEQ ID NO: 8666 - RNA, 20 nt, synthetic construct
  source 1..20: mol_type = other RNA
catcaatgcagggccccggg

SEQ ID NO: 8667 - RNA, 20 nt, synthetic construct
  source 1..20: mol_type = other RNA
tgcagggccccgggaggccc

SEQ ID NO: 8668 - RNA, 20 nt, synthetic construct
  source 1..20: mol_type = other RNA
ggccccgggaggccctggtg

SEQ ID NO: 8669 - RNA, 20 nt, synthetic construct
  source 1..20: mol_type = other RNA
cgggaggccctggtgaggcc

SEQ ID NO: 8670 - RNA, 20 nt, synthetic construct
  source 1..20: mol_type = other RNA
gggaggccctggtgaggcca

SEQ ID NO: 8671 - RNA, 20 nt, synthetic construct
  source 1..20: mol_type = other RNA
ggcctcaccagggcctcccg

SEQ ID NO: 8672 - RNA, 20 nt, synthetic construct
  source 1..20: mol_type = other RNA
tggcctcaccagggcctccc

SEQ ID NO: 8673 - RNA, 20 nt, synthetic construct
  source 1..20: mol_type = other RNA
ctggcctcaccagggcctcc

SEQ ID NO: 8674 - RNA, 20 nt, synthetic construct
  source 1..20: mol_type = other RNA
ggctagccctggcctcacca

SEQ ID NO: 8675 - RNA, 20 nt, synthetic construct
  source 1..20: mol_type = other RNA
gggctagccctggcctcacc

SEQ ID NO: 8676 - RNA, 20 nt, synthetic construct
  source 1..20: mol_type = other RNA
gtggaagcaggggctagccc

SEQ ID NO: 8677 - RNA, 20 nt, synthetic construct
  source 1..20: mol_type = other RNA
ccctgcttccacagcaaatc

SEQ ID NO: 8678 - RNA, 20 nt, synthetic construct
  source 1..20: mol_type = other RNA
cctgcttccacagcaaatct

SEQ ID NO: 8679 - RNA, 20 nt, synthetic construct
  source 1..20: mol_type = other RNA
ctgcttccacagcaaatctg

SEQ ID NO: 8680 - RNA, 20 nt, synthetic construct
  source 1..20: mol_type = other RNA
cagatttgctgtggaagcag

SEQ ID NO: 8681 - RNA, 20 nt, synthetic construct
  source 1..20: mol_type = other RNA
ccagatttgctgtggaagca

SEQ ID NO: 8682 - RNA, 20 nt, synthetic construct
  source 1..20: mol_type = other RNA
cccagatttgctgtggaagc

SEQ ID NO: 8683 - RNA, 20 nt, synthetic construct
  source 1..20: mol_type = other RNA
caactgccccagatttgctg

SEQ ID NO: 8684 - RNA, 20 nt, synthetic construct
  source 1..20: mol_type = other RNA
gttgcagctgctcaagccca

SEQ ID NO: 8685 - RNA, 20 nt, synthetic construct
  source 1..20: mol_type = other RNA
tgctcaagcccaaggagctg

SEQ ID NO: 8686 - RNA, 20 nt, synthetic construct
  source 1..20: mol_type = other RNA
gcagctctcctcagctcctt

SEQ ID NO: 8687 - RNA, 20 nt, synthetic construct
  source 1..20: mol_type = other RNA
ggcagctctcctcagctcct

SEQ ID NO: 8688 - RNA, 20 nt, synthetic construct
  source 1..20: mol_type = other RNA
ggagagctgccagagttccc

SEQ ID NO: 8689 - RNA, 20 nt, synthetic construct
  source 1..20: mol_type = other RNA
agctgccagagttcccaggc

SEQ ID NO: 8690 - RNA, 20 nt, synthetic construct
  source 1..20: mol_type = other RNA
tgccagagttcccaggcagg

SEQ ID NO: 8691 - RNA, 20 nt, synthetic construct
  source 1..20: mol_type = other RNA
gccagagttcccaggcaggt

SEQ ID NO: 8692 - RNA, 20 nt, synthetic construct
  source 1..20: mol_type = other RNA
ccagagttcccaggcaggtg

SEQ ID NO: 8693 - RNA, 20 nt, synthetic construct
  source 1..20: mol_type = other RNA
ccccacctgcctgggaactc

SEQ ID NO: 8694 - RNA, 20 nt, synthetic construct
  source 1..20: mol_type = other RNA
tgcaggctccccacctgcct

SEQ ID NO: 8695 - RNA, 20 nt, synthetic construct
  source 1..20: mol_type = other RNA
gtgcaggctccccacctgcc

SEQ ID NO: 8696 - RNA, 20 nt, synthetic construct
  source 1..20: mol_type = other RNA
aggtggggagcctgcaccca

SEQ ID NO: 8697 - RNA, 20 nt, synthetic construct
  source 1..20: mol_type = other RNA
ggtggggagcctgcacccaa

SEQ ID NO: 8698 - RNA, 20 nt, synthetic construct
  source 1..20: mol_type = other RNA
tgcacccaagggcttgccca

SEQ ID NO: 8699 - RNA, 20 nt, synthetic construct
  source 1..20: mol_type = other RNA
atgggcaagcccttgggtgc

SEQ ID NO: 8700 - RNA, 20 nt, synthetic construct
  source 1..20: mol_type = other RNA
atcaccatgggcaagccctt

SEQ ID NO: 8701 - RNA, 20 nt, synthetic construct
  source 1..20: mol_type = other RNA
tatcaccatgggcaagccct

SEQ ID NO: 8702 - RNA, 20 nt, synthetic construct
  source 1..20: mol_type = other RNA
tggaagtgggctatcaccat

SEQ ID NO: 8703 - RNA, 20 nt, synthetic construct
  source 1..20: mol_type = other RNA
ctggaagtgggctatcacca

SEQ ID NO: 8704 - RNA, 20 nt, synthetic construct
  source 1..20: mol_type = other RNA
ccacttccagttccagaaga

SEQ ID NO: 8705 - RNA, 20 nt, synthetic construct
  source 1..20: mol_type = other RNA
ttccagttccagaagaaggc

SEQ ID NO: 8706 - RNA, 20 nt, synthetic construct
  source 1..20: mol_type = other RNA
ccttcttctggaactggaag

SEQ ID NO: 8707 - RNA, 20 nt, synthetic construct
  source 1..20: mol_type = other RNA
ggcctgccttcttctggaac

SEQ ID NO: 8708 - RNA, 20 nt, synthetic construct
  source 1..20: mol_type = other RNA
ccagaagaaggcaggcctct

SEQ ID NO: 8709 - RNA, 20 nt, synthetic construct
  source 1..20: mol_type = other RNA
cctagaggcctgccttcttc

SEQ ID NO: 8710 - RNA, 20 nt, synthetic construct
  source 1..20: mol_type = other RNA
agattgtgggtgcttcctag

SEQ ID NO: 8711 - RNA, 20 nt, synthetic construct
  source 1..20: mol_type = other RNA
cacaatctacactttaaaaa

SEQ ID NO: 8712 - RNA, 20 nt, synthetic construct
  source 1..20: mol_type = other RNA
ttttttaaagtgtagattgt

SEQ ID NO: 8713 - RNA, 20 nt, synthetic construct
  source 1..20: mol_type = other RNA
cttttttaaagtgtagattg

SEQ ID NO: 8714 - RNA, 20 nt, synthetic construct
  source 1..20: mol_type = other RNA
gaactgcatctgcgtttcag

SEQ ID NO: 8715 - RNA, 20 nt, synthetic construct
  source 1..20: mol_type = other RNA
aaacgcagatgcagttcctc

SEQ ID NO: 8716 - RNA, 20 nt, synthetic construct
  source 1..20: mol_type = other RNA
aacgcagatgcagttcctca

SEQ ID NO: 8717 - RNA, 20 nt, synthetic construct
  source 1..20: mol_type = other RNA
acgcagatgcagttcctcag

SEQ ID NO: 8718 - RNA, 20 nt, synthetic construct
  source 1..20: mol_type = other RNA
ctcaggggacttttcatgtc

SEQ ID NO: 8719 - RNA, 20 nt, synthetic construct
  source 1..20: mol_type = other RNA
ctgacatgaaaagtcccctg

SEQ ID NO: 8720 - RNA, 20 nt, synthetic construct
  source 1..20: mol_type = other RNA
gcagttttctgctgagatgc

SEQ ID NO: 8721 - RNA, 20 nt, synthetic construct
  source 1..20: mol_type = other RNA
gctggatttgtgaccaaaaa

SEQ ID NO: 8722 - RNA, 20 nt, synthetic construct
  source 1..20: mol_type = other RNA
ctggatttgtgaccaaaaaa

SEQ ID NO: 8723 - RNA, 20 nt, synthetic construct
  source 1..20: mol_type = other RNA
atttgtgaccaaaaaagggc

SEQ ID NO: 8724 - RNA, 20 nt, synthetic construct
  source 1..20: mol_type = other RNA
aataaataccagcccttttt

SEQ ID NO: 8725 - RNA, 20 nt, synthetic construct
  source 1..20: mol_type = other RNA
aaaaagcctatttgtgtctc

SEQ ID NO: 8726 - RNA, 20 nt, synthetic construct
  source 1..20: mol_type = other RNA
aaaagcctatttgtgtctct

SEQ ID NO: 8727 - RNA, 20 nt, synthetic construct
  source 1..20: mol_type = other RNA
agcctatttgtgtctctggg

SEQ ID NO: 8728 - RNA, 20 nt, synthetic construct
  source 1..20: mol_type = other RNA
gcctatttgtgtctctggga

SEQ ID NO: 8729 - RNA, 20 nt, synthetic construct
  source 1..20: mol_type = other RNA
tttgtgtctctgggagggct

SEQ ID NO: 8730 - RNA, 20 nt, synthetic construct
  source 1..20: mol_type = other RNA
gccctcccagagacacaaat

SEQ ID NO: 8731 - RNA, 20 nt, synthetic construct
  source 1..20: mol_type = other RNA
ctgggagggcttggatgatg

SEQ ID NO: 8732 - RNA, 20 nt, synthetic construct
  source 1..20: mol_type = other RNA
cactcgcctgccccaacccc

SEQ ID NO: 8733 - RNA, 20 nt, synthetic construct
  source 1..20: mol_type = other RNA
actcgcctgccccaacccca

SEQ ID NO: 8734 - RNA, 20 nt, synthetic construct
  source 1..20: mol_type = other RNA
ctcgcctgccccaaccccag

SEQ ID NO: 8735 - RNA, 20 nt, synthetic construct
  source 1..20: mol_type = other RNA
acagcccctggggttggggc

SEQ ID NO: 8736 - RNA, 20 nt, synthetic construct
  source 1..20: mol_type = other RNA
gacgacagcccctggggttg

SEQ ID NO: 8737 - RNA, 20 nt, synthetic construct
  source 1..20: mol_type = other RNA
tgacgacagcccctggggtt

SEQ ID NO: 8738 - RNA, 20 nt, synthetic construct
  source 1..20: mol_type = other RNA
atgacgacagcccctggggt

SEQ ID NO: 8739 - RNA, 20 nt, synthetic construct
  source 1..20: mol_type = other RNA
caggggctgtcgtcattcta

SEQ ID NO: 8740 - RNA, 20 nt, synthetic construct
  source 1..20: mol_type = other RNA
aggggctgtcgtcattctaa

SEQ ID NO: 8741 - RNA, 20 nt, synthetic construct
  source 1..20: mol_type = other RNA
tagaatgacgacagcccctg

SEQ ID NO: 8742 - RNA, 20 nt, synthetic construct
  source 1..20: mol_type = other RNA
ttagaatgacgacagcccct

SEQ ID NO: 8743 - RNA, 20 nt, synthetic construct
  source 1..20: mol_type = other RNA
cttagaatgacgacagcccc

SEQ ID NO: 8744 - RNA, 20 nt, synthetic construct
  source 1..20: mol_type = other RNA
tcattctaagggactgaaga

SEQ ID NO: 8745 - RNA, 20 nt, synthetic construct
  source 1..20: mol_type = other RNA
cattctaagggactgaagac

SEQ ID NO: 8746 - RNA, 20 nt, synthetic construct
  source 1..20: mol_type = other RNA
attctaagggactgaagacg

SEQ ID NO: 8747 - RNA, 20 nt, synthetic construct
  source 1..20: mol_type = other RNA
acactgttaacaccagtcag

SEQ ID NO: 8748 - RNA, 20 nt, synthetic construct
  source 1..20: mol_type = other RNA
acaccagtcagaggtgtcca

SEQ ID NO: 8749 - RNA, 20 nt, synthetic construct
  source 1..20: mol_type = other RNA
caccagtcagaggtgtccat

SEQ ID NO: 8750 - RNA, 20 nt, synthetic construct
  source 1..20: mol_type = other RNA
accagtcagaggtgtccatg

SEQ ID NO: 8751 - RNA, 20 nt, synthetic construct
  source 1..20: mol_type = other RNA
gccccatggacacctctgac

SEQ ID NO: 8752 - RNA, 20 nt, synthetic construct
  source 1..20: mol_type = other RNA
tgtccatggggcagtccctg

SEQ ID NO: 8753 - RNA, 20 nt, synthetic construct
  source 1..20: mol_type = other RNA
gtccatggggcagtccctga

SEQ ID NO: 8754 - RNA, 20 nt, synthetic construct
  source 1..20: mol_type = other RNA
gaccctcagggactgcccca

SEQ ID NO: 8755 - RNA, 20 nt, synthetic construct
  source 1..20: mol_type = other RNA
agggtctgtgacaccctctc

SEQ ID NO: 8756 - RNA, 20 nt, synthetic construct
  source 1..20: mol_type = other RNA
agagggtgtcacagaccctc

SEQ ID NO: 8757 - RNA, 20 nt, synthetic construct
  source 1..20: mol_type = other RNA
ctgggctggtggaccagaga

SEQ ID NO: 8758 - RNA, 20 nt, synthetic construct
  source 1..20: mol_type = other RNA
tctgggctggtggaccagag

SEQ ID NO: 8759 - RNA, 20 nt, synthetic construct
  source 1..20: mol_type = other RNA
gtggggtgagtctgggctgg

SEQ ID NO: 8760 - RNA, 20 nt, synthetic construct
  source 1..20: mol_type = other RNA
gcccagactcaccccactag

SEQ ID NO: 8761 - RNA, 20 nt, synthetic construct
  source 1..20: mol_type = other RNA
ctagtggggtgagtctgggc

SEQ ID NO: 8762 - RNA, 20 nt, synthetic construct
  source 1..20: mol_type = other RNA
cagactcaccccactagagg

SEQ ID NO: 8763 - RNA, 20 nt, synthetic construct
  source 1..20: mol_type = other RNA
actcaccccactagaggagg

SEQ ID NO: 8764 - RNA, 20 nt, synthetic construct
  source 1..20: mol_type = other RNA
ctcaccccactagaggaggc

SEQ ID NO: 8765 - RNA, 20 nt, synthetic construct
  source 1..20: mol_type = other RNA
accccactagaggaggcggg

SEQ ID NO: 8766 - RNA, 20 nt, synthetic construct
  source 1..20: mol_type = other RNA
ccccactagaggaggcgggt

SEQ ID NO: 8767 - RNA, 20 nt, synthetic construct
  source 1..20: mol_type = other RNA
cccactagaggaggcgggtg

SEQ ID NO: 8768 - RNA, 20 nt, synthetic construct
  source 1..20: mol_type = other RNA
cccacccgcctcctctagtg

SEQ ID NO: 8769 - RNA, 20 nt, synthetic construct
  source 1..20: mol_type = other RNA
tagaggaggcgggtggggtg

SEQ ID NO: 8770 - RNA, 20 nt, synthetic construct
  source 1..20: mol_type = other RNA
accccacccgcctcctctag

SEQ ID NO: 8771 - RNA, 20 nt, synthetic construct
  source 1..20: mol_type = other RNA
aggaggcgggtggggtgagg

SEQ ID NO: 8772 - RNA, 20 nt, synthetic construct
  source 1..20: mol_type = other RNA
ggaggcgggtggggtgaggt

SEQ ID NO: 8773 - RNA, 20 nt, synthetic construct
  source 1..20: mol_type = other RNA
gaggcgggtggggtgaggtg

SEQ ID NO: 8774 - RNA, 20 nt, synthetic construct
  source 1..20: mol_type = other RNA
cgggtggggtgaggtggggt

SEQ ID NO: 8775 - RNA, 20 nt, synthetic construct
  source 1..20: mol_type = other RNA
gggtggggtgaggtggggtt

SEQ ID NO: 8776 - RNA, 20 nt, synthetic construct
  source 1..20: mol_type = other RNA
ggtggggtgaggtggggttg

SEQ ID NO: 8777 - RNA, 20 nt, synthetic construct
  source 1..20: mol_type = other RNA
gtggggtgaggtggggttgg

SEQ ID NO: 8778 - RNA, 20 nt, synthetic construct
  source 1..20: mol_type = other RNA
tggggtgaggtggggttggg

SEQ ID NO: 8779 - RNA, 20 nt, synthetic construct
  source 1..20: mol_type = other RNA
ggtggggttggggggatgat

SEQ ID NO: 8780 - RNA, 20 nt, synthetic construct
  source 1..20: mol_type = other RNA
ttggggggatgataggccca

SEQ ID NO: 8781 - RNA, 20 nt, synthetic construct
  source 1..20: mol_type = other RNA
aggcactggtgaagggcctt

SEQ ID NO: 8782 - RNA, 20 nt, synthetic construct
  source 1..20: mol_type = other RNA
gcccttcaccagtgcctgcc

SEQ ID NO: 8783 - RNA, 20 nt, synthetic construct
  source 1..20: mol_type = other RNA
ttcaccagtgcctgcctggc

SEQ ID NO: 8784 - RNA, 20 nt, synthetic construct
  source 1..20: mol_type = other RNA
gccaggcaggcactggtgaa

SEQ ID NO: 8785 - RNA, 20 nt, synthetic construct
  source 1..20: mol_type = other RNA
tgccaggcaggcactggtga

SEQ ID NO: 8786 - RNA, 20 nt, synthetic construct
  source 1..20: mol_type = other RNA
aggacctgccaggcaggcac

SEQ ID NO: 8787 - RNA, 20 nt, synthetic construct
  source 1..20: mol_type = other RNA
gtatgcaggacctgccaggc

SEQ ID NO: 8788 - RNA, 20 nt, synthetic construct
  source 1..20: mol_type = other RNA
tgcagtatgcaggacctgcc

SEQ ID NO: 8789 - RNA, 20 nt, synthetic construct
  source 1..20: mol_type = other RNA
aggtcctgcatactgcagcc

SEQ ID NO: 8790 - RNA, 20 nt, synthetic construct
  source 1..20: mol_type = other RNA
gcatactgcagcctggttcc

SEQ ID NO: 8791 - RNA, 20 nt, synthetic construct
  source 1..20: mol_type = other RNA
ggaaccaggctgcagtatgc

SEQ ID NO: 8792 - RNA, 20 nt, synthetic construct
  source 1..20: mol_type = other RNA
tactgcagcctggttccagg

SEQ ID NO: 8793 - RNA, 20 nt, synthetic construct
  source 1..20: mol_type = other RNA
ggaaagtacctcctggaacc

SEQ ID NO: 8794 - RNA, 20 nt, synthetic construct
  source 1..20: mol_type = other RNA
cacatagggaaagtacctcc

SEQ ID NO: 8795 - RNA, 20 nt, synthetic construct
  source 1..20: mol_type = other RNA
ccctatgtgacttgagaaga

SEQ ID NO: 8796 - RNA, 20 nt, synthetic construct
  source 1..20: mol_type = other RNA
tatgtgacttgagaagacgg

SEQ ID NO: 8797 - RNA, 20 nt, synthetic construct
  source 1..20: mol_type = other RNA
ccgtcttctcaagtcacata

SEQ ID NO: 8798 - RNA, 20 nt, synthetic construct
  source 1..20: mol_type = other RNA
tccgtcttctcaagtcacat

SEQ ID NO: 8799 - RNA, 20 nt, synthetic construct
  source 1..20: mol_type = other RNA
aagacggaggccaaagaaac

SEQ ID NO: 8800 - RNA, 20 nt, synthetic construct
  source 1..20: mol_type = other RNA
agacggaggccaaagaaact

SEQ ID NO: 8801 - RNA, 20 nt, synthetic construct
  source 1..20: mol_type = other RNA
gacggaggccaaagaaactg

SEQ ID NO: 8802 - RNA, 20 nt, synthetic construct
  source 1..20: mol_type = other RNA
gggcatttccccagtttctt

SEQ ID NO: 8803 - RNA, 20 nt, synthetic construct
  source 1..20: mol_type = other RNA
aaactggggaaatgcccacc

SEQ ID NO: 8804 - RNA, 20 nt, synthetic construct
  source 1..20: mol_type = other RNA
caccaggcaacttaagcttt

SEQ ID NO: 8805 - RNA, 20 nt, synthetic construct
  source 1..20: mol_type = other RNA
aaaagcttaagttgcctggt

SEQ ID NO: 8806 - RNA, 20 nt, synthetic construct
  source 1..20: mol_type = other RNA
caaaagcttaagttgcctgg

SEQ ID NO: 8807 - RNA, 20 nt, synthetic construct
  source 1..20: mol_type = other RNA
ttccaaaagcttaagttgcc

SEQ ID NO: 8808 - RNA, 20 nt, synthetic construct
  source 1..20: mol_type = other RNA
cttaagcttttggaaatgca

SEQ ID NO: 8809 - RNA, 20 nt, synthetic construct
  source 1..20: mol_type = other RNA
ttaagcttttggaaatgcac

SEQ ID NO: 8810 - RNA, 20 nt, synthetic construct
  source 1..20: mol_type = other RNA
ttggaaatgcacgggaacaa

SEQ ID NO: 8811 - RNA, 20 nt, synthetic construct
  source 1..20: mol_type = other RNA
cacgggaacaatggagacga

SEQ ID NO: 8812 - RNA, 20 nt, synthetic construct
  source 1..20: mol_type = other RNA
gggaacaatggagacgaagg

SEQ ID NO: 8813 - RNA, 20 nt, synthetic construct
  source 1..20: mol_type = other RNA
gaaggaggaaagactccaaa

SEQ ID NO: 8814 - RNA, 20 nt, synthetic construct
  source 1..20: mol_type = other RNA
tccaaaaggctcagagtcag

SEQ ID NO: 8815 - RNA, 20 nt, synthetic construct
  source 1..20: mol_type = other RNA
aaaaggctcagagtcagcgg

SEQ ID NO: 8816 - RNA, 20 nt, synthetic construct
  source 1..20: mol_type = other RNA
accgctgactctgagccttt

SEQ ID NO: 8817 - RNA, 20 nt, synthetic construct
  source 1..20: mol_type = other RNA
agcggtggctcgagccttac

SEQ ID NO: 8818 - RNA, 20 nt, synthetic construct
  source 1..20: mol_type = other RNA
gcggtggctcgagccttaca

SEQ ID NO: 8819 - RNA, 20 nt, synthetic construct
  source 1..20: mol_type = other RNA
cttctcactggtgccctgta

SEQ ID NO: 8820 - RNA, 20 nt, synthetic construct
  source 1..20: mol_type = other RNA
caccagtgagaagcatgctg

SEQ ID NO: 8821 - RNA, 20 nt, synthetic construct
  source 1..20: mol_type = other RNA
accagtgagaagcatgctgt

SEQ ID NO: 8822 - RNA, 20 nt, synthetic construct
  source 1..20: mol_type = other RNA
tcccacagcatgcttctcac

SEQ ID NO: 8823 - RNA, 20 nt, synthetic construct
  source 1..20: mol_type = other RNA
agagcctcactgagccttcc

SEQ ID NO: 8824 - RNA, 20 nt, synthetic construct
  source 1..20: mol_type = other RNA
gagcctcactgagccttcca

SEQ ID NO: 8825 - RNA, 20 nt, synthetic construct
  source 1..20: mol_type = other RNA
ctgagccttccagggtctag

SEQ ID NO: 8826 - RNA, 20 nt, synthetic construct
  source 1..20: mol_type = other RNA
caaggcctctagaccctgga

SEQ ID NO: 8827 - RNA, 20 nt, synthetic construct
  source 1..20: mol_type = other RNA
gaggcaaggcctctagaccc

SEQ ID NO: 8828 - RNA, 20 nt, synthetic construct
  source 1..20: mol_type = other RNA
gagtgggagctttagaggca

SEQ ID NO: 8829 - RNA, 20 nt, synthetic construct
  source 1..20: mol_type = other RNA
aaagctcccactccttatct

SEQ ID NO: 8830 - RNA, 20 nt, synthetic construct
  source 1..20: mol_type = other RNA
agctgtcctagataaggagt

SEQ ID NO: 8831 - RNA, 20 nt, synthetic construct
  source 1..20: mol_type = other RNA
gagctgtcctagataaggag

SEQ ID NO: 8832 - RNA, 20 nt, synthetic construct
  source 1..20: mol_type = other RNA
cttatctaggacagctctag

SEQ ID NO: 8833 - RNA, 20 nt, synthetic construct
  source 1..20: mol_type = other RNA
ctctagagctgtcctagata

SEQ ID NO: 8834 - RNA, 20 nt, synthetic construct
  source 1..20: mol_type = other RNA
acactgaacgagagctctcc

SEQ ID NO: 8835 - RNA, 20 nt, synthetic construct
  source 1..20: mol_type = other RNA
gagagctctcgttcagtgtg

SEQ ID NO: 8836 - RNA, 20 nt, synthetic construct
  source 1..20: mol_type = other RNA
cctggactgatgtcactgca

SEQ ID NO: 8837 - RNA, 20 nt, synthetic construct
  source 1..20: mol_type = other RNA
ccttgcagtgacatcagtcc

SEQ ID NO: 8838 - RNA, 20 nt, synthetic construct
  source 1..20: mol_type = other RNA
ctgatgtcactgcaaggttc

SEQ ID NO: 8839 - RNA, 20 nt, synthetic construct
  source 1..20: mol_type = other RNA
atgtcactgcaaggttcagg

SEQ ID NO: 8840 - RNA, 20 nt, synthetic construct
  source 1..20: mol_type = other RNA
tgtcactgcaaggttcagga

SEQ ID NO: 8841 - RNA, 20 nt, synthetic construct
  source 1..20: mol_type = other RNA
ggttcaggagggaagtagtt

SEQ ID NO: 8842 - RNA, 20 nt, synthetic construct
  source 1..20: mol_type = other RNA
gttcaggagggaagtagtta

SEQ ID NO: 8843 - RNA, 20 nt, synthetic construct
  source 1..20: mol_type = other RNA
gtccaaagtcccagaaaaag

SEQ ID NO: 8844 - RNA, 20 nt, synthetic construct
  source 1..20: mol_type = other RNA
tccaaagtcccagaaaaaga

SEQ ID NO: 8845 - RNA, 20 nt, synthetic construct
  source 1..20: mol_type = other RNA
aagtcccagaaaaagaggga

SEQ ID NO: 8846 - RNA, 20 nt, synthetic construct
  source 1..20: mol_type = other RNA
agtcccagaaaaagagggat

SEQ ID NO: 8847 - RNA, 20 nt, synthetic construct
  source 1..20: mol_type = other RNA
tccctctttttctgggactt

SEQ ID NO: 8848 - RNA, 20 nt, synthetic construct
  source 1..20: mol_type = other RNA
tgtcccatccctctttttct

SEQ ID NO: 8849 - RNA, 20 nt, synthetic construct
  source 1..20: mol_type = other RNA
ttgtcccatccctctttttc

SEQ ID NO: 8850 - RNA, 20 nt, synthetic construct
  source 1..20: mol_type = other RNA
acaaagagagaaaacatact

SEQ ID NO: 8851 - RNA, 20 nt, synthetic construct
  source 1..20: mol_type = other RNA
caaagagagaaaacatactt

SEQ ID NO: 8852 - RNA, 20 nt, synthetic construct
  source 1..20: mol_type = other RNA
aaagagagaaaacatacttg

SEQ ID NO: 8853 - RNA, 20 nt, synthetic construct
  source 1..20: mol_type = other RNA
gagaaaacatacttggggtc

SEQ ID NO: 8854 - RNA, 20 nt, synthetic construct
  source 1..20: mol_type = other RNA
caccacatgaatgcatgtgt

SEQ ID NO: 8855 - RNA, 20 nt, synthetic construct
  source 1..20: mol_type = other RNA
accacatgaatgcatgtgtt

SEQ ID NO: 8856 - RNA, 20 nt, synthetic construct
  source 1..20: mol_type = other RNA
ccacatgaatgcatgtgttg

SEQ ID NO: 8857 - RNA, 20 nt, synthetic construct
  source 1..20: mol_type = other RNA
ccccaacacatgcattcatg

SEQ ID NO: 8858 - RNA, 20 nt, synthetic construct
  source 1..20: mol_type = other RNA
ggggattgtcatcaccctcc

SEQ ID NO: 8859 - RNA, 20 nt, synthetic construct
  source 1..20: mol_type = other RNA
ggtgggtggcatctcctgga

SEQ ID NO: 8860 - RNA, 20 nt, synthetic construct
  source 1..20: mol_type = other RNA
aggagatgccacccacccag

SEQ ID NO: 8861 - RNA, 20 nt, synthetic construct
  source 1..20: mol_type = other RNA
tctgggtgggtggcatctcc

SEQ ID NO: 8862 - RNA, 20 nt, synthetic construct
  source 1..20: mol_type = other RNA
tctggggtcctctgggtggg

SEQ ID NO: 8863 - RNA, 20 nt, synthetic construct
  source 1..20: mol_type = other RNA
ccagaggaccccagagaacc

SEQ ID NO: 8864 - RNA, 20 nt, synthetic construct
  source 1..20: mol_type = other RNA
gttctctggggtcctctggg

SEQ ID NO: 8865 - RNA, 20 nt, synthetic construct
  source 1..20: mol_type = other RNA
aggaccccagagaaccagga

SEQ ID NO: 8866 - RNA, 20 nt, synthetic construct
  source 1..20: mol_type = other RNA
cctggttctctggggtcctc

SEQ ID NO: 8867 - RNA, 20 nt, synthetic construct
  source 1..20: mol_type = other RNA
ccccagagaaccaggaaggc

SEQ ID NO: 8868 - RNA, 20 nt, synthetic construct
  source 1..20: mol_type = other RNA
cccagagaaccaggaaggct

SEQ ID NO: 8869 - RNA, 20 nt, synthetic construct
  source 1..20: mol_type = other RNA
gagaaccaggaaggctgggc

SEQ ID NO: 8870 - RNA, 20 nt, synthetic construct
  source 1..20: mol_type = other RNA
cccagccttcctggttctct

SEQ ID NO: 8871 - RNA, 20 nt, synthetic construct
  source 1..20: mol_type = other RNA
gcccagccttcctggttctc

SEQ ID NO: 8872 - RNA, 20 nt, synthetic construct
  source 1..20: mol_type = other RNA
gaaggctgggcaggacagcc

SEQ ID NO: 8873 - RNA, 20 nt, synthetic construct
  source 1..20: mol_type = other RNA
gctgtcctgcccagccttcc

SEQ ID NO: 8874 - RNA, 20 nt, synthetic construct
  source 1..20: mol_type = other RNA
caggcagtctttacacagag

SEQ ID NO: 8875 - RNA, 20 nt, synthetic construct
  source 1..20: mol_type = other RNA
ctctctgtgtaaagactgcc

SEQ ID NO: 8876 - RNA, 20 nt, synthetic construct
  source 1..20: mol_type = other RNA
agtctttacacagagaggcc

SEQ ID NO: 8877 - RNA, 20 nt, synthetic construct
  source 1..20: mol_type = other RNA
gtctttacacagagaggcct

SEQ ID NO: 8878 - RNA, 20 nt, synthetic construct
  source 1..20: mol_type = other RNA
tttacacagagaggcctggg

SEQ ID NO: 8879 - RNA, 20 nt, synthetic construct
  source 1..20: mol_type = other RNA
cacagagaggcctgggcggc

SEQ ID NO: 8880 - RNA, 20 nt, synthetic construct
  source 1..20: mol_type = other RNA
agaggcctgggcggctggcc

SEQ ID NO: 8881 - RNA, 20 nt, synthetic construct
  source 1..20: mol_type = other RNA
gcctgggcggctggccaggc

SEQ ID NO: 8882 - RNA, 20 nt, synthetic construct
  source 1..20: mol_type = other RNA
gcctgcctggccagccgccc

SEQ ID NO: 8883 - RNA, 20 nt, synthetic construct
  source 1..20: mol_type = other RNA
caggcaggcagccttcccga

SEQ ID NO: 8884 - RNA, 20 nt, synthetic construct
  source 1..20: mol_type = other RNA
gcaggcagccttcccgaagg

SEQ ID NO: 8885 - RNA, 20 nt, synthetic construct
  source 1..20: mol_type = other RNA
caggcagccttcccgaaggc

SEQ ID NO: 8886 - RNA, 20 nt, synthetic construct
  source 1..20: mol_type = other RNA
gccttcccgaaggcgggact

SEQ ID NO: 8887 - RNA, 20 nt, synthetic construct
  source 1..20: mol_type = other RNA
gcctagtcccgccttcggga

SEQ ID NO: 8888 - RNA, 20 nt, synthetic construct
  source 1..20: mol_type = other RNA
acacgcctagtcccgccttc

SEQ ID NO: 8889 - RNA, 20 nt, synthetic construct
  source 1..20: mol_type = other RNA
cacacgcctagtcccgcctt

SEQ ID NO: 8890 - RNA, 20 nt, synthetic construct
  source 1..20: mol_type = other RNA
cgggactaggcgtgtgctgc

SEQ ID NO: 8891 - RNA, 20 nt, synthetic construct
  source 1..20: mol_type = other RNA
tggacatgactaatccaccc

SEQ ID NO: 8892 - RNA, 20 nt, synthetic construct
  source 1..20: mol_type = other RNA
ggacatgactaatccacccc

SEQ ID NO: 8893 - RNA, 20 nt, synthetic construct
  source 1..20: mol_type = other RNA
gacatgactaatccaccccg

SEQ ID NO: 8894 - RNA, 20 nt, synthetic construct
  source 1..20: mol_type = other RNA
acatgactaatccaccccgg

SEQ ID NO: 8895 - RNA, 20 nt, synthetic construct
  source 1..20: mol_type = other RNA
actaatccaccccgggggac

SEQ ID NO: 8896 - RNA, 20 nt, synthetic construct
  source 1..20: mol_type = other RNA
ccaccccgggggacaggccc

SEQ ID NO: 8897 - RNA, 20 nt, synthetic construct
  source 1..20: mol_type = other RNA
caccccgggggacaggccca

SEQ ID NO: 8898 - RNA, 20 nt, synthetic construct
  source 1..20: mol_type = other RNA
cctgggcctgtcccccgggg

SEQ ID NO: 8899 - RNA, 20 nt, synthetic construct
  source 1..20: mol_type = other RNA
agccctgggcctgtcccccg

SEQ ID NO: 8900 - RNA, 20 nt, synthetic construct
  source 1..20: mol_type = other RNA
gggacaggcccagggctctg

SEQ ID NO: 8901 - RNA, 20 nt, synthetic construct
  source 1..20: mol_type = other RNA
agagccctgggcctgtcccc

SEQ ID NO: 8902 - RNA, 20 nt, synthetic construct
  source 1..20: mol_type = other RNA
atggaattcctcagagccct

SEQ ID NO: 8903 - RNA, 20 nt, synthetic construct
  source 1..20: mol_type = other RNA
tatggaattcctcagagccc

SEQ ID NO: 8904 - RNA, 20 nt, synthetic construct
  source 1..20: mol_type = other RNA
tgaggaattccataacttga

SEQ ID NO: 8905 - RNA, 20 nt, synthetic construct
  source 1..20: mol_type = other RNA
gacaggactccatcaagtta

SEQ ID NO: 8906 - RNA, 20 nt, synthetic construct
  source 1..20: mol_type = other RNA
atggagtcctgtccctttca

SEQ ID NO: 8907 - RNA, 20 nt, synthetic construct
  source 1..20: mol_type = other RNA
gtccctttcacggaagaaaa

SEQ ID NO: 8908 - RNA, 20 nt, synthetic construct
  source 1..20: mol_type = other RNA
ttttcttccgtgaaagggac

SEQ ID NO: 8909 - RNA, 20 nt, synthetic construct
  source 1..20: mol_type = other RNA
gtccattttcttccgtgaaa

SEQ ID NO: 8910 - RNA, 20 nt, synthetic construct
  source 1..20: mol_type = other RNA
agtccattttcttccgtgaa

SEQ ID NO: 8911 - RNA, 20 nt, synthetic construct
  source 1..20: mol_type = other RNA
ggacttaagctatagcttgc

SEQ ID NO: 8912 - RNA, 20 nt, synthetic construct
  source 1..20: mol_type = other RNA
gacttaagctatagcttgct

SEQ ID NO: 8913 - RNA, 20 nt, synthetic construct
  source 1..20: mol_type = other RNA
taagctatagcttgctggga

SEQ ID NO: 8914 - RNA, 20 nt, synthetic construct
  source 1..20: mol_type = other RNA
tagcttgctgggaaggaatc

SEQ ID NO: 8915 - RNA, 20 nt, synthetic construct
  source 1..20: mol_type = other RNA
gacacggactcttaataaaa

SEQ ID NO: 8916 - RNA, 20 nt, synthetic construct
  source 1..20: mol_type = other RNA
agagtccgtgtccaatgatt

SEQ ID NO: 8917 - RNA, 20 nt, synthetic construct
  source 1..20: mol_type = other RNA
tccgtgtccaatgattaggc

SEQ ID NO: 8918 - RNA, 20 nt, synthetic construct
  source 1..20: mol_type = other RNA
tcctgcctaatcattggaca

SEQ ID NO: 8919 - RNA, 20 nt, synthetic construct
  source 1..20: mol_type = other RNA
cgtaggtcctgcctaatcat

SEQ ID NO: 8920 - RNA, 20 nt, synthetic construct
  source 1..20: mol_type = other RNA
attaggcaggacctacgtag

SEQ ID NO: 8921 - RNA, 20 nt, synthetic construct
  source 1..20: mol_type = other RNA
ttaggcaggacctacgtaga

SEQ ID NO: 8922 - RNA, 20 nt, synthetic construct
  source 1..20: mol_type = other RNA
gtttctctctccctctacgt

SEQ ID NO: 8923 - RNA, 20 nt, synthetic construct
  source 1..20: mol_type = other RNA
tttacatgcactgattattg

SEQ ID NO: 8924 - RNA, 20 nt, synthetic construct
  source 1..20: mol_type = other RNA
ttacatgcactgattattga

SEQ ID NO: 8925 - RNA, 20 nt, synthetic construct
  source 1..20: mol_type = other RNA
tctagttagaataaaatccc

SEQ ID NO: 8926 - RNA, 20 nt, synthetic construct
  source 1..20: mol_type = other RNA
ctagttagaataaaatccca

SEQ ID NO: 8927 - RNA, 20 nt, synthetic construct
  source 1..20: mol_type = other RNA
ttagaataaaatcccaggga

SEQ ID NO: 8928 - RNA, 20 nt, synthetic construct
  source 1..20: mol_type = other RNA
tagaataaaatcccagggat

SEQ ID NO: 8929 - RNA, 20 nt, synthetic construct
  source 1..20: mol_type = other RNA
taaaatcccagggatgggac

SEQ ID NO: 8930 - RNA, 20 nt, synthetic construct
  source 1..20: mol_type = other RNA
ccagggatgggacaggcccg

SEQ ID NO: 8931 - RNA, 20 nt, synthetic construct
  source 1..20: mol_type = other RNA
cagggatgggacaggcccgt

SEQ ID NO: 8932 - RNA, 20 nt, synthetic construct
  source 1..20: mol_type = other RNA
cacgggcctgtcccatccct

SEQ ID NO: 8933 - RNA, 20 nt, synthetic construct
  source 1..20: mol_type = other RNA
ccacgggcctgtcccatccc

SEQ ID NO: 8934 - RNA, 20 nt, synthetic construct
  source 1..20: mol_type = other RNA
aggcccgtgggagaacatgc

SEQ ID NO: 8935 - RNA, 20 nt, synthetic construct
  source 1..20: mol_type = other RNA
actcctgcatgttctcccac

SEQ ID NO: 8936 - RNA, 20 nt, synthetic construct
  source 1..20: mol_type = other RNA
gactcctgcatgttctccca

SEQ ID NO: 8937 - RNA, 20 nt, synthetic construct
  source 1..20: mol_type = other RNA
ggagtctactgccaaaacac

SEQ ID NO: 8938 - RNA, 20 nt, synthetic construct
  source 1..20: mol_type = other RNA
aaaacacaggtttcccactg

SEQ ID NO: 8939 - RNA, 20 nt, synthetic construct
  source 1..20: mol_type = other RNA
acagtgggaaacctgtgttt

SEQ ID NO: 8940 - RNA, 20 nt, synthetic construct
  source 1..20: mol_type = other RNA
ggggagtggggatccacagt

SEQ ID NO: 8941 - RNA, 20 nt, synthetic construct
  source 1..20: mol_type = other RNA
tggggagtggggatccacag

SEQ ID NO: 8942 - RNA, 20 nt, synthetic construct
  source 1..20: mol_type = other RNA
ctcaggcagactggggagtg

SEQ ID NO: 8943 - RNA, 20 nt, synthetic construct
  source 1..20: mol_type = other RNA
tctcaggcagactggggagt

SEQ ID NO: 8944 - RNA, 20 nt, synthetic construct
  source 1..20: mol_type = other RNA
gtctcaggcagactggggag

SEQ ID NO: 8945 - RNA, 20 nt, synthetic construct
  source 1..20: mol_type = other RNA
cccagtctgcctgagaccct

SEQ ID NO: 8946 - RNA, 20 nt, synthetic construct
  source 1..20: mol_type = other RNA
ccagtctgcctgagacccta

SEQ ID NO: 8947 - RNA, 20 nt, synthetic construct
  source 1..20: mol_type = other RNA
ctagggtctcaggcagactg

SEQ ID NO: 8948 - RNA, 20 nt, synthetic construct
  source 1..20: mol_type = other RNA
cctagggtctcaggcagact

SEQ ID NO: 8949 - RNA, 20 nt, synthetic construct
  source 1..20: mol_type = other RNA
ccctagggtctcaggcagac

SEQ ID NO: 8950 - RNA, 20 nt, synthetic construct
  source 1..20: mol_type = other RNA
agaccctagggccagctctc

SEQ ID NO: 8951 - RNA, 20 nt, synthetic construct
  source 1..20: mol_type = other RNA
agagctggccctagggtctc

SEQ ID NO: 8952 - RNA, 20 nt, synthetic construct
  source 1..20: mol_type = other RNA
ccctagggccagctctcagg

SEQ ID NO: 8953 - RNA, 20 nt, synthetic construct
  source 1..20: mol_type = other RNA
ccacctgagagctggcccta

SEQ ID NO: 8954 - RNA, 20 nt, synthetic construct
  source 1..20: mol_type = other RNA
accacctgagagctggccct

SEQ ID NO: 8955 - RNA, 20 nt, synthetic construct
  source 1..20: mol_type = other RNA
gctgcagaccacctgagagc

SEQ ID NO: 8956 - RNA, 20 nt, synthetic construct
  source 1..20: mol_type = other RNA
tggtgcagctgtcagtgagc

SEQ ID NO: 8957 - RNA, 20 nt, synthetic construct
  source 1..20: mol_type = other RNA
tgacagctgcaccagcctag

SEQ ID NO: 8958 - RNA, 20 nt, synthetic construct
  source 1..20: mol_type = other RNA
cagcctagcggcaaccccgt

SEQ ID NO: 8959 - RNA, 20 nt, synthetic construct
  source 1..20: mol_type = other RNA
caacggggttgccgctaggc

SEQ ID NO: 8960 - RNA, 20 nt, synthetic construct
  source 1..20: mol_type = other RNA
cggccaacggggttgccgct

SEQ ID NO: 8961 - RNA, 20 nt, synthetic construct
  source 1..20: mol_type = other RNA
accccgttggccgtaaacac

SEQ ID NO: 8962 - RNA, 20 nt, synthetic construct
  source 1..20: mol_type = other RNA
tcctgtgtttacggccaacg

SEQ ID NO: 8963 - RNA, 20 nt, synthetic construct
  source 1..20: mol_type = other RNA
atcctgtgtttacggccaac

SEQ ID NO: 8964 - RNA, 20 nt, synthetic construct
  source 1..20: mol_type = other RNA
catcctgtgtttacggccaa

SEQ ID NO: 8965 - RNA, 20 nt, synthetic construct
  source 1..20: mol_type = other RNA
gagctaacatcctgtgttta

SEQ ID NO: 8966 - RNA, 20 nt, synthetic construct
  source 1..20: mol_type = other RNA
tgttagctccatctctcagc

SEQ ID NO: 8967 - RNA, 20 nt, synthetic construct
  source 1..20: mol_type = other RNA
gttagctccatctctcagca

SEQ ID NO: 8968 - RNA, 20 nt, synthetic construct
  source 1..20: mol_type = other RNA
ttagctccatctctcagcag

SEQ ID NO: 8969 - RNA, 20 nt, synthetic construct
  source 1..20: mol_type = other RNA
ctccatctctcagcaggggc

SEQ ID NO: 8970 - RNA, 20 nt, synthetic construct
  source 1..20: mol_type = other RNA
gaccagcccctgctgagaga

SEQ ID NO: 8971 - RNA, 20 nt, synthetic construct
  source 1..20: mol_type = other RNA
ctcagcaggggctggtcgcc

SEQ ID NO: 8972 - RNA, 20 nt, synthetic construct
  source 1..20: mol_type = other RNA
gggctggtcgccaggccttc

SEQ ID NO: 8973 - RNA, 20 nt, synthetic construct
  source 1..20: mol_type = other RNA
ggctggtcgccaggccttct

SEQ ID NO: 8974 - RNA, 20 nt, synthetic construct
  source 1..20: mol_type = other RNA
gccaggccttctgggcacca

SEQ ID NO: 8975 - RNA, 20 nt, synthetic construct
  source 1..20: mol_type = other RNA
gccatggtgcccagaaggcc

SEQ ID NO: 8976 - RNA, 20 nt, synthetic construct
  source 1..20: mol_type = other RNA
agggagccatggtgcccaga

SEQ ID NO: 8977 - RNA, 20 nt, synthetic construct
  source 1..20: mol_type = other RNA
agaggctagggagggagcca

SEQ ID NO: 8978 - RNA, 20 nt, synthetic construct
  source 1..20: mol_type = other RNA
cgcaggggagaggctaggga

SEQ ID NO: 8979 - RNA, 20 nt, synthetic construct
  source 1..20: mol_type = other RNA
gcgcaggggagaggctaggg

SEQ ID NO: 8980 - RNA, 20 nt, synthetic construct
  source 1..20: mol_type = other RNA
ctggcgcaggggagaggcta

SEQ ID NO: 8981 - RNA, 20 nt, synthetic construct
  source 1..20: mol_type = other RNA
gctggcgcaggggagaggct

SEQ ID NO: 8982 - RNA, 20 nt, synthetic construct
  source 1..20: mol_type = other RNA
ctcaggctggcgcaggggag

SEQ ID NO: 8983 - RNA, 20 nt, synthetic construct
  source 1..20: mol_type = other RNA
agatgctcaggctggcgcag

SEQ ID NO: 8984 - RNA, 20 nt, synthetic construct
  source 1..20: mol_type = other RNA
cagatgctcaggctggcgca

SEQ ID NO: 8985 - RNA, 20 nt, synthetic construct
  source 1..20: mol_type = other RNA
gcagatgctcaggctggcgc

SEQ ID NO: 8986 - RNA, 20 nt, synthetic construct
  source 1..20: mol_type = other RNA
aggggcgcagatgctcaggc

SEQ ID NO: 8987 - RNA, 20 nt, synthetic construct
  source 1..20: mol_type = other RNA
tctcaggggcgcagatgctc

SEQ ID NO: 8988 - RNA, 20 nt, synthetic construct
  source 1..20: mol_type = other RNA
ctgcgcccctgagaataatg

SEQ ID NO: 8989 - RNA, 20 nt, synthetic construct
  source 1..20: mol_type = other RNA
actttcctcattattctcag

SEQ ID NO: 8990 - RNA, 20 nt, synthetic construct
  source 1..20: mol_type = other RNA
cactttcctcattattctca

SEQ ID NO: 8991 - RNA, 20 nt, synthetic construct
  source 1..20: mol_type = other RNA
gcactttcctcattattctc

SEQ ID NO: 8992 - RNA, 20 nt, synthetic construct
  source 1..20: mol_type = other RNA
taatgaggaaagtgcacact

SEQ ID NO: 8993 - RNA, 20 nt, synthetic construct
  source 1..20: mol_type = other RNA
tgaggaaagtgcacacttgg

SEQ ID NO: 8994 - RNA, 20 nt, synthetic construct
  source 1..20: mol_type = other RNA
gtcccctctccactcccacc

SEQ ID NO: 8995 - RNA, 20 nt, synthetic construct
  source 1..20: mol_type = other RNA
tgccaggtgggagtggagag

SEQ ID NO: 8996 - RNA, 20 nt, synthetic construct
  source 1..20: mol_type = other RNA
gtgccaggtgggagtggaga

SEQ ID NO: 8997 - RNA, 20 nt, synthetic construct
  source 1..20: mol_type = other RNA
ggtgccaggtgggagtggag

SEQ ID NO: 8998 - RNA, 20 nt, synthetic construct
  source 1..20: mol_type = other RNA
tgctgggtgccaggtgggag

SEQ ID NO: 8999 - RNA, 20 nt, synthetic construct
  source 1..20: mol_type = other RNA
agtgatgctgggtgccaggt

SEQ ID NO: 9000 - RNA, 20 nt, synthetic construct
  source 1..20: mol_type = other RNA
tagtgatgctgggtgccagg

SEQ ID NO: 9001 - RNA, 20 nt, synthetic construct
  source 1..20: mol_type = other RNA
aggtagtgatgctgggtgcc

SEQ ID NO: 9002 - RNA, 20 nt, synthetic construct
  source 1..20: mol_type = other RNA
tggaggcaggtagtgatgct

SEQ ID NO: 9003 - RNA, 20 nt, synthetic construct
  source 1..20: mol_type = other RNA
gtggaggcaggtagtgatgc

SEQ ID NO: 9004 - RNA, 20 nt, synthetic construct
  source 1..20: mol_type = other RNA
cctgcctccacctcccactg

SEQ ID NO: 9005 - RNA, 20 nt, synthetic construct
  source 1..20: mol_type = other RNA
cctcagtgggaggtggaggc

SEQ ID NO: 9006 - RNA, 20 nt, synthetic construct
  source 1..20: mol_type = other RNA
gcagcctcagtgggaggtgg

SEQ ID NO: 9007 - RNA, 20 nt, synthetic construct
  source 1..20: mol_type = other RNA
gcagcagcctcagtgggagg

SEQ ID NO: 9008 - RNA, 20 nt, synthetic construct
  source 1..20: mol_type = other RNA
cactgaggctgctgctcaga

SEQ ID NO: 9009 - RNA, 20 nt, synthetic construct
  source 1..20: mol_type = other RNA
tgaggctgctgctcagaagg

SEQ ID NO: 9010 - RNA, 20 nt, synthetic construct
  source 1..20: mol_type = other RNA
gaggctgctgctcagaaggt

SEQ ID NO: 9011 - RNA, 20 nt, synthetic construct
  source 1..20: mol_type = other RNA
gctcagaaggtgggctctaa

SEQ ID NO: 9012 - RNA, 20 nt, synthetic construct
  source 1..20: mol_type = other RNA
ctcagaaggtgggctctaat

SEQ ID NO: 9013 - RNA, 20 nt, synthetic construct
  source 1..20: mol_type = other RNA
tcagaaggtgggctctaatg

SEQ ID NO: 9014 - RNA, 20 nt, synthetic construct
  source 1..20: mol_type = other RNA
tgggctctaatggggaaccc

SEQ ID NO: 9015 - RNA, 20 nt, synthetic construct
  source 1..20: mol_type = other RNA
gggctctaatggggaaccca

SEQ ID NO: 9016 - RNA, 20 nt, synthetic construct
  source 1..20: mol_type = other RNA
gggtccaacgtgcagaccca

SEQ ID NO: 9017 - RNA, 20 nt, synthetic construct
  source 1..20: mol_type = other RNA
ggtccaacgtgcagacccac

SEQ ID NO: 9018 - RNA, 20 nt, synthetic construct
  source 1..20: mol_type = other RNA
gtccaacgtgcagacccacg

SEQ ID NO: 9019 - RNA, 20 nt, synthetic construct
  source 1..20: mol_type = other RNA
agccccgtgggtctgcacgt

SEQ ID NO: 9020 - RNA, 20 nt, synthetic construct
  source 1..20: mol_type = other RNA
acccacggggcttgaaaaga

SEQ ID NO: 9021 - RNA, 20 nt, synthetic construct
  source 1..20: mol_type = other RNA
cccacggggcttgaaaagaa

SEQ ID NO: 9022 - RNA, 20 nt, synthetic construct
  source 1..20: mol_type = other RNA
cccttcttttcaagccccgt

SEQ ID NO: 9023 - RNA, 20 nt, synthetic construct
  source 1..20: mol_type = other RNA
tcccttcttttcaagccccg

SEQ ID NO: 9024 - RNA, 20 nt, synthetic construct
  source 1..20: mol_type = other RNA
ggactgttagttagaactgc

SEQ ID NO: 9025 - RNA, 20 nt, synthetic construct
  source 1..20: mol_type = other RNA
ctgttagttagaactgcagg

SEQ ID NO: 9026 - RNA, 20 nt, synthetic construct
  source 1..20: mol_type = other RNA
tgttagttagaactgcagga

SEQ ID NO: 9027 - RNA, 20 nt, synthetic construct
  source 1..20: mol_type = other RNA
caggagggacacgcaagtcc

SEQ ID NO: 9028 - RNA, 20 nt, synthetic construct
  source 1..20: mol_type = other RNA
cacgcaagtccaggtgcgtg

SEQ ID NO: 9029 - RNA, 20 nt, synthetic construct
  source 1..20: mol_type = other RNA
gtccaggtgcgtgtggagtt

SEQ ID NO: 9030 - RNA, 20 nt, synthetic construct
  source 1..20: mol_type = other RNA
tccaggtgcgtgtggagtta

SEQ ID NO: 9031 - RNA, 20 nt, synthetic construct
  source 1..20: mol_type = other RNA
gccctaactccacacgcacc

SEQ ID NO: 9032 - RNA, 20 nt, synthetic construct
  source 1..20: mol_type = other RNA
tgtggagttagggcagattc

SEQ ID NO: 9033 - RNA, 20 nt, synthetic construct
  source 1..20: mol_type = other RNA
acacagcaacgagcacactc

SEQ ID NO: 9034 - RNA, 20 nt, synthetic construct
  source 1..20: mol_type = other RNA
cacagcaacgagcacactct

SEQ ID NO: 9035 - RNA, 20 nt, synthetic construct
  source 1..20: mol_type = other RNA
acagcaacgagcacactctg

SEQ ID NO: 9036 - RNA, 20 nt, synthetic construct
  source 1..20: mol_type = other RNA
gcaacgagcacactctgggg

SEQ ID NO: 9037 - RNA, 20 nt, synthetic construct
  source 1..20: mol_type = other RNA
caacgagcacactctgggga

SEQ ID NO: 9038 - RNA, 20 nt, synthetic construct
  source 1..20: mol_type = other RNA
aacgagcacactctggggag

SEQ ID NO: 9039 - RNA, 20 nt, synthetic construct
  source 1..20: mol_type = other RNA
agcacactctggggaggggt

SEQ ID NO: 9040 - RNA, 20 nt, synthetic construct
  source 1..20: mol_type = other RNA
ctctggggaggggtaggcaa

SEQ ID NO: 9041 - RNA, 20 nt, synthetic construct
  source 1..20: mol_type = other RNA
ggggaggggtaggcaatggc

SEQ ID NO: 9042 - RNA, 20 nt, synthetic construct
  source 1..20: mol_type = other RNA
gggaggggtaggcaatggct

SEQ ID NO: 9043 - RNA, 20 nt, synthetic construct
  source 1..20: mol_type = other RNA
ggaggggtaggcaatggctg

SEQ ID NO: 9044 - RNA, 20 nt, synthetic construct
  source 1..20: mol_type = other RNA
gtaggcaatggctggggccc

SEQ ID NO: 9045 - RNA, 20 nt, synthetic construct
  source 1..20: mol_type = other RNA
aatggctggggcccaggtga

SEQ ID NO: 9046 - RNA, 20 nt, synthetic construct
  source 1..20: mol_type = other RNA
gctggggcccaggtgatggc

SEQ ID NO: 9047 - RNA, 20 nt, synthetic construct
  source 1..20: mol_type = other RNA
ctggggcccaggtgatggca

SEQ ID NO: 9048 - RNA, 20 nt, synthetic construct
  source 1..20: mol_type = other RNA
tgctggccctgccatcacct

SEQ ID NO: 9049 - RNA, 20 nt, synthetic construct
  source 1..20: mol_type = other RNA
ctgctggccctgccatcacc

SEQ ID NO: 9050 - RNA, 20 nt, synthetic construct
  source 1..20: mol_type = other RNA
tggcagggccagcagcagac

SEQ ID NO: 9051 - RNA, 20 nt, synthetic construct
  source 1..20: mol_type = other RNA
ccagcagcagactggcgatg

SEQ ID NO: 9052 - RNA, 20 nt, synthetic construct
  source 1..20: mol_type = other RNA
cagcagactggcgatgcggc

SEQ ID NO: 9053 - RNA, 20 nt, synthetic construct
  source 1..20: mol_type = other RNA
ccgcatcgccagtctgctgc

SEQ ID NO: 9054 - RNA, 20 nt, synthetic construct
  source 1..20: mol_type = other RNA
gatgtggagcagactgcagc

SEQ ID NO: 9055 - RNA, 20 nt, synthetic construct
  source 1..20: mol_type = other RNA
tcgctggtttctggtggatg

SEQ ID NO: 9056 - RNA, 20 nt, synthetic construct
  source 1..20: mol_type = other RNA
gatgcttcgctggtttctgg

SEQ ID NO: 9057 - RNA, 20 nt, synthetic construct
  source 1..20: mol_type = other RNA
ggagatgcttcgctggtttc

SEQ ID NO: 9058 - RNA, 20 nt, synthetic construct
  source 1..20: mol_type = other RNA
agcgaagcatctccctgaag

SEQ ID NO: 9059 - RNA, 20 nt, synthetic construct
  source 1..20: mol_type = other RNA
gcttcagggagatgcttcgc

SEQ ID NO: 9060 - RNA, 20 nt, synthetic construct
  source 1..20: mol_type = other RNA
cgtgcagtgcggccgcttca

SEQ ID NO: 9061 - RNA, 20 nt, synthetic construct
  source 1..20: mol_type = other RNA
acgtgcagtgcggccgcttc

SEQ ID NO: 9062 - RNA, 20 nt, synthetic construct
  source 1..20: mol_type = other RNA
cactgcacgtgactgtgata

SEQ ID NO: 9063 - RNA, 20 nt, synthetic construct
  source 1..20: mol_type = other RNA
actgcacgtgactgtgatac

SEQ ID NO: 9064 - RNA, 20 nt, synthetic construct
  source 1..20: mol_type = other RNA
ctgcacgtgactgtgatacg

SEQ ID NO: 9065 - RNA, 20 nt, synthetic construct
  source 1..20: mol_type = other RNA
acgtgactgtgatacgggga

SEQ ID NO: 9066 - RNA, 20 nt, synthetic construct
  source 1..20: mol_type = other RNA
ctgtgatacggggaaggccc

SEQ ID NO: 9067 - RNA, 20 nt, synthetic construct
  source 1..20: mol_type = other RNA
tgtgatacggggaaggccct

SEQ ID NO: 9068 - RNA, 20 nt, synthetic construct
  source 1..20: mol_type = other RNA
gtgatacggggaaggccctg

SEQ ID NO: 9069 - RNA, 20 nt, synthetic construct
  source 1..20: mol_type = other RNA
tggggacacgaagtctccac

SEQ ID NO: 9070 - RNA, 20 nt, synthetic construct
  source 1..20: mol_type = other RNA
gtggagacttcgtgtcccca

SEQ ID NO: 9071 - RNA, 20 nt, synthetic construct
  source 1..20: mol_type = other RNA
agtggagacttcgtgtcccc

SEQ ID NO: 9072 - RNA, 20 nt, synthetic construct
  source 1..20: mol_type = other RNA
tctccactggtgcagaaagc

SEQ ID NO: 9073 - RNA, 20 nt, synthetic construct
  source 1..20: mol_type = other RNA
ctccactggtgcagaaagct

SEQ ID NO: 9074 - RNA, 20 nt, synthetic construct
  source 1..20: mol_type = other RNA
ctggtgcagaaagctgggtg

SEQ ID NO: 9075 - RNA, 20 nt, synthetic construct
  source 1..20: mol_type = other RNA
cacccagctttctgcaccag

SEQ ID NO: 9076 - RNA, 20 nt, synthetic construct
  source 1..20: mol_type = other RNA
agctgggtgtggtcacatca

SEQ ID NO: 9077 - RNA, 20 nt, synthetic construct
  source 1..20: mol_type = other RNA
acaagtcacctaacctgttt

SEQ ID NO: 9078 - RNA, 20 nt, synthetic construct
  source 1..20: mol_type = other RNA
cgaagactccgaaacaggtt

SEQ ID NO: 9079 - RNA, 20 nt, synthetic construct
  source 1..20: mol_type = other RNA
ttcggagtcttcgctgtcag

SEQ ID NO: 9080 - RNA, 20 nt, synthetic construct
  source 1..20: mol_type = other RNA
gtcttcgctgtcagaggagc

SEQ ID NO: 9081 - RNA, 20 nt, synthetic construct
  source 1..20: mol_type = other RNA
gtcagaggagctggactcac

SEQ ID NO: 9082 - RNA, 20 nt, synthetic construct
  source 1..20: mol_type = other RNA
actggagctctccgactctg

SEQ ID NO: 9083 - RNA, 20 nt, synthetic construct
  source 1..20: mol_type = other RNA
gggcttctcgtcctcagagt

SEQ ID NO: 9084 - RNA, 20 nt, synthetic construct
  source 1..20: mol_type = other RNA
ggacgagaagcccttcatct

SEQ ID NO: 9085 - RNA, 20 nt, synthetic construct
  source 1..20: mol_type = other RNA
cgagaagcccttcatcttgg

SEQ ID NO: 9086 - RNA, 20 nt, synthetic construct
  source 1..20: mol_type = other RNA
gcccttcatcttggaggagc

SEQ ID NO: 9087 - RNA, 20 nt, synthetic construct
  source 1..20: mol_type = other RNA
gccggctcctccaagatgaa

SEQ ID NO: 9088 - RNA, 20 nt, synthetic construct
  source 1..20: mol_type = other RNA
tgccggctcctccaagatga

SEQ ID NO: 9089 - RNA, 20 nt, synthetic construct
  source 1..20: mol_type = other RNA
gagaaagttgatgtgattgc

SEQ ID NO: 9090 - RNA, 20 nt, synthetic construct
  source 1..20: mol_type = other RNA
ctcagctgcaatccaagcaa

SEQ ID NO: 9091 - RNA, 20 nt, synthetic construct
  source 1..20: mol_type = other RNA
tcagctgcaatccaagcaat

SEQ ID NO: 9092 - RNA, 20 nt, synthetic construct
  source 1..20: mol_type = other RNA
gcaatccaagcaatgggagc

SEQ ID NO: 9093 - RNA, 20 nt, synthetic construct
  source 1..20: mol_type = other RNA
gcttgggccccctgggcatg

SEQ ID NO: 9094 - RNA, 20 nt, synthetic construct
  source 1..20: mol_type = other RNA
tgcttgggccccctgggcat

SEQ ID NO: 9095 - RNA, 20 nt, synthetic construct
  source 1..20: mol_type = other RNA
gtgcttgggccccctgggca

SEQ ID NO: 9096 - RNA, 20 nt, synthetic construct
  source 1..20: mol_type = other RNA
gggggcccaagcacaccttg

SEQ ID NO: 9097 - RNA, 20 nt, synthetic construct
  source 1..20: mol_type = other RNA
aaggtgtgcttgggccccct

SEQ ID NO: 9098 - RNA, 20 nt, synthetic construct
  source 1..20: mol_type = other RNA
caaggtgtgcttgggccccc

SEQ ID NO: 9099 - RNA, 20 nt, synthetic construct
  source 1..20: mol_type = other RNA
ggaaacctcaaggtgtgctt

SEQ ID NO: 9100 - RNA, 20 nt, synthetic construct
  source 1..20: mol_type = other RNA
aggaaacctcaaggtgtgct

SEQ ID NO: 9101 - RNA, 20 nt, synthetic construct
  source 1..20: mol_type = other RNA
cggaagaaaaggaaacctca

SEQ ID NO: 9102 - RNA, 20 nt, synthetic construct
  source 1..20: mol_type = other RNA
tttccttttcttccgcaaac

SEQ ID NO: 9103 - RNA, 20 nt, synthetic construct
  source 1..20: mol_type = other RNA
ccttttcttccgcaaacagg

SEQ ID NO: 9104 - RNA, 20 nt, synthetic construct
  source 1..20: mol_type = other RNA
cctcctgtttgcggaagaaa

SEQ ID NO: 9105 - RNA, 20 nt, synthetic construct
  source 1..20: mol_type = other RNA
gctatgtcacctcctgtttg

SEQ ID NO: 9106 - RNA, 20 nt, synthetic construct
  source 1..20: mol_type = other RNA
gcgctccagctcacgcagtg

SEQ ID NO: 9107 - RNA, 20 nt, synthetic construct
  source 1..20: mol_type = other RNA
tccagctcacgcagtgtgga

SEQ ID NO: 9108 - RNA, 20 nt, synthetic construct
  source 1..20: mol_type = other RNA
gccgtccacactgcgtgagc

SEQ ID NO: 9109 - RNA, 20 nt, synthetic construct
  source 1..20: mol_type = other RNA
cacgcagtgtggacggcttc

SEQ ID NO: 9110 - RNA, 20 nt, synthetic construct
  source 1..20: mol_type = other RNA
acgcagtgtggacggcttca

SEQ ID NO: 9111 - RNA, 20 nt, synthetic construct
  source 1..20: mol_type = other RNA
aaagtcgatttcaatctcgt

SEQ ID NO: 9112 - RNA, 20 nt, synthetic construct
  source 1..20: mol_type = other RNA
aagtcgatttcaatctcgtc

SEQ ID NO: 9113 - RNA, 20 nt, synthetic construct
  source 1..20: mol_type = other RNA
agtcgatttcaatctcgtcg

SEQ ID NO: 9114 - RNA, 20 nt, synthetic construct
  source 1..20: mol_type = other RNA
gatttcaatctcgtcggggt

SEQ ID NO: 9115 - RNA, 20 nt, synthetic construct
  source 1..20: mol_type = other RNA
cgtcggggttggaattcttc

SEQ ID NO: 9116 - RNA, 20 nt, synthetic construct
  source 1..20: mol_type = other RNA
gtcggggttggaattcttca

SEQ ID NO: 9117 - RNA, 20 nt, synthetic construct
  source 1..20: mol_type = other RNA
ggggttggaattcttcaggg

SEQ ID NO: 9118 - RNA, 20 nt, synthetic construct
  source 1..20: mol_type = other RNA
gggttggaattcttcaggga

SEQ ID NO: 9119 - RNA, 20 nt, synthetic construct
  source 1..20: mol_type = other RNA
tcagggagggctcccgtgac

SEQ ID NO: 9120 - RNA, 20 nt, synthetic construct
  source 1..20: mol_type = other RNA
ggtgcacatcatccagtcac

SEQ ID NO: 9121 - RNA, 20 nt, synthetic construct
  source 1..20: mol_type = other RNA
actggatgatgtgcaccacg

SEQ ID NO: 9122 - RNA, 20 nt, synthetic construct
  source 1..20: mol_type = other RNA
cacgcggcccagcttctcgc

SEQ ID NO: 9123 - RNA, 20 nt, synthetic construct
  source 1..20: mol_type = other RNA
acgcggcccagcttctcgcc

SEQ ID NO: 9124 - RNA, 20 nt, synthetic construct
  source 1..20: mol_type = other RNA
cgcggcccagcttctcgccg

SEQ ID NO: 9125 - RNA, 20 nt, synthetic construct
  source 1..20: mol_type = other RNA
cggcgagaagctgggccgcg

SEQ ID NO: 9126 - RNA, 20 nt, synthetic construct
  source 1..20: mol_type = other RNA
aagctccccggcgagaagct

SEQ ID NO: 9127 - RNA, 20 nt, synthetic construct
  source 1..20: mol_type = other RNA
caagctccccggcgagaagc

SEQ ID NO: 9128 - RNA, 20 nt, synthetic construct
  source 1..20: mol_type = other RNA
ttggacatcaacaagctccc

SEQ ID NO: 9129 - RNA, 20 nt, synthetic construct
  source 1..20: mol_type = other RNA
ggagaagcggcagctcagct

SEQ ID NO: 9130 - RNA, 20 nt, synthetic construct
  source 1..20: mol_type = other RNA
gagctgccgcttctcctcat

SEQ ID NO: 9131 - RNA, 20 nt, synthetic construct
  source 1..20: mol_type = other RNA
cgcttctcctcataggacat

SEQ ID NO: 9132 - RNA, 20 nt, synthetic construct
  source 1..20: mol_type = other RNA
ctatgtcctatgaggagaag

SEQ ID NO: 9133 - RNA, 20 nt, synthetic construct
  source 1..20: mol_type = other RNA
gtgcaagcctatgtcctatg

SEQ ID NO: 9134 - RNA, 20 nt, synthetic construct
  source 1..20: mol_type = other RNA
ctcttcctccgactcatacg

SEQ ID NO: 9135 - RNA, 20 nt, synthetic construct
  source 1..20: mol_type = other RNA
tcttcctccgactcatacgt

SEQ ID NO: 9136 - RNA, 20 nt, synthetic construct
  source 1..20: mol_type = other RNA
tcctccgactcatacgtggg

SEQ ID NO: 9137 - RNA, 20 nt, synthetic construct
  source 1..20: mol_type = other RNA
cctccgactcatacgtggga

SEQ ID NO: 9138 - RNA, 20 nt, synthetic construct
  source 1..20: mol_type = other RNA
ctccgactcatacgtgggag

SEQ ID NO: 9139 - RNA, 20 nt, synthetic construct
  source 1..20: mol_type = other RNA
tccgactcatacgtgggagg

SEQ ID NO: 9140 - RNA, 20 nt, synthetic construct
  source 1..20: mol_type = other RNA
ccctcccacgtatgagtcgg

SEQ ID NO: 9141 - RNA, 20 nt, synthetic construct
  source 1..20: mol_type = other RNA
gccccctcccacgtatgagt

SEQ ID NO: 9142 - RNA, 20 nt, synthetic construct
  source 1..20: mol_type = other RNA
gggagggggcttgctcttca

SEQ ID NO: 9143 - RNA, 20 nt, synthetic construct
  source 1..20: mol_type = other RNA
ggagggggcttgctcttcat

SEQ ID NO: 9144 - RNA, 20 nt, synthetic construct
  source 1..20: mol_type = other RNA
ggcttgctcttcatgggcgc

SEQ ID NO: 9145 - RNA, 20 nt, synthetic construct
  source 1..20: mol_type = other RNA
ctggctccttcttgctacga

SEQ ID NO: 9146 - RNA, 20 nt, synthetic construct
  source 1..20: mol_type = other RNA
tggctccttcttgctacgaa

SEQ ID NO: 9147 - RNA, 20 nt, synthetic construct
  source 1..20: mol_type = other RNA
atcgtcccttcgtagcaaga

SEQ ID NO: 9148 - RNA, 20 nt, synthetic construct
  source 1..20: mol_type = other RNA
gtgtcccctgaatttgtcct

SEQ ID NO: 9149 - RNA, 20 nt, synthetic construct
  source 1..20: mol_type = other RNA
tgtgtcccctgaatttgtcc

SEQ ID NO: 9150 - RNA, 20 nt, synthetic construct
  source 1..20: mol_type = other RNA
atagcagcaacagcaatgtg

SEQ ID NO: 9151 - RNA, 20 nt, synthetic construct
  source 1..20: mol_type = other RNA
ttatttttcttcgtcttttt

SEQ ID NO: 9152 - RNA, 20 nt, synthetic construct
  source 1..20: mol_type = other RNA
tttttcttcgtctttttagg

SEQ ID NO: 9153 - RNA, 20 nt, synthetic construct
  source 1..20: mol_type = other RNA
ttcttcgtctttttaggagg

SEQ ID NO: 9154 - RNA, 20 nt, synthetic construct
  source 1..20: mol_type = other RNA
ctttttaggaggaggttcct

SEQ ID NO: 9155 - RNA, 20 nt, synthetic construct
  source 1..20: mol_type = other RNA
gaataaaaaaagcaaagcca

SEQ ID NO: 9156 - RNA, 20 nt, synthetic construct
  source 1..20: mol_type = other RNA
gcacaaaaggaaagaggaag

SEQ ID NO: 9157 - RNA, 20 nt, synthetic construct
  source 1..20: mol_type = other RNA
agaaaagcacaaaaggaaag

SEQ ID NO: 9158 - RNA, 20 nt, synthetic construct
  source 1..20: mol_type = other RNA
agaaaaaagaaaagcacaaa

SEQ ID NO: 9159 - RNA, 20 nt, synthetic construct
  source 1..20: mol_type = other RNA
ttgtctttctcctttttctt

SEQ ID NO: 9160 - RNA, 20 nt, synthetic construct
  source 1..20: mol_type = other RNA
ttttctttggtttgttctgc

SEQ ID NO: 9161 - RNA, 20 nt, synthetic construct
  source 1..20: mol_type = other RNA
tttctttggtttgttctgct

SEQ ID NO: 9162 - RNA, 20 nt, synthetic construct
  source 1..20: mol_type = other RNA
ttctttggtttgttctgctg

SEQ ID NO: 9163 - RNA, 20 nt, synthetic construct
  source 1..20: mol_type = other RNA
tgttctgctggggctgagag

SEQ ID NO: 9164 - RNA, 20 nt, synthetic construct
  source 1..20: mol_type = other RNA
gttctgctggggctgagaga

SEQ ID NO: 9165 - RNA, 20 nt, synthetic construct
  source 1..20: mol_type = other RNA
ggctgcaagctgctcgtgca

SEQ ID NO: 9166 - RNA, 20 nt, synthetic construct
  source 1..20: mol_type = other RNA
ctttgagctgtagaccagac

SEQ ID NO: 9167 - RNA, 20 nt, synthetic construct
  source 1..20: mol_type = other RNA
ccaatgccctcacctgctcc

SEQ ID NO: 9168 - RNA, 20 nt, synthetic construct
  source 1..20: mol_type = other RNA
ggagcaggtgagggcattgg

SEQ ID NO: 9169 - RNA, 20 nt, synthetic construct
  source 1..20: mol_type = other RNA
ccaggagcaggtgagggcat

SEQ ID NO: 9170 - RNA, 20 nt, synthetic construct
  source 1..20: mol_type = other RNA
tgagctccaggagcaggtga

SEQ ID NO: 9171 - RNA, 20 nt, synthetic construct
  source 1..20: mol_type = other RNA
ctgagctccaggagcaggtg

SEQ ID NO: 9172 - RNA, 20 nt, synthetic construct
  source 1..20: mol_type = other RNA
gctggctgagctccaggagc

SEQ ID NO: 9173 - RNA, 20 nt, synthetic construct
  source 1..20: mol_type = other RNA
cctggagctcagccagccgc

SEQ ID NO: 9174 - RNA, 20 nt, synthetic construct
  source 1..20: mol_type = other RNA
ctggagctcagccagccgct

SEQ ID NO: 9175 - RNA, 20 nt, synthetic construct
  source 1..20: mol_type = other RNA
ccagcggctggctgagctcc

SEQ ID NO: 9176 - RNA, 20 nt, synthetic construct
  source 1..20: mol_type = other RNA
ggaggagcgagcccagcggc

SEQ ID NO: 9177 - RNA, 20 nt, synthetic construct
  source 1..20: mol_type = other RNA
ctgaggaggagcgagcccag

SEQ ID NO: 9178 - RNA, 20 nt, synthetic construct
  source 1..20: mol_type = other RNA
ttcgactgatgactctgagg

SEQ ID NO: 9179 - RNA, 20 nt, synthetic construct
  source 1..20: mol_type = other RNA
cagttcgactgatgactctg

SEQ ID NO: 9180 - RNA, 20 nt, synthetic construct
  source 1..20: mol_type = other RNA
agtcgaactgtcactgtccg

SEQ ID NO: 9181 - RNA, 20 nt, synthetic construct
  source 1..20: mol_type = other RNA
cagcagcagcgatagctcct

SEQ ID NO: 9182 - RNA, 20 nt, synthetic construct
  source 1..20: mol_type = other RNA
gctatcgctgctgctgtcgc

SEQ ID NO: 9183 - RNA, 20 nt, synthetic construct
  source 1..20: mol_type = other RNA
gctgctgctgtcgctggatg

SEQ ID NO: 9184 - RNA, 20 nt, synthetic construct
  source 1..20: mol_type = other RNA
ctgctgctgtcgctggatga

SEQ ID NO: 9185 - RNA, 20 nt, synthetic construct
  source 1..20: mol_type = other RNA
ctgctgtcgctggatgaggg

SEQ ID NO: 9186 - RNA, 20 nt, synthetic construct
  source 1..20: mol_type = other RNA
tgctgtcgctggatgagggc

SEQ ID NO: 9187 - RNA, 20 nt, synthetic construct
  source 1..20: mol_type = other RNA
gctgtcgctggatgagggcg

SEQ ID NO: 9188 - RNA, 20 nt, synthetic construct
  source 1..20: mol_type = other RNA
tgagggcggggccacaacct

SEQ ID NO: 9189 - RNA, 20 nt, synthetic construct
  source 1..20: mol_type = other RNA
gggcggggccacaaccttgg

SEQ ID NO: 9190 - RNA, 20 nt, synthetic construct
  source 1..20: mol_type = other RNA
ggcggggccacaaccttggt

SEQ ID NO: 9191 - RNA, 20 nt, synthetic construct
  source 1..20: mol_type = other RNA
ggggccacaaccttggtggg

SEQ ID NO: 9192 - RNA, 20 nt, synthetic construct
  source 1..20: mol_type = other RNA
gggccacaaccttggtggga

SEQ ID NO: 9193 - RNA, 20 nt, synthetic construct
  source 1..20: mol_type = other RNA
ggccacaaccttggtgggag

SEQ ID NO: 9194 - RNA, 20 nt, synthetic construct
  source 1..20: mol_type = other RNA
gccacaaccttggtgggagg

SEQ ID NO: 9195 - RNA, 20 nt, synthetic construct
  source 1..20: mol_type = other RNA
gccccctcccaccaaggttg

SEQ ID NO: 9196 - RNA, 20 nt, synthetic construct
  source 1..20: mol_type = other RNA
ttggtgggagggggcactgc

SEQ ID NO: 9197 - RNA, 20 nt, synthetic construct
  source 1..20: mol_type = other RNA
tggtgggagggggcactgcc

SEQ ID NO: 9198 - RNA, 20 nt, synthetic construct
  source 1..20: mol_type = other RNA
ggtgggagggggcactgccg

SEQ ID NO: 9199 - RNA, 20 nt, synthetic construct
  source 1..20: mol_type = other RNA
ggcagtgccccctcccacca

SEQ ID NO: 9200 - RNA, 20 nt, synthetic construct
  source 1..20: mol_type = other RNA
gggagggggcactgccgggg

SEQ ID NO: 9201 - RNA, 20 nt, synthetic construct
  source 1..20: mol_type = other RNA
gggcactgccggggaggaca

SEQ ID NO: 9202 - RNA, 20 nt, synthetic construct
  source 1..20: mol_type = other RNA
ggggaggacacggccaccac

SEQ ID NO: 9203 - RNA, 20 nt, synthetic construct
  source 1..20: mol_type = other RNA
agtggtggccgtgtcctccc

SEQ ID NO: 9204 - RNA, 20 nt, synthetic construct
  source 1..20: mol_type = other RNA
acggccaccactggctcctc

SEQ ID NO: 9205 - RNA, 20 nt, synthetic construct
  source 1..20: mol_type = other RNA
actggctcctcaggctcgtc

SEQ ID NO: 9206 - RNA, 20 nt, synthetic construct
  source 1..20: mol_type = other RNA
ggacgagcctgaggagccag

SEQ ID NO: 9207 - RNA, 20 nt, synthetic construct
  source 1..20: mol_type = other RNA
ctcaggctcgtccggcatct

SEQ ID NO: 9208 - RNA, 20 nt, synthetic construct
  source 1..20: mol_type = other RNA
caagatgccggacgagcctg

SEQ ID NO: 9209 - RNA, 20 nt, synthetic construct
  source 1..20: mol_type = other RNA
aatgcgctttgccaagatgc

SEQ ID NO: 9210 - RNA, 20 nt, synthetic construct
  source 1..20: mol_type = other RNA
agcgcatttcgaacacatcc

SEQ ID NO: 9211 - RNA, 20 nt, synthetic construct
  source 1..20: mol_type = other RNA
atttcgaacacatcctggtg

SEQ ID NO: 9212 - RNA, 20 nt, synthetic construct
  source 1..20: mol_type = other RNA
tttcgaacacatcctggtga

SEQ ID NO: 9213 - RNA, 20 nt, synthetic construct
  source 1..20: mol_type = other RNA
cagcatgtctttccctcacc

SEQ ID NO: 9214 - RNA, 20 nt, synthetic construct
  source 1..20: mol_type = other RNA
gcgccctcccaagcctcacc

SEQ ID NO: 9215 - RNA, 20 nt, synthetic construct
  source 1..20: mol_type = other RNA
gctccaggtgaggcttggga

SEQ ID NO: 9216 - RNA, 20 nt, synthetic construct
  source 1..20: mol_type = other RNA
caagcctcacctggagcttg

SEQ ID NO: 9217 - RNA, 20 nt, synthetic construct
  source 1..20: mol_type = other RNA
aagcctcacctggagcttgc

SEQ ID NO: 9218 - RNA, 20 nt, synthetic construct
  source 1..20: mol_type = other RNA
gcaagctccaggtgaggctt

SEQ ID NO: 9219 - RNA, 20 nt, synthetic construct
  source 1..20: mol_type = other RNA
cgcaagctccaggtgaggct

SEQ ID NO: 9220 - RNA, 20 nt, synthetic construct
  source 1..20: mol_type = other RNA
cacctggagcttgcgggcca

SEQ ID NO: 9221 - RNA, 20 nt, synthetic construct
  source 1..20: mol_type = other RNA
tggcccgcaagctccaggtg

SEQ ID NO: 9222 - RNA, 20 nt, synthetic construct
  source 1..20: mol_type = other RNA
ggccatggcccgcaagctcc

SEQ ID NO: 9223 - RNA, 20 nt, synthetic construct
  source 1..20: mol_type = other RNA
gggccatggccaccacctca

SEQ ID NO: 9224 - RNA, 20 nt, synthetic construct
  source 1..20: mol_type = other RNA
atggccaccacctcatggtc

SEQ ID NO: 9225 - RNA, 20 nt, synthetic construct
  source 1..20: mol_type = other RNA
gccaccacctcatggtcagg

SEQ ID NO: 9226 - RNA, 20 nt, synthetic construct
  source 1..20: mol_type = other RNA
ccaccacctcatggtcagga

SEQ ID NO: 9227 - RNA, 20 nt, synthetic construct
  source 1..20: mol_type = other RNA
ccctcctgaccatgaggtgg

SEQ ID NO: 9228 - RNA, 20 nt, synthetic construct
  source 1..20: mol_type = other RNA
caaccctcctgaccatgagg

SEQ ID NO: 9229 - RNA, 20 nt, synthetic construct
  source 1..20: mol_type = other RNA
gtacaaccctcctgaccatg

SEQ ID NO: 9230 - RNA, 20 nt, synthetic construct
  source 1..20: mol_type = other RNA
agggttgtacttatagcagt

SEQ ID NO: 9231 - RNA, 20 nt, synthetic construct
  source 1..20: mol_type = other RNA
agcagttggagaacatcaat

SEQ ID NO: 9232 - RNA, 20 nt, synthetic construct
  source 1..20: mol_type = other RNA
caccaaactcctgagcatca

SEQ ID NO: 9233 - RNA, 20 nt, synthetic construct
  source 1..20: mol_type = other RNA
taccgtgatgctcaggagtt

SEQ ID NO: 9234 - RNA, 20 nt, synthetic construct
  source 1..20: mol_type = other RNA
cctgagcatcacggtactca

SEQ ID NO: 9235 - RNA, 20 nt, synthetic construct
  source 1..20: mol_type = other RNA
ctgagcatcacggtactcac

SEQ ID NO: 9236 - RNA, 20 nt, synthetic construct
  source 1..20: mol_type = other RNA
ccgtgagtaccgtgatgctc

SEQ ID NO: 9237 - RNA, 20 nt, synthetic construct
  source 1..20: mol_type = other RNA
cacgggcctccagtttagac

SEQ ID NO: 9238 - RNA, 20 nt, synthetic construct
  source 1..20: mol_type = other RNA
tgttttccagtctaaactgg

SEQ ID NO: 9239 - RNA, 20 nt, synthetic construct
  source 1..20: mol_type = other RNA
tcttgttttccagtctaaac

SEQ ID NO: 9240 - RNA, 20 nt, synthetic construct
  source 1..20: mol_type = other RNA
gcgggatgtgcctgagggaa

SEQ ID NO: 9241 - RNA, 20 nt, synthetic construct
  source 1..20: mol_type = other RNA
agcgggatgtgcctgaggga

SEQ ID NO: 9242 - RNA, 20 nt, synthetic construct
  source 1..20: mol_type = other RNA
ggttagcgggatgtgcctga

SEQ ID NO: 9243 - RNA, 20 nt, synthetic construct
  source 1..20: mol_type = other RNA
aggttagcgggatgtgcctg

SEQ ID NO: 9244 - RNA, 20 nt, synthetic construct
  source 1..20: mol_type = other RNA
tgagcacaatcaaggttagc

SEQ ID NO: 9245 - RNA, 20 nt, synthetic construct
  source 1..20: mol_type = other RNA
atgagcacaatcaaggttag

SEQ ID NO: 9246 - RNA, 20 nt, synthetic construct
  source 1..20: mol_type = other RNA
cttgattgtgctcatgtcca

SEQ ID NO: 9247 - RNA, 20 nt, synthetic construct
  source 1..20: mol_type = other RNA
ttgattgtgctcatgtccat

SEQ ID NO: 9248 - RNA, 20 nt, synthetic construct
  source 1..20: mol_type = other RNA
tgattgtgctcatgtccatg

SEQ ID NO: 9249 - RNA, 20 nt, synthetic construct
  source 1..20: mol_type = other RNA
catggacatgagcacaatca

SEQ ID NO: 9250 - RNA, 20 nt, synthetic construct
  source 1..20: mol_type = other RNA
tgacatcatcaagcacccca

SEQ ID NO: 9251 - RNA, 20 nt, synthetic construct
  source 1..20: mol_type = other RNA
tgatgtcacagtagtcgtgt

SEQ ID NO: 9252 - RNA, 20 nt, synthetic construct
  source 1..20: mol_type = other RNA
cccagtgcctccacgtccac

SEQ ID NO: 9253 - RNA, 20 nt, synthetic construct
  source 1..20: mol_type = other RNA
cctgtggacgtggaggcact

SEQ ID NO: 9254 - RNA, 20 nt, synthetic construct
  source 1..20: mol_type = other RNA
gcctgtggacgtggaggcac

SEQ ID NO: 9255 - RNA, 20 nt, synthetic construct
  source 1..20: mol_type = other RNA
cacgtccacaggcttgtaga

SEQ ID NO: 9256 - RNA, 20 nt, synthetic construct
  source 1..20: mol_type = other RNA
acgtccacaggcttgtagaa

SEQ ID NO: 9257 - RNA, 20 nt, synthetic construct
  source 1..20: mol_type = other RNA
cttctacaagcctgtggacg

SEQ ID NO: 9258 - RNA, 20 nt, synthetic construct
  source 1..20: mol_type = other RNA
cacaggcttgtagaagggcc

SEQ ID NO: 9259 - RNA, 20 nt, synthetic construct
  source 1..20: mol_type = other RNA
ctggcccttctacaagcctg

SEQ ID NO: 9260 - RNA, 20 nt, synthetic construct
  source 1..20: mol_type = other RNA
cttgtagaagggccaggcgt

SEQ ID NO: 9261 - RNA, 20 nt, synthetic construct
  source 1..20: mol_type = other RNA
gtagaagggccaggcgtagg

SEQ ID NO: 9262 - RNA, 20 nt, synthetic construct
  source 1..20: mol_type = other RNA
ggcgtaggcggcgtgcttct

SEQ ID NO: 9263 - RNA, 20 nt, synthetic construct
  source 1..20: mol_type = other RNA
agaagcacgccgcctacgcc

SEQ ID NO: 9264 - RNA, 20 nt, synthetic construct
  source 1..20: mol_type = other RNA
tcttggcaaacatctccttg

SEQ ID NO: 9265 - RNA, 20 nt, synthetic construct
  source 1..20: mol_type = other RNA
gtgctgcagcggcatcctca

SEQ ID NO: 9266 - RNA, 20 nt, synthetic construct
  source 1..20: mol_type = other RNA
gagcagctcaagtgctgcag

SEQ ID NO: 9267 - RNA, 20 nt, synthetic construct
  source 1..20: mol_type = other RNA
gagaccttgctgctcttctc

SEQ ID NO: 9268 - RNA, 20 nt, synthetic construct
  source 1..20: mol_type = other RNA
agagaagagcagcaaggtct

SEQ ID NO: 9269 - RNA, 20 nt, synthetic construct
  source 1..20: mol_type = other RNA
ttgctgctcttctctggtgc

SEQ ID NO: 9270 - RNA, 20 nt, synthetic construct
  source 1..20: mol_type = other RNA
tgctgctcttctctggtgct

SEQ ID NO: 9271 - RNA, 20 nt, synthetic construct
  source 1..20: mol_type = other RNA
agcaccagagaagagcagca

SEQ ID NO: 9272 - RNA, 20 nt, synthetic construct
  source 1..20: mol_type = other RNA
tgctgggtgctgctgagagt

SEQ ID NO: 9273 - RNA, 20 nt, synthetic construct
  source 1..20: mol_type = other RNA
gctgggtgctgctgagagtc

SEQ ID NO: 9274 - RNA, 20 nt, synthetic construct
  source 1..20: mol_type = other RNA
gagtcgggcacgtccttctt

SEQ ID NO: 9275 - RNA, 20 nt, synthetic construct
  source 1..20: mol_type = other RNA
tcgggcacgtccttctttgg

SEQ ID NO: 9276 - RNA, 20 nt, synthetic construct
  source 1..20: mol_type = other RNA
tccttctttggaggtttcac

SEQ ID NO: 9277 - RNA, 20 nt, synthetic construct
  source 1..20: mol_type = other RNA
tctttggaggtttcacaggc

SEQ ID NO: 9278 - RNA, 20 nt, synthetic construct
  source 1..20: mol_type = other RNA
gcctgtgaaacctccaaaga

SEQ ID NO: 9279 - RNA, 20 nt, synthetic construct
  source 1..20: mol_type = other RNA
gccggctgctctcccgccgc

SEQ ID NO: 9280 - RNA, 20 nt, synthetic construct
  source 1..20: mol_type = other RNA
gccagcggcgggagagcagc

SEQ ID NO: 9281 - RNA, 20 nt, synthetic construct
  source 1..20: mol_type = other RNA
ctcccgccgctggcccagct

SEQ ID NO: 9282 - RNA, 20 nt, synthetic construct
  source 1..20: mol_type = other RNA
ccgccgctggcccagcttgg

SEQ ID NO: 9283 - RNA, 20 nt, synthetic construct
  source 1..20: mol_type = other RNA
caccaagctgggccagcggc

SEQ ID NO: 9284 - RNA, 20 nt, synthetic construct
  source 1..20: mol_type = other RNA
ccaccaagctgggccagcgg

SEQ ID NO: 9285 - RNA, 20 nt, synthetic construct
  source 1..20: mol_type = other RNA
ctggcccagcttggtggtct

SEQ ID NO: 9286 - RNA, 20 nt, synthetic construct
  source 1..20: mol_type = other RNA
tggcccagcttggtggtctt

SEQ ID NO: 9287 - RNA, 20 nt, synthetic construct
  source 1..20: mol_type = other RNA
agaccaccaagctgggccag

SEQ ID NO: 9288 - RNA, 20 nt, synthetic construct
  source 1..20: mol_type = other RNA
agcttggtggtcttgggctc

SEQ ID NO: 9289 - RNA, 20 nt, synthetic construct
  source 1..20: mol_type = other RNA
gcttggtggtcttgggctcc

SEQ ID NO: 9290 - RNA, 20 nt, synthetic construct
  source 1..20: mol_type = other RNA
cttggtggtcttgggctccg

SEQ ID NO: 9291 - RNA, 20 nt, synthetic construct
  source 1..20: mol_type = other RNA
ttggtggtcttgggctccgg

SEQ ID NO: 9292 - RNA, 20 nt, synthetic construct
  source 1..20: mol_type = other RNA
cttgggctccgggggcagcg

SEQ ID NO: 9293 - RNA, 20 nt, synthetic construct
  source 1..20: mol_type = other RNA
ttgggctccgggggcagcga

SEQ ID NO: 9294 - RNA, 20 nt, synthetic construct
  source 1..20: mol_type = other RNA
ggctccgggggcagcgaggg

SEQ ID NO: 9295 - RNA, 20 nt, synthetic construct
  source 1..20: mol_type = other RNA
cgagccaccctcgctgcccc

SEQ ID NO: 9296 - RNA, 20 nt, synthetic construct
  source 1..20: mol_type = other RNA
cagcgagggtggctcgtgaa

SEQ ID NO: 9297 - RNA, 20 nt, synthetic construct
  source 1..20: mol_type = other RNA
agcgagggtggctcgtgaat

SEQ ID NO: 9298 - RNA, 20 nt, synthetic construct
  source 1..20: mol_type = other RNA
gcgagggtggctcgtgaatg

SEQ ID NO: 9299 - RNA, 20 nt, synthetic construct
  source 1..20: mol_type = other RNA
tggctcgtgaatggggtcaa

SEQ ID NO: 9300 - RNA, 20 nt, synthetic construct
  source 1..20: mol_type = other RNA
ctcgtgaatggggtcaatgg

SEQ ID NO: 9301 - RNA, 20 nt, synthetic construct
  source 1..20: mol_type = other RNA
gtgaatggggtcaatggtgg

SEQ ID NO: 9302 - RNA, 20 nt, synthetic construct
  source 1..20: mol_type = other RNA
tgaatggggtcaatggtggt

SEQ ID NO: 9303 - RNA, 20 nt, synthetic construct
  source 1..20: mol_type = other RNA
gaatggggtcaatggtggtg

SEQ ID NO: 9304 - RNA, 20 nt, synthetic construct
  source 1..20: mol_type = other RNA
aatggggtcaatggtggtgg

SEQ ID NO: 9305 - RNA, 20 nt, synthetic construct
  source 1..20: mol_type = other RNA
ggggtcaatggtggtggggg

SEQ ID NO: 9306 - RNA, 20 nt, synthetic construct
  source 1..20: mol_type = other RNA
gtcaatggtggtgggggtgg

SEQ ID NO: 9307 - RNA, 20 nt, synthetic construct
  source 1..20: mol_type = other RNA
agacaaagaagggagtgaag

SEQ ID NO: 9308 - RNA, 20 nt, synthetic construct
  source 1..20: mol_type = other RNA
ttctttgtctgccaagaaca

SEQ ID NO: 9309 - RNA, 20 nt, synthetic construct
  source 1..20: mol_type = other RNA
tgttcttggcagacaaagaa

SEQ ID NO: 9310 - RNA, 20 nt, synthetic construct
  source 1..20: mol_type = other RNA
gtgttcttggcagacaaaga

SEQ ID NO: 9311 - RNA, 20 nt, synthetic construct
  source 1..20: mol_type = other RNA
ccaagaacacggacgccaac

SEQ ID NO: 9312 - RNA, 20 nt, synthetic construct
  source 1..20: mol_type = other RNA
tgagtctcctggactctgga

SEQ ID NO: 9313 - RNA, 20 nt, synthetic construct
  source 1..20: mol_type = other RNA
gtgagtctcctggactctgg

SEQ ID NO: 9314 - RNA, 20 nt, synthetic construct
  source 1..20: mol_type = other RNA
aaggtgagtctcctggactc

SEQ ID NO: 9315 - RNA, 20 nt, synthetic construct
  source 1..20: mol_type = other RNA
tccaggagactcaccttcac

SEQ ID NO: 9316 - RNA, 20 nt, synthetic construct
  source 1..20: mol_type = other RNA
agactcaccttcacaggctg

SEQ ID NO: 9317 - RNA, 20 nt, synthetic construct
  source 1..20: mol_type = other RNA
gactcaccttcacaggctgt

SEQ ID NO: 9318 - RNA, 20 nt, synthetic construct
  source 1..20: mol_type = other RNA
actcaccttcacaggctgtg

SEQ ID NO: 9319 - RNA, 20 nt, synthetic construct
  source 1..20: mol_type = other RNA
caccttcacaggctgtgggg

SEQ ID NO: 9320 - RNA, 20 nt, synthetic construct
  source 1..20: mol_type = other RNA
ggccaccccacagcctgtga

SEQ ID NO: 9321 - RNA, 20 nt, synthetic construct
  source 1..20: mol_type = other RNA
ctgtggggtggccgcgatga

SEQ ID NO: 9322 - RNA, 20 nt, synthetic construct
  source 1..20: mol_type = other RNA
tgtggggtggccgcgatgat

SEQ ID NO: 9323 - RNA, 20 nt, synthetic construct
  source 1..20: mol_type = other RNA
ggggtggccgcgatgatggg

SEQ ID NO: 9324 - RNA, 20 nt, synthetic construct
  source 1..20: mol_type = other RNA
gggtggccgcgatgatgggt

SEQ ID NO: 9325 - RNA, 20 nt, synthetic construct
  source 1..20: mol_type = other RNA
tggccgcgatgatgggtggg

SEQ ID NO: 9326 - RNA, 20 nt, synthetic construct
  source 1..20: mol_type = other RNA
gagccacccacccatcatcg

SEQ ID NO: 9327 - RNA, 20 nt, synthetic construct
  source 1..20: mol_type = other RNA
gatgggtgggtggctctgta

SEQ ID NO: 9328 - RNA, 20 nt, synthetic construct
  source 1..20: mol_type = other RNA
atgggtgggtggctctgtac

SEQ ID NO: 9329 - RNA, 20 nt, synthetic construct
  source 1..20: mol_type = other RNA
gtgggtggctctgtacgggc

SEQ ID NO: 9330 - RNA, 20 nt, synthetic construct
  source 1..20: mol_type = other RNA
tgggtggctctgtacgggct

SEQ ID NO: 9331 - RNA, 20 nt, synthetic construct
  source 1..20: mol_type = other RNA
gggtggctctgtacgggctg

SEQ ID NO: 9332 - RNA, 20 nt, synthetic construct
  source 1..20: mol_type = other RNA
ctctgtacgggctggggagc

SEQ ID NO: 9333 - RNA, 20 nt, synthetic construct
  source 1..20: mol_type = other RNA
tacgggctggggagctggag

SEQ ID NO: 9334 - RNA, 20 nt, synthetic construct
  source 1..20: mol_type = other RNA
acgggctggggagctggagc

SEQ ID NO: 9335 - RNA, 20 nt, synthetic construct
  source 1..20: mol_type = other RNA
ggctggggagctggagcggg

SEQ ID NO: 9336 - RNA, 20 nt, synthetic construct
  source 1..20: mol_type = other RNA
gctggggagctggagcgggt

SEQ ID NO: 9337 - RNA, 20 nt, synthetic construct
  source 1..20: mol_type = other RNA
ctggggagctggagcgggtg

SEQ ID NO: 9338 - RNA, 20 nt, synthetic construct
  source 1..20: mol_type = other RNA
tggggagctggagcgggtgg

SEQ ID NO: 9339 - RNA, 20 nt, synthetic construct
  source 1..20: mol_type = other RNA
gctggagcgggtgggggttg

SEQ ID NO: 9340 - RNA, 20 nt, synthetic construct
  source 1..20: mol_type = other RNA
gagcgggtgggggttgtggc

SEQ ID NO: 9341 - RNA, 20 nt, synthetic construct
  source 1..20: mol_type = other RNA
agcgggtgggggttgtggct

SEQ ID NO: 9342 - RNA, 20 nt, synthetic construct
  source 1..20: mol_type = other RNA
gcgggtgggggttgtggctg

SEQ ID NO: 9343 - RNA, 20 nt, synthetic construct
  source 1..20: mol_type = other RNA
cgggtgggggttgtggctgg

SEQ ID NO: 9344 - RNA, 20 nt, synthetic construct
  source 1..20: mol_type = other RNA
gggtgggggttgtggctggg

SEQ ID NO: 9345 - RNA, 20 nt, synthetic construct
  source 1..20: mol_type = other RNA
ggtgggggttgtggctgggg

SEQ ID NO: 9346 - RNA, 20 nt, synthetic construct
  source 1..20: mol_type = other RNA
ggttgtggctgggggggcac

SEQ ID NO: 9347 - RNA, 20 nt, synthetic construct
  source 1..20: mol_type = other RNA
tgtggctgggggggcactgg

SEQ ID NO: 9348 - RNA, 20 nt, synthetic construct
  source 1..20: mol_type = other RNA
gtggctgggggggcactggc

SEQ ID NO: 9349 - RNA, 20 nt, synthetic construct
  source 1..20: mol_type = other RNA
tggctgggggggcactggcg

SEQ ID NO: 9350 - RNA, 20 nt, synthetic construct
  source 1..20: mol_type = other RNA
ggctgggggggcactggcgg

SEQ ID NO: 9351 - RNA, 20 nt, synthetic construct
  source 1..20: mol_type = other RNA
actggcgggggcgtctgcag

SEQ ID NO: 9352 - RNA, 20 nt, synthetic construct
  source 1..20: mol_type = other RNA
gcgggggcgtctgcagtggc

SEQ ID NO: 9353 - RNA, 20 nt, synthetic construct
  source 1..20: mol_type = other RNA
cgggggcgtctgcagtggct

SEQ ID NO: 9354 - RNA, 20 nt, synthetic construct
  source 1..20: mol_type = other RNA
gggggcgtctgcagtggctg

SEQ ID NO: 9355 - RNA, 20 nt, synthetic construct
  source 1..20: mol_type = other RNA
ggcgtctgcagtggctgggg

SEQ ID NO: 9356 - RNA, 20 nt, synthetic construct
  source 1..20: mol_type = other RNA
ggaggcaccactgtcatgac

SEQ ID NO: 9357 - RNA, 20 nt, synthetic construct
  source 1..20: mol_type = other RNA
gaggcaccactgtcatgaca

SEQ ID NO: 9358 - RNA, 20 nt, synthetic construct
  source 1..20: mol_type = other RNA
aggcaccactgtcatgacag

SEQ ID NO: 9359 - RNA, 20 nt, synthetic construct
  source 1..20: mol_type = other RNA
ccactgtcatgacaggggtc

SEQ ID NO: 9360 - RNA, 20 nt, synthetic construct
  source 1..20: mol_type = other RNA
ccagacccctgtcatgacag

SEQ ID NO: 9361 - RNA, 20 nt, synthetic construct
  source 1..20: mol_type = other RNA
tgacaggggtctggacgatg

SEQ ID NO: 9362 - RNA, 20 nt, synthetic construct
  source 1..20: mol_type = other RNA
ggggtctggacgatgaggtc

SEQ ID NO: 9363 - RNA, 20 nt, synthetic construct
  source 1..20: mol_type = other RNA
gggtctggacgatgaggtcc

SEQ ID NO: 9364 - RNA, 20 nt, synthetic construct
  source 1..20: mol_type = other RNA
ggtctggacgatgaggtccg

SEQ ID NO: 9365 - RNA, 20 nt, synthetic construct
  source 1..20: mol_type = other RNA
gacgatgaggtccggggtga

SEQ ID NO: 9366 - RNA, 20 nt, synthetic construct
  source 1..20: mol_type = other RNA
atgaggtccggggtgacggc

SEQ ID NO: 9367 - RNA, 20 nt, synthetic construct
  source 1..20: mol_type = other RNA
tgaggtccggggtgacggca

SEQ ID NO: 9368 - RNA, 20 nt, synthetic construct
  source 1..20: mol_type = other RNA
gtccggggtgacggcaggga

SEQ ID NO: 9369 - RNA, 20 nt, synthetic construct
  source 1..20: mol_type = other RNA
tccggggtgacggcagggaa

SEQ ID NO: 9370 - RNA, 20 nt, synthetic construct
  source 1..20: mol_type = other RNA
ccggggtgacggcagggaag

SEQ ID NO: 9371 - RNA, 20 nt, synthetic construct
  source 1..20: mol_type = other RNA
gtgacggcagggaaggggtg

SEQ ID NO: 9372 - RNA, 20 nt, synthetic construct
  source 1..20: mol_type = other RNA
ggcagggaaggggtgaggcg

SEQ ID NO: 9373 - RNA, 20 nt, synthetic construct
  source 1..20: mol_type = other RNA
gggtgaggcgtggcctgcac

SEQ ID NO: 9374 - RNA, 20 nt, synthetic construct
  source 1..20: mol_type = other RNA
tgaggcgtggcctgcacagg

SEQ ID NO: 9375 - RNA, 20 nt, synthetic construct
  source 1..20: mol_type = other RNA
ggcgtggcctgcacaggagg

SEQ ID NO: 9376 - RNA, 20 nt, synthetic construct
  source 1..20: mol_type = other RNA
gcctgcacaggaggaggatt

SEQ ID NO: 9377 - RNA, 20 nt, synthetic construct
  source 1..20: mol_type = other RNA
acaggaggaggattcggctg

SEQ ID NO: 9378 - RNA, 20 nt, synthetic construct
  source 1..20: mol_type = other RNA
caggaggaggattcggctga

SEQ ID NO: 9379 - RNA, 20 nt, synthetic construct
  source 1..20: mol_type = other RNA
aggaggaggattcggctgag

SEQ ID NO: 9380 - RNA, 20 nt, synthetic construct
  source 1..20: mol_type = other RNA
gaggattcggctgaggggtc

SEQ ID NO: 9381 - RNA, 20 nt, synthetic construct
  source 1..20: mol_type = other RNA
aggattcggctgaggggtct

SEQ ID NO: 9382 - RNA, 20 nt, synthetic construct
  source 1..20: mol_type = other RNA
ggctgaggggtctgggtctg

SEQ ID NO: 9383 - RNA, 20 nt, synthetic construct
  source 1..20: mol_type = other RNA
tgaggggtctgggtctgcgg

SEQ ID NO: 9384 - RNA, 20 nt, synthetic construct
  source 1..20: mol_type = other RNA
gtcgatgcttgagttgtgtt

SEQ ID NO: 9385 - RNA, 20 nt, synthetic construct
  source 1..20: mol_type = other RNA
ttgagttgtgtttggtaccg

SEQ ID NO: 9386 - RNA, 20 nt, synthetic construct
  source 1..20: mol_type = other RNA
tttggtaccgtggaaacgcc

SEQ ID NO: 9387 - RNA, 20 nt, synthetic construct
  source 1..20: mol_type = other RNA
agcaaaacctggcgtttcca

SEQ ID NO: 9388 - RNA, 20 nt, synthetic construct
  source 1..20: mol_type = other RNA
tttgtagggacagcaaaacc

SEQ ID NO: 9389 - RNA, 20 nt, synthetic construct
  source 1..20: mol_type = other RNA
ccctacaaatcataataaga

SEQ ID NO: 9390 - RNA, 20 nt, synthetic construct
  source 1..20: mol_type = other RNA
ccgtcttattatgatttgta

SEQ ID NO: 9391 - RNA, 20 nt, synthetic construct
  source 1..20: mol_type = other RNA
gccgtcttattatgatttgt

SEQ ID NO: 9392 - RNA, 20 nt, synthetic construct
  source 1..20: mol_type = other RNA
ggacgtgggaggaaagaaac

SEQ ID NO: 9393 - RNA, 20 nt, synthetic construct
  source 1..20: mol_type = other RNA
cacgtcctcttccttttgcc

SEQ ID NO: 9394 - RNA, 20 nt, synthetic construct
  source 1..20: mol_type = other RNA
aggcaaaaggaagaggacgt

SEQ ID NO: 9395 - RNA, 20 nt, synthetic construct
  source 1..20: mol_type = other RNA
caggcaaaaggaagaggacg

SEQ ID NO: 9396 - RNA, 20 nt, synthetic construct
  source 1..20: mol_type = other RNA
atagtccaggcaaaaggaag

SEQ ID NO: 9397 - RNA, 20 nt, synthetic construct
  source 1..20: mol_type = other RNA
tgcctggactatcatgatct

SEQ ID NO: 9398 - RNA, 20 nt, synthetic construct
  source 1..20: mol_type = other RNA
aaccgagatcatgatagtcc

SEQ ID NO: 9399 - RNA, 20 nt, synthetic construct
  source 1..20: mol_type = other RNA
catgatctcggtttcttctg

SEQ ID NO: 9400 - RNA, 20 nt, synthetic construct
  source 1..20: mol_type = other RNA
atgatctcggtttcttctgt

SEQ ID NO: 9401 - RNA, 20 nt, synthetic construct
  source 1..20: mol_type = other RNA
agtcttaatggcagaagctc

SEQ ID NO: 9402 - RNA, 20 nt, synthetic construct
  source 1..20: mol_type = other RNA
attaagactatgtcatctcc

SEQ ID NO: 9403 - RNA, 20 nt, synthetic construct
  source 1..20: mol_type = other RNA
tggagatgacatagtcttaa

SEQ ID NO: 9404 - RNA, 20 nt, synthetic construct
  source 1..20: mol_type = other RNA
agactatgtcatctccaggc

SEQ ID NO: 9405 - RNA, 20 nt, synthetic construct
  source 1..20: mol_type = other RNA
tgtcatctccaggctggata

SEQ ID NO: 9406 - RNA, 20 nt, synthetic construct
  source 1..20: mol_type = other RNA
caggctggataaggagacac

SEQ ID NO: 9407 - RNA, 20 nt, synthetic construct
  source 1..20: mol_type = other RNA
aggctggataaggagacaca

SEQ ID NO: 9408 - RNA, 20 nt, synthetic construct
  source 1..20: mol_type = other RNA
ggctggataaggagacacag

SEQ ID NO: 9409 - RNA, 20 nt, synthetic construct
  source 1..20: mol_type = other RNA
ctgtgtctccttatccagcc

SEQ ID NO: 9410 - RNA, 20 nt, synthetic construct
  source 1..20: mol_type = other RNA
actcacctacccatctcttc

SEQ ID NO: 9411 - RNA, 20 nt, synthetic construct
  source 1..20: mol_type = other RNA
ctcacctacccatctcttct

SEQ ID NO: 9412 - RNA, 20 nt, synthetic construct
  source 1..20: mol_type = other RNA
aatgcccagaagagatgggt

SEQ ID NO: 9413 - RNA, 20 nt, synthetic construct
  source 1..20: mol_type = other RNA
taaaaatgcccagaagagat

SEQ ID NO: 9414 - RNA, 20 nt, synthetic construct
  source 1..20: mol_type = other RNA
gtaaaaatgcccagaagaga

SEQ ID NO: 9415 - RNA, 20 nt, synthetic construct
  source 1..20: mol_type = other RNA
tttacccactacaccagcag

SEQ ID NO: 9416 - RNA, 20 nt, synthetic construct
  source 1..20: mol_type = other RNA
ttgacctctgctggtgtagt

SEQ ID NO: 9417 - RNA, 20 nt, synthetic construct
  source 1..20: mol_type = other RNA
tttgacctctgctggtgtag

SEQ ID NO: 9418 - RNA, 20 nt, synthetic construct
  source 1..20: mol_type = other RNA
actcagcttttgacctctgc

SEQ ID NO: 9419 - RNA, 20 nt, synthetic construct
  source 1..20: mol_type = other RNA
ccagagtcgttctatttgaa

SEQ ID NO: 9420 - RNA, 20 nt, synthetic construct
  source 1..20: mol_type = other RNA
cagagtcgttctatttgaaa

SEQ ID NO: 9421 - RNA, 20 nt, synthetic construct
  source 1..20: mol_type = other RNA
ttcaaatagaacgactctgg

SEQ ID NO: 9422 - RNA, 20 nt, synthetic construct
  source 1..20: mol_type = other RNA
cctttcaaatagaacgactc

SEQ ID NO: 9423 - RNA, 20 nt, synthetic construct
  source 1..20: mol_type = other RNA
acaaggtgagatgtaggggt

SEQ ID NO: 9424 - RNA, 20 nt, synthetic construct
  source 1..20: mol_type = other RNA
aacaaggtgagatgtagggg

SEQ ID NO: 9425 - RNA, 20 nt, synthetic construct
  source 1..20: mol_type = other RNA
tacaacaaggtgagatgtag

SEQ ID NO: 9426 - RNA, 20 nt, synthetic construct
  source 1..20: mol_type = other RNA
ctacaacaaggtgagatgta

SEQ ID NO: 9427 - RNA, 20 nt, synthetic construct
  source 1..20: mol_type = other RNA
tctacaacaaggtgagatgt

SEQ ID NO: 9428 - RNA, 20 nt, synthetic construct
  source 1..20: mol_type = other RNA
aaattgttacatctacaaca

SEQ ID NO: 9429 - RNA, 20 nt, synthetic construct
  source 1..20: mol_type = other RNA
taaacatagtgttgaagtcc

SEQ ID NO: 9430 - RNA, 20 nt, synthetic construct
  source 1..20: mol_type = other RNA
gaatgctcaggaatgtatcc

SEQ ID NO: 9431 - RNA, 20 nt, synthetic construct
  source 1..20: mol_type = other RNA
caactattactggaatgctc

SEQ ID NO: 9432 - RNA, 20 nt, synthetic construct
  source 1..20: mol_type = other RNA
gcttggaaaacaactattac

SEQ ID NO: 9433 - RNA, 20 nt, synthetic construct
  source 1..20: mol_type = other RNA
gggaacaataaagaagcgct

SEQ ID NO: 9434 - RNA, 20 nt, synthetic construct
  source 1..20: mol_type = other RNA
tttattgttcccatatccat

SEQ ID NO: 9435 - RNA, 20 nt, synthetic construct
  source 1..20: mol_type = other RNA
attaaaacgcctatggatat

SEQ ID NO: 9436 - RNA, 20 nt, synthetic construct
  source 1..20: mol_type = other RNA
cattaaaacgcctatggata

SEQ ID NO: 9437 - RNA, 20 nt, synthetic construct
  source 1..20: mol_type = other RNA
taagatcattaaaacgccta

SEQ ID NO: 9438 - RNA, 20 nt, synthetic construct
  source 1..20: mol_type = other RNA
taatgatcttatagtaatcc

SEQ ID NO: 9439 - RNA, 20 nt, synthetic construct
  source 1..20: mol_type = other RNA
acttttgctctctgctctcc

SEQ ID NO: 9440 - RNA, 20 nt, synthetic construct
  source 1..20: mol_type = other RNA
agtagtgtgggcagggccca

SEQ ID NO: 9441 - RNA, 20 nt, synthetic construct
  source 1..20: mol_type = other RNA
gccctgcccacactactcac

SEQ ID NO: 9442 - RNA, 20 nt, synthetic construct
  source 1..20: mol_type = other RNA
ccctgcccacactactcaca

SEQ ID NO: 9443 - RNA, 20 nt, synthetic construct
  source 1..20: mol_type = other RNA
tgcccacactactcacaggg

SEQ ID NO: 9444 - RNA, 20 nt, synthetic construct
  source 1..20: mol_type = other RNA
ccctgtgagtagtgtgggca

SEQ ID NO: 9445 - RNA, 20 nt, synthetic construct
  source 1..20: mol_type = other RNA
tccctgtgagtagtgtgggc

SEQ ID NO: 9446 - RNA, 20 nt, synthetic construct
  source 1..20: mol_type = other RNA
aacctccctgtgagtagtgt

SEQ ID NO: 9447 - RNA, 20 nt, synthetic construct
  source 1..20: mol_type = other RNA
gaacctccctgtgagtagtg

SEQ ID NO: 9448 - RNA, 20 nt, synthetic construct
  source 1..20: mol_type = other RNA
cacagggaggttcagcttga

SEQ ID NO: 9449 - RNA, 20 nt, synthetic construct
  source 1..20: mol_type = other RNA
ttcagcttgacggcatccac

SEQ ID NO: 9450 - RNA, 20 nt, synthetic construct
  source 1..20: mol_type = other RNA
tgacggcatccacaggctgc

SEQ ID NO: 9451 - RNA, 20 nt, synthetic construct
  source 1..20: mol_type = other RNA
gcatccacaggctgctggaa

SEQ ID NO: 9452 - RNA, 20 nt, synthetic construct
  source 1..20: mol_type = other RNA
atggcctttccagcagcctg

SEQ ID NO: 9453 - RNA, 20 nt, synthetic construct
  source 1..20: mol_type = other RNA
gctggaaaggccatgcaaac

SEQ ID NO: 9454 - RNA, 20 nt, synthetic construct
  source 1..20: mol_type = other RNA
tatggaaacaccagtttgca

SEQ ID NO: 9455 - RNA, 20 nt, synthetic construct
  source 1..20: mol_type = other RNA
gagtggtgctcaagacacta

SEQ ID NO: 9456 - RNA, 20 nt, synthetic construct
  source 1..20: mol_type = other RNA
tcttgagcaccactctgagc

SEQ ID NO: 9457 - RNA, 20 nt, synthetic construct
  source 1..20: mol_type = other RNA
ctctgagcaggtattgcagt

SEQ ID NO: 9458 - RNA, 20 nt, synthetic construct
  source 1..20: mol_type = other RNA
actgcaatacctgctcagag

SEQ ID NO: 9459 - RNA, 20 nt, synthetic construct
  source 1..20: mol_type = other RNA
gagcaggtattgcagttggt

SEQ ID NO: 9460 - RNA, 20 nt, synthetic construct
  source 1..20: mol_type = other RNA
cagttggttggtctgcctct

SEQ ID NO: 9461 - RNA, 20 nt, synthetic construct
  source 1..20: mol_type = other RNA
agttggttggtctgcctctt

SEQ ID NO: 9462 - RNA, 20 nt, synthetic construct
  source 1..20: mol_type = other RNA
gtctgcctcttgggcttgtt

SEQ ID NO: 9463 - RNA, 20 nt, synthetic construct
  source 1..20: mol_type = other RNA
tctgcctcttgggcttgtta

SEQ ID NO: 9464 - RNA, 20 nt, synthetic construct
  source 1..20: mol_type = other RNA
cctcttgggcttgttagggt

SEQ ID NO: 9465 - RNA, 20 nt, synthetic construct
  source 1..20: mol_type = other RNA
cttgggcttgttagggttgg

SEQ ID NO: 9466 - RNA, 20 nt, synthetic construct
  source 1..20: mol_type = other RNA
ccaaccctaacaagcccaag

SEQ ID NO: 9467 - RNA, 20 nt, synthetic construct
  source 1..20: mol_type = other RNA
ttgttagggttggaggtctc

SEQ ID NO: 9468 - RNA, 20 nt, synthetic construct
  source 1..20: mol_type = other RNA
tgttagggttggaggtctct

SEQ ID NO: 9469 - RNA, 20 nt, synthetic construct
  source 1..20: mol_type = other RNA
gttagggttggaggtctctg

SEQ ID NO: 9470 - RNA, 20 nt, synthetic construct
  source 1..20: mol_type = other RNA
ttagggttggaggtctctgg

SEQ ID NO: 9471 - RNA, 20 nt, synthetic construct
  source 1..20: mol_type = other RNA
gggttggaggtctctggggg

SEQ ID NO: 9472 - RNA, 20 nt, synthetic construct
  source 1..20: mol_type = other RNA
ggttggaggtctctgggggc

SEQ ID NO: 9473 - RNA, 20 nt, synthetic construct
  source 1..20: mol_type = other RNA
gttggaggtctctgggggcg

SEQ ID NO: 9474 - RNA, 20 nt, synthetic construct
  source 1..20: mol_type = other RNA
ttggaggtctctgggggcgg

SEQ ID NO: 9475 - RNA, 20 nt, synthetic construct
  source 1..20: mol_type = other RNA
tggaggtctctgggggcggg

SEQ ID NO: 9476 - RNA, 20 nt, synthetic construct
  source 1..20: mol_type = other RNA
ggtctctgggggcggggggt

SEQ ID NO: 9477 - RNA, 20 nt, synthetic construct
  source 1..20: mol_type = other RNA
tgggggcggggggttggtgc

SEQ ID NO: 9478 - RNA, 20 nt, synthetic construct
  source 1..20: mol_type = other RNA
ggggttggtgctggctgcgt

SEQ ID NO: 9479 - RNA, 20 nt, synthetic construct
  source 1..20: mol_type = other RNA
ttggtgctggctgcgttggc

SEQ ID NO: 9480 - RNA, 20 nt, synthetic construct
  source 1..20: mol_type = other RNA
tgctggctgcgttggctggc

SEQ ID NO: 9481 - RNA, 20 nt, synthetic construct
  source 1..20: mol_type = other RNA
gctggctgcgttggctggct

SEQ ID NO: 9482 - RNA, 20 nt, synthetic construct
  source 1..20: mol_type = other RNA
ctggctgcgttggctggctg

SEQ ID NO: 9483 - RNA, 20 nt, synthetic construct
  source 1..20: mol_type = other RNA
ctgcgttggctggctggggt

SEQ ID NO: 9484 - RNA, 20 nt, synthetic construct
  source 1..20: mol_type = other RNA
tgcgttggctggctggggtt

SEQ ID NO: 9485 - RNA, 20 nt, synthetic construct
  source 1..20: mol_type = other RNA
tggctggctggggttgggcc

SEQ ID NO: 9486 - RNA, 20 nt, synthetic construct
  source 1..20: mol_type = other RNA
ggctggctggggttgggcct

SEQ ID NO: 9487 - RNA, 20 nt, synthetic construct
  source 1..20: mol_type = other RNA
gggcctgtgttgtagacatt

SEQ ID NO: 9488 - RNA, 20 nt, synthetic construct
  source 1..20: mol_type = other RNA
ggcctgtgttgtagacattt

SEQ ID NO: 9489 - RNA, 20 nt, synthetic construct
  source 1..20: mol_type = other RNA
aatgtctacaacacaggccc

SEQ ID NO: 9490 - RNA, 20 nt, synthetic construct
  source 1..20: mol_type = other RNA
ttcccaaatgtctacaacac

SEQ ID NO: 9491 - RNA, 20 nt, synthetic construct
  source 1..20: mol_type = other RNA
tctagtccatcccccattac

SEQ ID NO: 9492 - RNA, 20 nt, synthetic construct
  source 1..20: mol_type = other RNA
aatctgccagtaatggggga

SEQ ID NO: 9493 - RNA, 20 nt, synthetic construct
  source 1..20: mol_type = other RNA
gagaaatctgccagtaatgg

SEQ ID NO: 9494 - RNA, 20 nt, synthetic construct
  source 1..20: mol_type = other RNA
tgagaaatctgccagtaatg

SEQ ID NO: 9495 - RNA, 20 nt, synthetic construct
  source 1..20: mol_type = other RNA
ttgagaaatctgccagtaat

SEQ ID NO: 9496 - RNA, 20 nt, synthetic construct
  source 1..20: mol_type = other RNA
attgagaaatctgccagtaa

SEQ ID NO: 9497 - RNA, 20 nt, synthetic construct
  source 1..20: mol_type = other RNA
agatttctcaatctcgtccc

SEQ ID NO: 9498 - RNA, 20 nt, synthetic construct
  source 1..20: mol_type = other RNA
gatttctcaatctcgtccca

SEQ ID NO: 9499 - RNA, 20 nt, synthetic construct
  source 1..20: mol_type = other RNA
tgtctgcggagagcggccct

SEQ ID NO: 9500 - RNA, 20 nt, synthetic construct
  source 1..20: mol_type = other RNA
atgtctgcggagagcggccc

SEQ ID NO: 9501 - RNA, 20 nt, synthetic construct
  source 1..20: mol_type = other RNA
actagcatgtctgcggagag

SEQ ID NO: 9502 - RNA, 20 nt, synthetic construct
  source 1..20: mol_type = other RNA
tgggatcactagcatgtctg

SEQ ID NO: 9503 - RNA, 20 nt, synthetic construct
  source 1..20: mol_type = other RNA
atcccatcacattcttcacc

SEQ ID NO: 9504 - RNA, 20 nt, synthetic construct
  source 1..20: mol_type = other RNA
tgcctggtgaagaatgtgat

SEQ ID NO: 9505 - RNA, 20 nt, synthetic construct
  source 1..20: mol_type = other RNA
gtgcctggtgaagaatgtga

SEQ ID NO: 9506 - RNA, 20 nt, synthetic construct
  source 1..20: mol_type = other RNA
cttcaccaggcactctacaa

SEQ ID NO: 9507 - RNA, 20 nt, synthetic construct
  source 1..20: mol_type = other RNA
ctcttcctttgtagagtgcc

SEQ ID NO: 9508 - RNA, 20 nt, synthetic construct
  source 1..20: mol_type = other RNA
ttcgacacataagacaaacc

SEQ ID NO: 9509 - RNA, 20 nt, synthetic construct
  source 1..20: mol_type = other RNA
ttggggtactggtagctacc

SEQ ID NO: 9510 - RNA, 20 nt, synthetic construct
  source 1..20: mol_type = other RNA
agtaccccaaagtttcttta

SEQ ID NO: 9511 - RNA, 20 nt, synthetic construct
  source 1..20: mol_type = other RNA
accccaaagtttctttaagg

SEQ ID NO: 9512 - RNA, 20 nt, synthetic construct
  source 1..20: mol_type = other RNA
gcctccttaaagaaactttg

SEQ ID NO: 9513 - RNA, 20 nt, synthetic construct
  source 1..20: mol_type = other RNA
agcctccttaaagaaacttt

SEQ ID NO: 9514 - RNA, 20 nt, synthetic construct
  source 1..20: mol_type = other RNA
gagcctccttaaagaaactt

SEQ ID NO: 9515 - RNA, 20 nt, synthetic construct
  source 1..20: mol_type = other RNA
taaccaatgaaagtgacatc

SEQ ID NO: 9516 - RNA, 20 nt, synthetic construct
  source 1..20: mol_type = other RNA
caatgaaagtgacatctggc

SEQ ID NO: 9517 - RNA, 20 nt, synthetic construct
  source 1..20: mol_type = other RNA
aatgaaagtgacatctggcc

SEQ ID NO: 9518 - RNA, 20 nt, synthetic construct
  source 1..20: mol_type = other RNA
cggccagatgtcactttcat

SEQ ID NO: 9519 - RNA, 20 nt, synthetic construct
  source 1..20: mol_type = other RNA
aagtgacatctggccgggca

SEQ ID NO: 9520 - RNA, 20 nt, synthetic construct
  source 1..20: mol_type = other RNA
tgacatctggccgggcacgg

SEQ ID NO: 9521 - RNA, 20 nt, synthetic construct
  source 1..20: mol_type = other RNA
cagacgtgagccaccgtgcc

SEQ ID NO: 9522 - RNA, 20 nt, synthetic construct
  source 1..20: mol_type = other RNA
cgtctgtaatcccagcactt

SEQ ID NO: 9523 - RNA, 20 nt, synthetic construct
  source 1..20: mol_type = other RNA
gtctgtaatcccagcacttc

SEQ ID NO: 9524 - RNA, 20 nt, synthetic construct
  source 1..20: mol_type = other RNA
tgtaatcccagcacttcggg

SEQ ID NO: 9525 - RNA, 20 nt, synthetic construct
  source 1..20: mol_type = other RNA
agcacttcgggaggccaaga

SEQ ID NO: 9526 - RNA, 20 nt, synthetic construct
  source 1..20: mol_type = other RNA
gcacttcgggaggccaagaa

SEQ ID NO: 9527 - RNA, 20 nt, synthetic construct
  source 1..20: mol_type = other RNA
tcttggcctcccgaagtgct

SEQ ID NO: 9528 - RNA, 20 nt, synthetic construct
  source 1..20: mol_type = other RNA
ttcttggcctcccgaagtgc

SEQ ID NO: 9529 - RNA, 20 nt, synthetic construct
  source 1..20: mol_type = other RNA
cttcgggaggccaagaaggg

SEQ ID NO: 9530 - RNA, 20 nt, synthetic construct
  source 1..20: mol_type = other RNA
ttcgggaggccaagaagggt

SEQ ID NO: 9531 - RNA, 20 nt, synthetic construct
  source 1..20: mol_type = other RNA
caagaagggtgggtcacttg

SEQ ID NO: 9532 - RNA, 20 nt, synthetic construct
  source 1..20: mol_type = other RNA
ctcaagtgacccacccttct

SEQ ID NO: 9533 - RNA, 20 nt, synthetic construct
  source 1..20: mol_type = other RNA
agggtgggtcacttgaggtc

SEQ ID NO: 9534 - RNA, 20 nt, synthetic construct
  source 1..20: mol_type = other RNA
ggtcacttgaggtcaggaat

SEQ ID NO: 9535 - RNA, 20 nt, synthetic construct
  source 1..20: mol_type = other RNA
tcaggaattggagatgagcc

SEQ ID NO: 9536 - RNA, 20 nt, synthetic construct
  source 1..20: mol_type = other RNA
gatgagcctggacaacatga

SEQ ID NO: 9537 - RNA, 20 nt, synthetic construct
  source 1..20: mol_type = other RNA
ggggttccatcatgttgtcc

SEQ ID NO: 9538 - RNA, 20 nt, synthetic construct
  source 1..20: mol_type = other RNA
ttgtctttttagtagagatg

SEQ ID NO: 9539 - RNA, 20 nt, synthetic construct
  source 1..20: mol_type = other RNA
tttgtctttttagtagagat

SEQ ID NO: 9540 - RNA, 20 nt, synthetic construct
  source 1..20: mol_type = other RNA
ttttgtctttttagtagaga

SEQ ID NO: 9541 - RNA, 20 nt, synthetic construct
  source 1..20: mol_type = other RNA
taaaaagacaaaaaattagc

SEQ ID NO: 9542 - RNA, 20 nt, synthetic construct
  source 1..20: mol_type = other RNA
aaaaagacaaaaaattagcc

SEQ ID NO: 9543 - RNA, 20 nt, synthetic construct
  source 1..20: mol_type = other RNA
gacaaaaaattagccgggca

SEQ ID NO: 9544 - RNA, 20 nt, synthetic construct
  source 1..20: mol_type = other RNA
aaaaaattagccgggcatgg

SEQ ID NO: 9545 - RNA, 20 nt, synthetic construct
  source 1..20: mol_type = other RNA
gggcatggtggccagctact

SEQ ID NO: 9546 - RNA, 20 nt, synthetic construct
  source 1..20: mol_type = other RNA
ggcatggtggccagctactc

SEQ ID NO: 9547 - RNA, 20 nt, synthetic construct
  source 1..20: mol_type = other RNA
gagtagctggccaccatgcc

SEQ ID NO: 9548 - RNA, 20 nt, synthetic construct
  source 1..20: mol_type = other RNA
atggtggccagctactcggg

SEQ ID NO: 9549 - RNA, 20 nt, synthetic construct
  source 1..20: mol_type = other RNA
gccagctactcgggaggccg

SEQ ID NO: 9550 - RNA, 20 nt, synthetic construct
  source 1..20: mol_type = other RNA
gctactcgggaggccgaggc

SEQ ID NO: 9551 - RNA, 20 nt, synthetic construct
  source 1..20: mol_type = other RNA
gcctcggcctcccgagtagc

SEQ ID NO: 9552 - RNA, 20 nt, synthetic construct
  source 1..20: mol_type = other RNA
tcaaggcagttctccggcct

SEQ ID NO: 9553 - RNA, 20 nt, synthetic construct
  source 1..20: mol_type = other RNA
ccggagaactgccttgaacc

SEQ ID NO: 9554 - RNA, 20 nt, synthetic construct
  source 1..20: mol_type = other RNA
cggagaactgccttgaacct

SEQ ID NO: 9555 - RNA, 20 nt, synthetic construct
  source 1..20: mol_type = other RNA
agaactgccttgaacctggg

SEQ ID NO: 9556 - RNA, 20 nt, synthetic construct
  source 1..20: mol_type = other RNA
ccaggttcaaggcagttctc

SEQ ID NO: 9557 - RNA, 20 nt, synthetic construct
  source 1..20: mol_type = other RNA
actgccttgaacctgggagg

SEQ ID NO: 9558 - RNA, 20 nt, synthetic construct
  source 1..20: mol_type = other RNA
gtttccgcctcccaggttca

SEQ ID NO: 9559 - RNA, 20 nt, synthetic construct
  source 1..20: mol_type = other RNA
cactgcagtttccgcctccc

SEQ ID NO: 9560 - RNA, 20 nt, synthetic construct
  source 1..20: mol_type = other RNA
ggagtacagtggcacaatca

SEQ ID NO: 9561 - RNA, 20 nt, synthetic construct
  source 1..20: mol_type = other RNA
tgtgccactgtactccagcc

SEQ ID NO: 9562 - RNA, 20 nt, synthetic construct
  source 1..20: mol_type = other RNA
gtgccactgtactccagcct

SEQ ID NO: 9563 - RNA, 20 nt, synthetic construct
  source 1..20: mol_type = other RNA
ttgcccaggctggagtacag

SEQ ID NO: 9564 - RNA, 20 nt, synthetic construct
  source 1..20: mol_type = other RNA
tttactcttgttgcccaggc

SEQ ID NO: 9565 - RNA, 20 nt, synthetic construct
  source 1..20: mol_type = other RNA
gagttttactcttgttgccc

SEQ ID NO: 9566 - RNA, 20 nt, synthetic construct
  source 1..20: mol_type = other RNA
ttctttttctttttttgaga

SEQ ID NO: 9567 - RNA, 20 nt, synthetic construct
  source 1..20: mol_type = other RNA
agaaaagaaagtgatatcca

SEQ ID NO: 9568 - RNA, 20 nt, synthetic construct
  source 1..20: mol_type = other RNA
gtgatatccatggccccaca

SEQ ID NO: 9569 - RNA, 20 nt, synthetic construct
  source 1..20: mol_type = other RNA
tgatatccatggccccacaa

SEQ ID NO: 9570 - RNA, 20 nt, synthetic construct
  source 1..20: mol_type = other RNA
tgatctcccttgtggggcca

SEQ ID NO: 9571 - RNA, 20 nt, synthetic construct
  source 1..20: mol_type = other RNA
ttatggtgatctcccttgtg

SEQ ID NO: 9572 - RNA, 20 nt, synthetic construct
  source 1..20: mol_type = other RNA
cttatggtgatctcccttgt

SEQ ID NO: 9573 - RNA, 20 nt, synthetic construct
  source 1..20: mol_type = other RNA
tcttatggtgatctcccttg

SEQ ID NO: 9574 - RNA, 20 nt, synthetic construct
  source 1..20: mol_type = other RNA
ggagatcaccataagatacc

SEQ ID NO: 9575 - RNA, 20 nt, synthetic construct
  source 1..20: mol_type = other RNA
gagatcaccataagatacct

SEQ ID NO: 9576 - RNA, 20 nt, synthetic construct
  source 1..20: mol_type = other RNA
caggagtcccaggtatctta

SEQ ID NO: 9577 - RNA, 20 nt, synthetic construct
  source 1..20: mol_type = other RNA
tgggactcctgcacccactc

SEQ ID NO: 9578 - RNA, 20 nt, synthetic construct
  source 1..20: mol_type = other RNA
gggactcctgcacccactct

SEQ ID NO: 9579 - RNA, 20 nt, synthetic construct
  source 1..20: mol_type = other RNA
agagtgggtgcaggagtccc

SEQ ID NO: 9580 - RNA, 20 nt, synthetic construct
  source 1..20: mol_type = other RNA
cacaggcccagagtgggtgc

SEQ ID NO: 9581 - RNA, 20 nt, synthetic construct
  source 1..20: mol_type = other RNA
gtgctgcacaggcccagagt

SEQ ID NO: 9582 - RNA, 20 nt, synthetic construct
  source 1..20: mol_type = other RNA
ggtgctgcacaggcccagag

SEQ ID NO: 9583 - RNA, 20 nt, synthetic construct
  source 1..20: mol_type = other RNA
tgtgcagcacctgcacctca

SEQ ID NO: 9584 - RNA, 20 nt, synthetic construct
  source 1..20: mol_type = other RNA
gtgcagcacctgcacctcaa

SEQ ID NO: 9585 - RNA, 20 nt, synthetic construct
  source 1..20: mol_type = other RNA
ttgaggtgcaggtgctgcac

SEQ ID NO: 9586 - RNA, 20 nt, synthetic construct
  source 1..20: mol_type = other RNA
agtgtggtcccttgaggtgc

SEQ ID NO: 9587 - RNA, 20 nt, synthetic construct
  source 1..20: mol_type = other RNA
taggtcagtgtggtcccttg

SEQ ID NO: 9588 - RNA, 20 nt, synthetic construct
  source 1..20: mol_type = other RNA
ggcatagcagtaggtcagtg

SEQ ID NO: 9589 - RNA, 20 nt, synthetic construct
  source 1..20: mol_type = other RNA
aaggctgtgggcatagcagt

SEQ ID NO: 9590 - RNA, 20 nt, synthetic construct
  source 1..20: mol_type = other RNA
cacagccttcccatgactac

SEQ ID NO: 9591 - RNA, 20 nt, synthetic construct
  source 1..20: mol_type = other RNA
tgtagtcatgggaaggctgt

SEQ ID NO: 9592 - RNA, 20 nt, synthetic construct
  source 1..20: mol_type = other RNA
ctgtagtcatgggaaggctg

SEQ ID NO: 9593 - RNA, 20 nt, synthetic construct
  source 1..20: mol_type = other RNA
actttcctgtagtcatggga

SEQ ID NO: 9594 - RNA, 20 nt, synthetic construct
  source 1..20: mol_type = other RNA
tcttactttcctgtagtcat

SEQ ID NO: 9595 - RNA, 20 nt, synthetic construct
  source 1..20: mol_type = other RNA
gtcttactttcctgtagtca

SEQ ID NO: 9596 - RNA, 20 nt, synthetic construct
  source 1..20: mol_type = other RNA
ctacaggaaagtaagaccct

SEQ ID NO: 9597 - RNA, 20 nt, synthetic construct
  source 1..20: mol_type = other RNA
tacaggaaagtaagaccctt

SEQ ID NO: 9598 - RNA, 20 nt, synthetic construct
  source 1..20: mol_type = other RNA
gggctcttgaagtttcccaa

SEQ ID NO: 9599 - RNA, 20 nt, synthetic construct
  source 1..20: mol_type = other RNA
tgggctcttgaagtttccca

SEQ ID NO: 9600 - RNA, 20 nt, synthetic construct
  source 1..20: mol_type = other RNA
cttgtcattgcagtaagagt

SEQ ID NO: 9601 - RNA, 20 nt, synthetic construct
  source 1..20: mol_type = other RNA
tcttgtcattgcagtaagag

SEQ ID NO: 9602 - RNA, 20 nt, synthetic construct
  source 1..20: mol_type = other RNA
ctgcaatgacaagaaacatg

SEQ ID NO: 9603 - RNA, 20 nt, synthetic construct
  source 1..20: mol_type = other RNA
caaccacttctagtctgtta

SEQ ID NO: 9604 - RNA, 20 nt, synthetic construct
  source 1..20: mol_type = other RNA
aaccacttctagtctgttat

SEQ ID NO: 9605 - RNA, 20 nt, synthetic construct
  source 1..20: mol_type = other RNA
accacttctagtctgttatg

SEQ ID NO: 9606 - RNA, 20 nt, synthetic construct
  source 1..20: mol_type = other RNA
cataacagactagaagtggt

SEQ ID NO: 9607 - RNA, 20 nt, synthetic construct
  source 1..20: mol_type = other RNA
gccccataacagactagaag

SEQ ID NO: 9608 - RNA, 20 nt, synthetic construct
  source 1..20: mol_type = other RNA
tgttatggggcaagaaagag

SEQ ID NO: 9609 - RNA, 20 nt, synthetic construct
  source 1..20: mol_type = other RNA
aagtcatctgggtctcacat

SEQ ID NO: 9610 - RNA, 20 nt, synthetic construct
  source 1..20: mol_type = other RNA
agacccagatgacttttcta

SEQ ID NO: 9611 - RNA, 20 nt, synthetic construct
  source 1..20: mol_type = other RNA
gggccttagaaaagtcatct

SEQ ID NO: 9612 - RNA, 20 nt, synthetic construct
  source 1..20: mol_type = other RNA
tgggccttagaaaagtcatc

SEQ ID NO: 9613 - RNA, 20 nt, synthetic construct
  source 1..20: mol_type = other RNA
taaggcccagatttgatatg

SEQ ID NO: 9614 - RNA, 20 nt, synthetic construct
  source 1..20: mol_type = other RNA
gctgacctcatatcaaatct

SEQ ID NO: 9615 - RNA, 20 nt, synthetic construct
  source 1..20: mol_type = other RNA
ggctgacctcatatcaaatc

SEQ ID NO: 9616 - RNA, 20 nt, synthetic construct
  source 1..20: mol_type = other RNA
tgatatgaggtcagcctcct

SEQ ID NO: 9617 - RNA, 20 nt, synthetic construct
  source 1..20: mol_type = other RNA
gatatgaggtcagcctcctt

SEQ ID NO: 9618 - RNA, 20 nt, synthetic construct
  source 1..20: mol_type = other RNA
tgggaagaattcgcccaagg

SEQ ID NO: 9619 - RNA, 20 nt, synthetic construct
  source 1..20: mol_type = other RNA
tgggcgaattcttcccacag

SEQ ID NO: 9620 - RNA, 20 nt, synthetic construct
  source 1..20: mol_type = other RNA
ctgtgggaagaattcgccca

SEQ ID NO: 9621 - RNA, 20 nt, synthetic construct
  source 1..20: mol_type = other RNA
gggttggggggaaccgctgt

SEQ ID NO: 9622 - RNA, 20 nt, synthetic construct
  source 1..20: mol_type = other RNA
ggggttggggggaaccgctg

SEQ ID NO: 9623 - RNA, 20 nt, synthetic construct
  source 1..20: mol_type = other RNA
ccccaaccccacactgcccc

SEQ ID NO: 9624 - RNA, 20 nt, synthetic construct
  source 1..20: mol_type = other RNA
tggggcagtgtggggttggg

SEQ ID NO: 9625 - RNA, 20 nt, synthetic construct
  source 1..20: mol_type = other RNA
ctggggcagtgtggggttgg

SEQ ID NO: 9626 - RNA, 20 nt, synthetic construct
  source 1..20: mol_type = other RNA
cctggggcagtgtggggttg

SEQ ID NO: 9627 - RNA, 20 nt, synthetic construct
  source 1..20: mol_type = other RNA
gcctggggcagtgtggggtt

SEQ ID NO: 9628 - RNA, 20 nt, synthetic construct
  source 1..20: mol_type = other RNA
ggcctggggcagtgtggggt

SEQ ID NO: 9629 - RNA, 20 nt, synthetic construct
  source 1..20: mol_type = other RNA
taggggcctggggcagtgtg

SEQ ID NO: 9630 - RNA, 20 nt, synthetic construct
  source 1..20: mol_type = other RNA
ctaggggcctggggcagtgt

SEQ ID NO: 9631 - RNA, 20 nt, synthetic construct
  source 1..20: mol_type = other RNA
gctaggggcctggggcagtg

SEQ ID NO: 9632 - RNA, 20 nt, synthetic construct
  source 1..20: mol_type = other RNA
gccccaggcccctagcatct

SEQ ID NO: 9633 - RNA, 20 nt, synthetic construct
  source 1..20: mol_type = other RNA
gcctagatgctaggggcctg

SEQ ID NO: 9634 - RNA, 20 nt, synthetic construct
  source 1..20: mol_type = other RNA
agcctagatgctaggggcct

SEQ ID NO: 9635 - RNA, 20 nt, synthetic construct
  source 1..20: mol_type = other RNA
gagcctagatgctaggggcc

SEQ ID NO: 9636 - RNA, 20 nt, synthetic construct
  source 1..20: mol_type = other RNA
tgttagagcctagatgctag

SEQ ID NO: 9637 - RNA, 20 nt, synthetic construct
  source 1..20: mol_type = other RNA
ttgttagagcctagatgcta

SEQ ID NO: 9638 - RNA, 20 nt, synthetic construct
  source 1..20: mol_type = other RNA
gttgttagagcctagatgct

SEQ ID NO: 9639 - RNA, 20 nt, synthetic construct
  source 1..20: mol_type = other RNA
aaggctgaaggtgacagggt

SEQ ID NO: 9640 - RNA, 20 nt, synthetic construct
  source 1..20: mol_type = other RNA
atcaaaggctgaaggtgaca

SEQ ID NO: 9641 - RNA, 20 nt, synthetic construct
  source 1..20: mol_type = other RNA
gatcaaaggctgaaggtgac

SEQ ID NO: 9642 - RNA, 20 nt, synthetic construct
  source 1..20: mol_type = other RNA
gctagcagatcaaaggctga

SEQ ID NO: 9643 - RNA, 20 nt, synthetic construct
  source 1..20: mol_type = other RNA
cagtagggctagcagatcaa

SEQ ID NO: 9644 - RNA, 20 nt, synthetic construct
  source 1..20: mol_type = other RNA
tagccctactgccagacaga

SEQ ID NO: 9645 - RNA, 20 nt, synthetic construct
  source 1..20: mol_type = other RNA
cctactgccagacagatgga

SEQ ID NO: 9646 - RNA, 20 nt, synthetic construct
  source 1..20: mol_type = other RNA
catccatctgtctggcagta

SEQ ID NO: 9647 - RNA, 20 nt, synthetic construct
  source 1..20: mol_type = other RNA
ccatccatctgtctggcagt

SEQ ID NO: 9648 - RNA, 20 nt, synthetic construct
  source 1..20: mol_type = other RNA
tctgcatccatccatctgtc

SEQ ID NO: 9649 - RNA, 20 nt, synthetic construct
  source 1..20: mol_type = other RNA
agatggatggatgcagacat

SEQ ID NO: 9650 - RNA, 20 nt, synthetic construct
  source 1..20: mol_type = other RNA
actctctctctctctctctc

SEQ ID NO: 9651 - RNA, 20 nt, synthetic construct
  source 1..20: mol_type = other RNA
tctctctggcccatagcatc

SEQ ID NO: 9652 - RNA, 20 nt, synthetic construct
  source 1..20: mol_type = other RNA
agggaagcaccagatgctat

SEQ ID NO: 9653 - RNA, 20 nt, synthetic construct
  source 1..20: mol_type = other RNA
gagggaagcaccagatgcta

SEQ ID NO: 9654 - RNA, 20 nt, synthetic construct
  source 1..20: mol_type = other RNA
aactcagtagatggagatga

SEQ ID NO: 9655 - RNA, 20 nt, synthetic construct
  source 1..20: mol_type = other RNA
tctccatctactgagttcca

SEQ ID NO: 9656 - RNA, 20 nt, synthetic construct
  source 1..20: mol_type = other RNA
tgaccatggaactcagtaga

SEQ ID NO: 9657 - RNA, 20 nt, synthetic construct
  source 1..20: mol_type = other RNA
agttccatggtcagccccct

SEQ ID NO: 9658 - RNA, 20 nt, synthetic construct
  source 1..20: mol_type = other RNA
ggttcctagggggctgacca

SEQ ID NO: 9659 - RNA, 20 nt, synthetic construct
  source 1..20: mol_type = other RNA
tcagccccctaggaacctga

SEQ ID NO: 9660 - RNA, 20 nt, synthetic construct
  source 1..20: mol_type = other RNA
ccccctaggaacctgaaggc

SEQ ID NO: 9661 - RNA, 20 nt, synthetic construct
  source 1..20: mol_type = other RNA
cctgccttcaggttcctagg

SEQ ID NO: 9662 - RNA, 20 nt, synthetic construct
  source 1..20: mol_type = other RNA
gcctgccttcaggttcctag

SEQ ID NO: 9663 - RNA, 20 nt, synthetic construct
  source 1..20: mol_type = other RNA
agcctgccttcaggttccta

SEQ ID NO: 9664 - RNA, 20 nt, synthetic construct
  source 1..20: mol_type = other RNA
gagcctgccttcaggttcct

SEQ ID NO: 9665 - RNA, 20 nt, synthetic construct
  source 1..20: mol_type = other RNA
ataaagatgagcctgccttc

SEQ ID NO: 9666 - RNA, 20 nt, synthetic construct
  source 1..20: mol_type = other RNA
cttttatcttcccagcacac

SEQ ID NO: 9667 - RNA, 20 nt, synthetic construct
  source 1..20: mol_type = other RNA
ttatcttcccagcacacagg

SEQ ID NO: 9668 - RNA, 20 nt, synthetic construct
  source 1..20: mol_type = other RNA
gggttcacctcctgtgtgct

SEQ ID NO: 9669 - RNA, 20 nt, synthetic construct
  source 1..20: mol_type = other RNA
agggttcacctcctgtgtgc

SEQ ID NO: 9670 - RNA, 20 nt, synthetic construct
  source 1..20: mol_type = other RNA
aatgtgggtatggtcactaa

SEQ ID NO: 9671 - RNA, 20 nt, synthetic construct
  source 1..20: mol_type = other RNA
caatgtgggtatggtcacta

SEQ ID NO: 9672 - RNA, 20 nt, synthetic construct
  source 1..20: mol_type = other RNA
ccatacccacattgtcatcc

SEQ ID NO: 9673 - RNA, 20 nt, synthetic construct
  source 1..20: mol_type = other RNA
catacccacattgtcatcct

SEQ ID NO: 9674 - RNA, 20 nt, synthetic construct
  source 1..20: mol_type = other RNA
atacccacattgtcatcctg

SEQ ID NO: 9675 - RNA, 20 nt, synthetic construct
  source 1..20: mol_type = other RNA
ccaggatgacaatgtgggta

SEQ ID NO: 9676 - RNA, 20 nt, synthetic construct
  source 1..20: mol_type = other RNA
aagccccaggatgacaatgt

SEQ ID NO: 9677 - RNA, 20 nt, synthetic construct
  source 1..20: mol_type = other RNA
gaagccccaggatgacaatg

SEQ ID NO: 9678 - RNA, 20 nt, synthetic construct
  source 1..20: mol_type = other RNA
gagattgagctggaagcccc

SEQ ID NO: 9679 - RNA, 20 nt, synthetic construct
  source 1..20: mol_type = other RNA
ccagctcaatctcaaagctc

SEQ ID NO: 9680 - RNA, 20 nt, synthetic construct
  source 1..20: mol_type = other RNA
ccagagctttgagattgagc

SEQ ID NO: 9681 - RNA, 20 nt, synthetic construct
  source 1..20: mol_type = other RNA
aaacagttcacactctcaca

SEQ ID NO: 9682 - RNA, 20 nt, synthetic construct
  source 1..20: mol_type = other RNA
acactctcacatggataatg

SEQ ID NO: 9683 - RNA, 20 nt, synthetic construct
  source 1..20: mol_type = other RNA
ccagactcagtcactcgctc

SEQ ID NO: 9684 - RNA, 20 nt, synthetic construct
  source 1..20: mol_type = other RNA
gagcgagtgactgagtctgg

SEQ ID NO: 9685 - RNA, 20 nt, synthetic construct
  source 1..20: mol_type = other RNA
cctgagcgagtgactgagtc

SEQ ID NO: 9686 - RNA, 20 nt, synthetic construct
  source 1..20: mol_type = other RNA
cagtcactcgctcaggcaac

SEQ ID NO: 9687 - RNA, 20 nt, synthetic construct
  source 1..20: mol_type = other RNA
gtcctaacatgccttgccct

SEQ ID NO: 9688 - RNA, 20 nt, synthetic construct
  source 1..20: mol_type = other RNA
gtcctagggcaaggcatgtt

SEQ ID NO: 9689 - RNA, 20 nt, synthetic construct
  source 1..20: mol_type = other RNA
tgccttgccctaggactcag

SEQ ID NO: 9690 - RNA, 20 nt, synthetic construct
  source 1..20: mol_type = other RNA
aaccgctgagtcctagggca

SEQ ID NO: 9691 - RNA, 20 nt, synthetic construct
  source 1..20: mol_type = other RNA
ctaggactcagcggttgaca

SEQ ID NO: 9692 - RNA, 20 nt, synthetic construct
  source 1..20: mol_type = other RNA
atgtcaaccgctgagtccta

SEQ ID NO: 9693 - RNA, 20 nt, synthetic construct
  source 1..20: mol_type = other RNA
catgtcaaccgctgagtcct

SEQ ID NO: 9694 - RNA, 20 nt, synthetic construct
  source 1..20: mol_type = other RNA
tggcattctcccgagtgatt

SEQ ID NO: 9695 - RNA, 20 nt, synthetic construct
  source 1..20: mol_type = other RNA
ccgagtgattaggcaataca

SEQ ID NO: 9696 - RNA, 20 nt, synthetic construct
  source 1..20: mol_type = other RNA
cgagtgattaggcaatacat

SEQ ID NO: 9697 - RNA, 20 nt, synthetic construct
  source 1..20: mol_type = other RNA
gagtgattaggcaatacatg

SEQ ID NO: 9698 - RNA, 20 nt, synthetic construct
  source 1..20: mol_type = other RNA
catgtattgcctaatcactc

SEQ ID NO: 9699 - RNA, 20 nt, synthetic construct
  source 1..20: mol_type = other RNA
ccatgtattgcctaatcact

SEQ ID NO: 9700 - RNA, 20 nt, synthetic construct
  source 1..20: mol_type = other RNA
aatacatggggtgaatactg

SEQ ID NO: 9701 - RNA, 20 nt, synthetic construct
  source 1..20: mol_type = other RNA
acatggggtgaatactgtgg

SEQ ID NO: 9702 - RNA, 20 nt, synthetic construct
  source 1..20: mol_type = other RNA
ggtgaatactgtggaggaga

SEQ ID NO: 9703 - RNA, 20 nt, synthetic construct
  source 1..20: mol_type = other RNA
gtgaatactgtggaggagaa

SEQ ID NO: 9704 - RNA, 20 nt, synthetic construct
  source 1..20: mol_type = other RNA
atactgtggaggagaagggc

SEQ ID NO: 9705 - RNA, 20 nt, synthetic construct
  source 1..20: mol_type = other RNA
tactgtggaggagaagggca

SEQ ID NO: 9706 - RNA, 20 nt, synthetic construct
  source 1..20: mol_type = other RNA
ggagaagggcagggctgctc

SEQ ID NO: 9707 - RNA, 20 nt, synthetic construct
  source 1..20: mol_type = other RNA
gggcagggctgctctggcca

SEQ ID NO: 9708 - RNA, 20 nt, synthetic construct
  source 1..20: mol_type = other RNA
agggctgctctggccatgga

SEQ ID NO: 9709 - RNA, 20 nt, synthetic construct
  source 1..20: mol_type = other RNA
gggctgctctggccatggac

SEQ ID NO: 9710 - RNA, 20 nt, synthetic construct
  source 1..20: mol_type = other RNA
ggctgctctggccatggacg

SEQ ID NO: 9711 - RNA, 20 nt, synthetic construct
  source 1..20: mol_type = other RNA
ctctggccatggacggggag

SEQ ID NO: 9712 - RNA, 20 nt, synthetic construct
  source 1..20: mol_type = other RNA
tctggccatggacggggaga

SEQ ID NO: 9713 - RNA, 20 nt, synthetic construct
  source 1..20: mol_type = other RNA
cagatccctctccccgtcca

SEQ ID NO: 9714 - RNA, 20 nt, synthetic construct
  source 1..20: mol_type = other RNA
gagggatctgcactgacccg

SEQ ID NO: 9715 - RNA, 20 nt, synthetic construct
  source 1..20: mol_type = other RNA
agggatctgcactgacccga

SEQ ID NO: 9716 - RNA, 20 nt, synthetic construct
  source 1..20: mol_type = other RNA
tctgcactgacccgagggac

SEQ ID NO: 9717 - RNA, 20 nt, synthetic construct
  source 1..20: mol_type = other RNA
gcactgacccgagggacagg

SEQ ID NO: 9718 - RNA, 20 nt, synthetic construct
  source 1..20: mol_type = other RNA
agagatgccgcctgtccctc

SEQ ID NO: 9719 - RNA, 20 nt, synthetic construct
  source 1..20: mol_type = other RNA
cagagatgccgcctgtccct

SEQ ID NO: 9720 - RNA, 20 nt, synthetic construct
  source 1..20: mol_type = other RNA
acaggcggcatctctgaaga

SEQ ID NO: 9721 - RNA, 20 nt, synthetic construct
  source 1..20: mol_type = other RNA
caggcggcatctctgaagaa

SEQ ID NO: 9722 - RNA, 20 nt, synthetic construct
  source 1..20: mol_type = other RNA
gggacagagaatgagaccag

SEQ ID NO: 9723 - RNA, 20 nt, synthetic construct
  source 1..20: mol_type = other RNA
acagagaatgagaccagagg

SEQ ID NO: 9724 - RNA, 20 nt, synthetic construct
  source 1..20: mol_type = other RNA
cagagaatgagaccagaggc

SEQ ID NO: 9725 - RNA, 20 nt, synthetic construct
  source 1..20: mol_type = other RNA
agagaatgagaccagaggcg

SEQ ID NO: 9726 - RNA, 20 nt, synthetic construct
  source 1..20: mol_type = other RNA
gagaatgagaccagaggcgg

SEQ ID NO: 9727 - RNA, 20 nt, synthetic construct
  source 1..20: mol_type = other RNA
acacactcttcccccgcctc

SEQ ID NO: 9728 - RNA, 20 nt, synthetic construct
  source 1..20: mol_type = other RNA
gaagagtgtgtgcgcttctg

SEQ ID NO: 9729 - RNA, 20 nt, synthetic construct
  source 1..20: mol_type = other RNA
gagtgtgtgcgcttctgtgg

SEQ ID NO: 9730 - RNA, 20 nt, synthetic construct
  source 1..20: mol_type = other RNA
agtgtgtgcgcttctgtggt

SEQ ID NO: 9731 - RNA, 20 nt, synthetic construct
  source 1..20: mol_type = other RNA
gtgtgtgcgcttctgtggtg

SEQ ID NO: 9732 - RNA, 20 nt, synthetic construct
  source 1..20: mol_type = other RNA
tgtgtgcgcttctgtggtgg

SEQ ID NO: 9733 - RNA, 20 nt, synthetic construct
  source 1..20: mol_type = other RNA
gcgcttctgtggtgggggtc

SEQ ID NO: 9734 - RNA, 20 nt, synthetic construct
  source 1..20: mol_type = other RNA
ttctgtggtgggggtcaggc

SEQ ID NO: 9735 - RNA, 20 nt, synthetic construct
  source 1..20: mol_type = other RNA
ggtgggggtcaggcaggcag

SEQ ID NO: 9736 - RNA, 20 nt, synthetic construct
  source 1..20: mol_type = other RNA
aggcaggcagtggcaagaga

SEQ ID NO: 9737 - RNA, 20 nt, synthetic construct
  source 1..20: mol_type = other RNA
gtggcaagagaaggcatgcc

SEQ ID NO: 9738 - RNA, 20 nt, synthetic construct
  source 1..20: mol_type = other RNA
gcatgcctggcatagataac

SEQ ID NO: 9739 - RNA, 20 nt, synthetic construct
  source 1..20: mol_type = other RNA
tgtctcctgttatctatgcc

SEQ ID NO: 9740 - RNA, 20 nt, synthetic construct
  source 1..20: mol_type = other RNA
gcagtttttaatcttttcaa

SEQ ID NO: 9741 - RNA, 20 nt, synthetic construct
  source 1..20: mol_type = other RNA
tccattttcatactgacctg

SEQ ID NO: 9742 - RNA, 20 nt, synthetic construct
  source 1..20: mol_type = other RNA
aggtcagtatgaaaatggag

SEQ ID NO: 9743 - RNA, 20 nt, synthetic construct
  source 1..20: mol_type = other RNA
gccacaggtcagtatgaaaa

SEQ ID NO: 9744 - RNA, 20 nt, synthetic construct
  source 1..20: mol_type = other RNA
ctgacctgtggccaaaaagc

SEQ ID NO: 9745 - RNA, 20 nt, synthetic construct
  source 1..20: mol_type = other RNA
ggctcctgctttttggccac

SEQ ID NO: 9746 - RNA, 20 nt, synthetic construct
  source 1..20: mol_type = other RNA
gaatggtggctcctgctttt

SEQ ID NO: 9747 - RNA, 20 nt, synthetic construct
  source 1..20: mol_type = other RNA
actcttaacgtggtgaatgg

SEQ ID NO: 9748 - RNA, 20 nt, synthetic construct
  source 1..20: mol_type = other RNA
ctaactcttaacgtggtgaa

SEQ ID NO: 9749 - RNA, 20 nt, synthetic construct
  source 1..20: mol_type = other RNA
ccacgttaagagttagctga

SEQ ID NO: 9750 - RNA, 20 nt, synthetic construct
  source 1..20: mol_type = other RNA
ccttcagctaactcttaacg

SEQ ID NO: 9751 - RNA, 20 nt, synthetic construct
  source 1..20: mol_type = other RNA
taagagttagctgaaggtca

SEQ ID NO: 9752 - RNA, 20 nt, synthetic construct
  source 1..20: mol_type = other RNA
ttagctgaaggtcaaggaaa

SEQ ID NO: 9753 - RNA, 20 nt, synthetic construct
  source 1..20: mol_type = other RNA
gcttattgtttccaatccaa

SEQ ID NO: 9754 - RNA, 20 nt, synthetic construct
  source 1..20: mol_type = other RNA
tattgtttccaatccaaagg

SEQ ID NO: 9755 - RNA, 20 nt, synthetic construct
  source 1..20: mol_type = other RNA
ttatgtagccgcctttggat

SEQ ID NO: 9756 - RNA, 20 nt, synthetic construct
  source 1..20: mol_type = other RNA
ttcgattatgtagccgcctt

SEQ ID NO: 9757 - RNA, 20 nt, synthetic construct
  source 1..20: mol_type = other RNA
ttggaagtagatacaaaagt

SEQ ID NO: 9758 - RNA, 20 nt, synthetic construct
  source 1..20: mol_type = other RNA
acatgatatagggtttctgt

SEQ ID NO: 9759 - RNA, 20 nt, synthetic construct
  source 1..20: mol_type = other RNA
tacactgggaacatgatata

SEQ ID NO: 9760 - RNA, 20 nt, synthetic construct
  source 1..20: mol_type = other RNA
ctacactgggaacatgatat

SEQ ID NO: 9761 - RNA, 20 nt, synthetic construct
  source 1..20: mol_type = other RNA
tgttcccagtgtagaagaaa

SEQ ID NO: 9762 - RNA, 20 nt, synthetic construct
  source 1..20: mol_type = other RNA
tcatccttttcttctacact

SEQ ID NO: 9763 - RNA, 20 nt, synthetic construct
  source 1..20: mol_type = other RNA
ttcatccttttcttctacac

SEQ ID NO: 9764 - RNA, 20 nt, synthetic construct
  source 1..20: mol_type = other RNA
tagaagaaaaggatgaagca

SEQ ID NO: 9765 - RNA, 20 nt, synthetic construct
  source 1..20: mol_type = other RNA
agttcccaaactgagtgccc

SEQ ID NO: 9766 - RNA, 20 nt, synthetic construct
  source 1..20: mol_type = other RNA
aactgagtgcccaggtgcct

SEQ ID NO: 9767 - RNA, 20 nt, synthetic construct
  source 1..20: mol_type = other RNA
actgagtgcccaggtgcctt

SEQ ID NO: 9768 - RNA, 20 nt, synthetic construct
  source 1..20: mol_type = other RNA
ctgagtgcccaggtgccttg

SEQ ID NO: 9769 - RNA, 20 nt, synthetic construct
  source 1..20: mol_type = other RNA
caggtgccttggggatgtca

SEQ ID NO: 9770 - RNA, 20 nt, synthetic construct
  source 1..20: mol_type = other RNA
atgacatccccaaggcacct

SEQ ID NO: 9771 - RNA, 20 nt, synthetic construct
  source 1..20: mol_type = other RNA
catgacatccccaaggcacc

SEQ ID NO: 9772 - RNA, 20 nt, synthetic construct
  source 1..20: mol_type = other RNA
agtttaccatgacatcccca

SEQ ID NO: 9773 - RNA, 20 nt, synthetic construct
  source 1..20: mol_type = other RNA
gatgtcatggtaaactcaga

SEQ ID NO: 9774 - RNA, 20 nt, synthetic construct
  source 1..20: mol_type = other RNA
gtaaactcagatggcattgc

SEQ ID NO: 9775 - RNA, 20 nt, synthetic construct
  source 1..20: mol_type = other RNA
ttgcaggaactatcagcaca

SEQ ID NO: 9776 - RNA, 20 nt, synthetic construct
  source 1..20: mol_type = other RNA
ctgttgaatatagtgcaatc

SEQ ID NO: 9777 - RNA, 20 nt, synthetic construct
  source 1..20: mol_type = other RNA
acttgctgatcaagtgttgc

SEQ ID NO: 9778 - RNA, 20 nt, synthetic construct
  source 1..20: mol_type = other RNA
taataaaacaaagattgtcc

SEQ ID NO: 9779 - RNA, 20 nt, synthetic construct
  source 1..20: mol_type = other RNA
ttggtgagtggagacagctg

SEQ ID NO: 9780 - RNA, 20 nt, synthetic construct
  source 1..20: mol_type = other RNA
tctccactcaccaagcacag

SEQ ID NO: 9781 - RNA, 20 nt, synthetic construct
  source 1..20: mol_type = other RNA
ttgccactgtgcttggtgag

SEQ ID NO: 9782 - RNA, 20 nt, synthetic construct
  source 1..20: mol_type = other RNA
gcacagtggcaacacccaca

SEQ ID NO: 9783 - RNA, 20 nt, synthetic construct
  source 1..20: mol_type = other RNA
cacagtggcaacacccacaa

SEQ ID NO: 9784 - RNA, 20 nt, synthetic construct
  source 1..20: mol_type = other RNA
acagtggcaacacccacaag

SEQ ID NO: 9785 - RNA, 20 nt, synthetic construct
  source 1..20: mol_type = other RNA
gcaacacccacaaggggcag

SEQ ID NO: 9786 - RNA, 20 nt, synthetic construct
  source 1..20: mol_type = other RNA
actgggcctctgccccttgt

SEQ ID NO: 9787 - RNA, 20 nt, synthetic construct
  source 1..20: mol_type = other RNA
gactgggcctctgccccttg

SEQ ID NO: 9788 - RNA, 20 nt, synthetic construct
  source 1..20: mol_type = other RNA
agaggcccagtcatcctaca

SEQ ID NO: 9789 - RNA, 20 nt, synthetic construct
  source 1..20: mol_type = other RNA
gaggcccagtcatcctacac

SEQ ID NO: 9790 - RNA, 20 nt, synthetic construct
  source 1..20: mol_type = other RNA
agtcatcctacacgggtctt

SEQ ID NO: 9791 - RNA, 20 nt, synthetic construct
  source 1..20: mol_type = other RNA
aagacccgtgtaggatgact

SEQ ID NO: 9792 - RNA, 20 nt, synthetic construct
  source 1..20: mol_type = other RNA
aaagacccgtgtaggatgac

SEQ ID NO: 9793 - RNA, 20 nt, synthetic construct
  source 1..20: mol_type = other RNA
tcctacacgggtctttggct

SEQ ID NO: 9794 - RNA, 20 nt, synthetic construct
  source 1..20: mol_type = other RNA
gccaagccaaagacccgtgt

SEQ ID NO: 9795 - RNA, 20 nt, synthetic construct
  source 1..20: mol_type = other RNA
acagcaaagtgtggtgctgc

SEQ ID NO: 9796 - RNA, 20 nt, synthetic construct
  source 1..20: mol_type = other RNA
cactttgctgtacccatcag

SEQ ID NO: 9797 - RNA, 20 nt, synthetic construct
  source 1..20: mol_type = other RNA
ctgatgggtacagcaaagtg

SEQ ID NO: 9798 - RNA, 20 nt, synthetic construct
  source 1..20: mol_type = other RNA
agagaaggcaggccactgat

SEQ ID NO: 9799 - RNA, 20 nt, synthetic construct
  source 1..20: mol_type = other RNA
cagagaaggcaggccactga

SEQ ID NO: 9800 - RNA, 20 nt, synthetic construct
  source 1..20: mol_type = other RNA
gccttctctgcagaagcagc

SEQ ID NO: 9801 - RNA, 20 nt, synthetic construct
  source 1..20: mol_type = other RNA
ccttctctgcagaagcagct

SEQ ID NO: 9802 - RNA, 20 nt, synthetic construct
  source 1..20: mol_type = other RNA
gctgcttctgcagagaaggc

SEQ ID NO: 9803 - RNA, 20 nt, synthetic construct
  source 1..20: mol_type = other RNA
cccagctgcttctgcagaga

SEQ ID NO: 9804 - RNA, 20 nt, synthetic construct
  source 1..20: mol_type = other RNA
agaagcagctgggtgccatg

SEQ ID NO: 9805 - RNA, 20 nt, synthetic construct
  source 1..20: mol_type = other RNA
gtgccatgtggcccataagc

SEQ ID NO: 9806 - RNA, 20 nt, synthetic construct
  source 1..20: mol_type = other RNA
tgccatgtggcccataagct

SEQ ID NO: 9807 - RNA, 20 nt, synthetic construct
  source 1..20: mol_type = other RNA
gacccagcttatgggccaca

SEQ ID NO: 9808 - RNA, 20 nt, synthetic construct
  source 1..20: mol_type = other RNA
tgacttaagacccagcttat

SEQ ID NO: 9809 - RNA, 20 nt, synthetic construct
  source 1..20: mol_type = other RNA
ctgacttaagacccagctta

SEQ ID NO: 9810 - RNA, 20 nt, synthetic construct
  source 1..20: mol_type = other RNA
tttacgaggatgaaattctt

SEQ ID NO: 9811 - RNA, 20 nt, synthetic construct
  source 1..20: mol_type = other RNA
gcgccaggccgggacttacc

SEQ ID NO: 9812 - RNA, 20 nt, synthetic construct
  source 1..20: mol_type = other RNA
cgccaggccgggacttaccc

SEQ ID NO: 9813 - RNA, 20 nt, synthetic construct
  source 1..20: mol_type = other RNA
ggtaagtcccggcctggcgc

SEQ ID NO: 9814 - RNA, 20 nt, synthetic construct
  source 1..20: mol_type = other RNA
gggtaagtcccggcctggcg

SEQ ID NO: 9815 - RNA, 20 nt, synthetic construct
  source 1..20: mol_type = other RNA
aggccgggacttacccgggc

SEQ ID NO: 9816 - RNA, 20 nt, synthetic construct
  source 1..20: mol_type = other RNA
ggccgggacttacccgggcc

SEQ ID NO: 9817 - RNA, 20 nt, synthetic construct
  source 1..20: mol_type = other RNA
ggcccgggtaagtcccggcc

SEQ ID NO: 9818 - RNA, 20 nt, synthetic construct
  source 1..20: mol_type = other RNA
cgcccggcccgggtaagtcc

SEQ ID NO: 9819 - RNA, 20 nt, synthetic construct
  source 1..20: mol_type = other RNA
tacccgggccgggcgcgccg

SEQ ID NO: 9820 - RNA, 20 nt, synthetic construct
  source 1..20: mol_type = other RNA
gtccgcggcgcgcccggccc

SEQ ID NO: 9821 - RNA, 20 nt, synthetic construct
  source 1..20: mol_type = other RNA
ggtccgcggcgcgcccggcc

SEQ ID NO: 9822 - RNA, 20 nt, synthetic construct
  source 1..20: mol_type = other RNA
cgggcgcgccgcggaccccg

SEQ ID NO: 9823 - RNA, 20 nt, synthetic construct
  source 1..20: mol_type = other RNA
gcgcgccgcggaccccgcgg

SEQ ID NO: 9824 - RNA, 20 nt, synthetic construct
  source 1..20: mol_type = other RNA
cgcggggtccgcggcgcgcc

SEQ ID NO: 9825 - RNA, 20 nt, synthetic construct
  source 1..20: mol_type = other RNA
agcggccgccgcggggtccg

SEQ ID NO: 9826 - RNA, 20 nt, synthetic construct
  source 1..20: mol_type = other RNA
aggaggaagcggccgccgcg

SEQ ID NO: 9827 - RNA, 20 nt, synthetic construct
  source 1..20: mol_type = other RNA
gaggaggaagcggccgccgc

SEQ ID NO: 9828 - RNA, 20 nt, synthetic construct
  source 1..20: mol_type = other RNA
ggaggaggaagcggccgccg

SEQ ID NO: 9829 - RNA, 20 nt, synthetic construct
  source 1..20: mol_type = other RNA
ggaggaggaggaggaggaag

SEQ ID NO: 9830 - RNA, 20 nt, synthetic construct
  source 1..20: mol_type = other RNA
tgaggaggaggaggaggagg

SEQ ID NO: 9831 - RNA, 20 nt, synthetic construct
  source 1..20: mol_type = other RNA
aagtgaggaggaggaggagg

SEQ ID NO: 9832 - RNA, 20 nt, synthetic construct
  source 1..20: mol_type = other RNA
gttaagtgaggaggaggagg

SEQ ID NO: 9833 - RNA, 20 nt, synthetic construct
  source 1..20: mol_type = other RNA
ctcctcctcacttaacaaaa

SEQ ID NO: 9834 - RNA, 20 nt, synthetic construct
  source 1..20: mol_type = other RNA
tttgttaagtgaggaggagg

SEQ ID NO: 9835 - RNA, 20 nt, synthetic construct
  source 1..20: mol_type = other RNA
ctcctcacttaacaaaatgg

SEQ ID NO: 9836 - RNA, 20 nt, synthetic construct
  source 1..20: mol_type = other RNA
cattttgttaagtgaggagg

SEQ ID NO: 9837 - RNA, 20 nt, synthetic construct
  source 1..20: mol_type = other RNA
ctcacttaacaaaatggcgg

SEQ ID NO: 9838 - RNA, 20 nt, synthetic construct
  source 1..20: mol_type = other RNA
cgccattttgttaagtgagg

SEQ ID NO: 9839 - RNA, 20 nt, synthetic construct
  source 1..20: mol_type = other RNA
cttaacaaaatggcggcggc

SEQ ID NO: 9840 - RNA, 20 nt, synthetic construct
  source 1..20: mol_type = other RNA
atggcggcggcaggaagtgc

SEQ ID NO: 9841 - RNA, 20 nt, synthetic construct
  source 1..20: mol_type = other RNA
tggcggcggcaggaagtgcc

SEQ ID NO: 9842 - RNA, 20 nt, synthetic construct
  source 1..20: mol_type = other RNA
gcaggaagtgccgggcgcct

SEQ ID NO: 9843 - RNA, 20 nt, synthetic construct
  source 1..20: mol_type = other RNA
aggactggtgccctttgggg

SEQ ID NO: 9844 - RNA, 20 nt, synthetic construct
  source 1..20: mol_type = other RNA
gtgaggactggtgccctttg

SEQ ID NO: 9845 - RNA, 20 nt, synthetic construct
  source 1..20: mol_type = other RNA
ggtgaggactggtgcccttt

SEQ ID NO: 9846 - RNA, 20 nt, synthetic construct
  source 1..20: mol_type = other RNA
aggtgaggactggtgccctt

SEQ ID NO: 9847 - RNA, 20 nt, synthetic construct
  source 1..20: mol_type = other RNA
cagtcctcacctgagacgct

SEQ ID NO: 9848 - RNA, 20 nt, synthetic construct
  source 1..20: mol_type = other RNA
ctagcgtctcaggtgaggac

SEQ ID NO: 9849 - RNA, 20 nt, synthetic construct
  source 1..20: mol_type = other RNA
gcggcctagcgtctcaggtg

SEQ ID NO: 9850 - RNA, 20 nt, synthetic construct
  source 1..20: mol_type = other RNA
ggcgtgcggcctagcgtctc

SEQ ID NO: 9851 - RNA, 20 nt, synthetic construct
  source 1..20: mol_type = other RNA
aggccgcacgccgcccccgc

SEQ ID NO: 9852 - RNA, 20 nt, synthetic construct
  source 1..20: mol_type = other RNA
cggccggcgggggcggcgtg

SEQ ID NO: 9853 - RNA, 20 nt, synthetic construct
  source 1..20: mol_type = other RNA
gggcggacggccggcggggg

SEQ ID NO: 9854 - RNA, 20 nt, synthetic construct
  source 1..20: mol_type = other RNA
agcgggcggacggccggcgg

SEQ ID NO: 9855 - RNA, 20 nt, synthetic construct
  source 1..20: mol_type = other RNA
cagcgggcggacggccggcg

SEQ ID NO: 9856 - RNA, 20 nt, synthetic construct
  source 1..20: mol_type = other RNA
gcagcgggcggacggccggc

SEQ ID NO: 9857 - RNA, 20 nt, synthetic construct
  source 1..20: mol_type = other RNA
ggcagcgggcggacggccgg

SEQ ID NO: 9858 - RNA, 20 nt, synthetic construct
  source 1..20: mol_type = other RNA
ggcggcagcgggcggacggc

SEQ ID NO: 9859 - RNA, 20 nt, synthetic construct
  source 1..20: mol_type = other RNA
gggcggcggcagcgggcgga

SEQ ID NO: 9860 - RNA, 20 nt, synthetic construct
  source 1..20: mol_type = other RNA
gagggggcggcggcagcggg

SEQ ID NO: 9861 - RNA, 20 nt, synthetic construct
  source 1..20: mol_type = other RNA
ggggagggggcggcggcagc

SEQ ID NO: 9862 - RNA, 20 nt, synthetic construct
  source 1..20: mol_type = other RNA
cggggagggggcggcggcag

SEQ ID NO: 9863 - RNA, 20 nt, synthetic construct
  source 1..20: mol_type = other RNA
gcagctcggggagggggcgg

SEQ ID NO: 9864 - RNA, 20 nt, synthetic construct
  source 1..20: mol_type = other RNA
ccctccccgagctgcctgcg

SEQ ID NO: 9865 - RNA, 20 nt, synthetic construct
  source 1..20: mol_type = other RNA
gcgcaggcagctcggggagg

SEQ ID NO: 9866 - RNA, 20 nt, synthetic construct
  source 1..20: mol_type = other RNA
cgcgcaggcagctcggggag

SEQ ID NO: 9867 - RNA, 20 nt, synthetic construct
  source 1..20: mol_type = other RNA
ccgcgcaggcagctcgggga

SEQ ID NO: 9868 - RNA, 20 nt, synthetic construct
  source 1..20: mol_type = other RNA
ccgagctgcctgcgcggcgc

SEQ ID NO: 9869 - RNA, 20 nt, synthetic construct
  source 1..20: mol_type = other RNA
cgagctgcctgcgcggcgcc

SEQ ID NO: 9870 - RNA, 20 nt, synthetic construct
  source 1..20: mol_type = other RNA
gagctgcctgcgcggcgccg

SEQ ID NO: 9871 - RNA, 20 nt, synthetic construct
  source 1..20: mol_type = other RNA
ggcgccgcgcaggcagctcg

SEQ ID NO: 9872 - RNA, 20 nt, synthetic construct
  source 1..20: mol_type = other RNA
cggcgccgcgcaggcagctc

SEQ ID NO: 9873 - RNA, 20 nt, synthetic construct
  source 1..20: mol_type = other RNA
ccggcgccgcgcaggcagct

SEQ ID NO: 9874 - RNA, 20 nt, synthetic construct
  source 1..20: mol_type = other RNA
ggcgggccccggcgccgcgc

SEQ ID NO: 9875 - RNA, 20 nt, synthetic construct
  source 1..20: mol_type = other RNA
gcagagcggcgggcgggccc

SEQ ID NO: 9876 - RNA, 20 nt, synthetic construct
  source 1..20: mol_type = other RNA
agctcggcagagcggcgggc

SEQ ID NO: 9877 - RNA, 20 nt, synthetic construct
  source 1..20: mol_type = other RNA
cgccgctctgccgagctcac

SEQ ID NO: 9878 - RNA, 20 nt, synthetic construct
  source 1..20: mol_type = other RNA
tgtgagctcggcagagcggc

SEQ ID NO: 9879 - RNA, 20 nt, synthetic construct
  source 1..20: mol_type = other RNA
ctgtgagctcggcagagcgg

SEQ ID NO: 9880 - RNA, 20 nt, synthetic construct
  source 1..20: mol_type = other RNA
ggcctgtgagctcggcagag

SEQ ID NO: 9881 - RNA, 20 nt, synthetic construct
  source 1..20: mol_type = other RNA
gcgagcgcggcctgtgagct

SEQ ID NO: 9882 - RNA, 20 nt, synthetic construct
  source 1..20: mol_type = other RNA
tcacaggccgcgctcgcccg

SEQ ID NO: 9883 - RNA, 20 nt, synthetic construct
  source 1..20: mol_type = other RNA
cacaggccgcgctcgcccgc

SEQ ID NO: 9884 - RNA, 20 nt, synthetic construct
  source 1..20: mol_type = other RNA
cgctcgcccgcgggcaccgc

SEQ ID NO: 9885 - RNA, 20 nt, synthetic construct
  source 1..20: mol_type = other RNA
gcggtgcccgcgggcgagcg

SEQ ID NO: 9886 - RNA, 20 nt, synthetic construct
  source 1..20: mol_type = other RNA
cggctgccggcggtgcccgc

SEQ ID NO: 9887 - RNA, 20 nt, synthetic construct
  source 1..20: mol_type = other RNA
gcggctgccggcggtgcccg

SEQ ID NO: 9888 - RNA, 20 nt, synthetic construct
  source 1..20: mol_type = other RNA
gcggctgcggcggctgccgg

SEQ ID NO: 9889 - RNA, 20 nt, synthetic construct
  source 1..20: mol_type = other RNA
gcagcggctgcggcggctgc

SEQ ID NO: 9890 - RNA, 20 nt, synthetic construct
  source 1..20: mol_type = other RNA
ggcggcggcagcggctgcgg

SEQ ID NO: 9891 - RNA, 20 nt, synthetic construct
  source 1..20: mol_type = other RNA
agtggcggcggcagcggctg

SEQ ID NO: 9892 - RNA, 20 nt, synthetic construct
  source 1..20: mol_type = other RNA
cgctgccgccgccactgctt

SEQ ID NO: 9893 - RNA, 20 nt, synthetic construct
  source 1..20: mol_type = other RNA
cgaagcagtggcggcggcag

SEQ ID NO: 9894 - RNA, 20 nt, synthetic construct
  source 1..20: mol_type = other RNA
ccgccactgcttcggctcct

SEQ ID NO: 9895 - RNA, 20 nt, synthetic construct
  source 1..20: mol_type = other RNA
aggagccgaagcagtggcgg

SEQ ID NO: 9896 - RNA, 20 nt, synthetic construct
  source 1..20: mol_type = other RNA
ccgaggagccgaagcagtgg

SEQ ID NO: 9897 - RNA, 20 nt, synthetic construct
  source 1..20: mol_type = other RNA
ctgcttcggctcctcggctg

SEQ ID NO: 9898 - RNA, 20 nt, synthetic construct
  source 1..20: mol_type = other RNA
tgcttcggctcctcggctgc

SEQ ID NO: 9899 - RNA, 20 nt, synthetic construct
  source 1..20: mol_type = other RNA
cagccgaggagccgaagcag

SEQ ID NO: 9900 - RNA, 20 nt, synthetic construct
  source 1..20: mol_type = other RNA
gttctggtctcccgcagccg

SEQ ID NO: 9901 - RNA, 20 nt, synthetic construct
  source 1..20: mol_type = other RNA
ggcggctgggctgtttgttc

SEQ ID NO: 9902 - RNA, 20 nt, synthetic construct
  source 1..20: mol_type = other RNA
cggcggcggcggcggcggct

SEQ ID NO: 9903 - RNA, 20 nt, synthetic construct
  source 1..20: mol_type = other RNA
gcggcggcggcggcggcggc

SEQ ID NO: 9904 - RNA, 20 nt, synthetic construct
  source 1..20: mol_type = other RNA
ggcggcggcggcggcggcgg

SEQ ID NO: 9905 - RNA, 20 nt, synthetic construct
  source 1..20: mol_type = other RNA
ggcggcggcggcggcggcgg

SEQ ID NO: 9906 - RNA, 20 nt, synthetic construct
  source 1..20: mol_type = other RNA
ggcggcggcggcggcggcgg

SEQ ID NO: 9907 - RNA, 20 nt, synthetic construct
  source 1..20: mol_type = other RNA
gctggcggcggcggcggcgg

SEQ ID NO: 9908 - RNA, 20 nt, synthetic construct
  source 1..20: mol_type = other RNA
tgcgctggcggcggcggcgg

SEQ ID NO: 9909 - RNA, 20 nt, synthetic construct
  source 1..20: mol_type = other RNA
cagtgcgctggcggcggcgg

SEQ ID NO: 9910 - RNA, 20 nt, synthetic construct
  source 1..20: mol_type = other RNA
cgtcagtgcgctggcggcgg

SEQ ID NO: 9911 - RNA, 20 nt, synthetic construct
  source 1..20: mol_type = other RNA
tgacgtcagtgcgctggcgg

SEQ ID NO: 9912 - RNA, 20 nt, synthetic construct
  source 1..20: mol_type = other RNA
cggtgacgtcagtgcgctgg

SEQ ID NO: 9913 - RNA, 20 nt, synthetic construct
  source 1..20: mol_type = other RNA
gcgcggtgacgtcagtgcgc

SEQ ID NO: 9914 - RNA, 20 nt, synthetic construct
  source 1..20: mol_type = other RNA
caccgcgcacgctgcgcgcg

SEQ ID NO: 9915 - RNA, 20 nt, synthetic construct
  source 1..20: mol_type = other RNA
ggccgcgcgcgcagcgtgcg

SEQ ID NO: 9916 - RNA, 20 nt, synthetic construct
  source 1..20: mol_type = other RNA
ggccccgcgccgccgccgcc

SEQ ID NO: 9917 - RNA, 20 nt, synthetic construct
  source 1..20: mol_type = other RNA
caccgggcggcggcggcgcg

SEQ ID NO: 9918 - RNA, 20 nt, synthetic construct
  source 1..20: mol_type = other RNA
acaccgggcggcggcggcgc

SEQ ID NO: 9919 - RNA, 20 nt, synthetic construct
  source 1..20: mol_type = other RNA
cacaccgggcggcggcggcg

SEQ ID NO: 9920 - RNA, 20 nt, synthetic construct
  source 1..20: mol_type = other RNA
gcgcgcacaccgggcggcgg

SEQ ID NO: 9921 - RNA, 20 nt, synthetic construct
  source 1..20: mol_type = other RNA
ggggcgcgcacaccgggcgg

SEQ ID NO: 9922 - RNA, 20 nt, synthetic construct
  source 1..20: mol_type = other RNA
ggcggggcgcgcacaccggg

SEQ ID NO: 9923 - RNA, 20 nt, synthetic construct
  source 1..20: mol_type = other RNA
gggggcggggcgcgcacacc

SEQ ID NO: 9924 - RNA, 20 nt, synthetic construct
  source 1..20: mol_type = other RNA
cgggggcggggcgcgcacac

SEQ ID NO: 9925 - RNA, 20 nt, synthetic construct
  source 1..20: mol_type = other RNA
tcgcgctgggcgcgggggcg

SEQ ID NO: 9926 - RNA, 20 nt, synthetic construct
  source 1..20: mol_type = other RNA
ttcgcgctgggcgcgggggc

SEQ ID NO: 9927 - RNA, 20 nt, synthetic construct
  source 1..20: mol_type = other RNA
gttcgcgctgggcgcggggg

SEQ ID NO: 9928 - RNA, 20 nt, synthetic construct
  source 1..20: mol_type = other RNA
ctcgttcgcgctgggcgcgg

SEQ ID NO: 9929 - RNA, 20 nt, synthetic construct
  source 1..20: mol_type = other RNA
cgcccagcgcgaacgagctc

SEQ ID NO: 9930 - RNA, 20 nt, synthetic construct
  source 1..20: mol_type = other RNA
agctcgttcgcgctgggcgc

SEQ ID NO: 9931 - RNA, 20 nt, synthetic construct
  source 1..20: mol_type = other RNA
gagctcgttcgcgctgggcg

SEQ ID NO: 9932 - RNA, 20 nt, synthetic construct
  source 1..20: mol_type = other RNA
ctccagagctcgttcgcgct

SEQ ID NO: 9933 - RNA, 20 nt, synthetic construct
  source 1..20: mol_type = other RNA
tctccagagctcgttcgcgc

SEQ ID NO: 9934 - RNA, 20 nt, synthetic construct
  source 1..20: mol_type = other RNA
aacgagctctggagagacag

SEQ ID NO: 9935 - RNA, 20 nt, synthetic construct
  source 1..20: mol_type = other RNA
ctggagagacagtggctgcg

SEQ ID NO: 9936 - RNA, 20 nt, synthetic construct
  source 1..20: mol_type = other RNA
gacagtggctgcgaggtgag

SEQ ID NO: 9937 - RNA, 20 nt, synthetic construct
  source 1..20: mol_type = other RNA
acagtggctgcgaggtgagt

SEQ ID NO: 9938 - RNA, 20 nt, synthetic construct
  source 1..20: mol_type = other RNA
cagtggctgcgaggtgagtg

SEQ ID NO: 9939 - RNA, 20 nt, synthetic construct
  source 1..20: mol_type = other RNA
agtggctgcgaggtgagtgg

SEQ ID NO: 9940 - RNA, 20 nt, synthetic construct
  source 1..20: mol_type = other RNA
gaggtgagtgggggataccg

SEQ ID NO: 9941 - RNA, 20 nt, synthetic construct
  source 1..20: mol_type = other RNA
gtgggggataccgcggactg

SEQ ID NO: 9942 - RNA, 20 nt, synthetic construct
  source 1..20: mol_type = other RNA
tgggggataccgcggactga

SEQ ID NO: 9943 - RNA, 20 nt, synthetic construct
  source 1..20: mol_type = other RNA
gggataccgcggactgaggg

SEQ ID NO: 9944 - RNA, 20 nt, synthetic construct
  source 1..20: mol_type = other RNA
gggtctcctccctcagtccg

SEQ ID NO: 9945 - RNA, 20 nt, synthetic construct
  source 1..20: mol_type = other RNA
gaggagaccccgcagagcga

SEQ ID NO: 9946 - RNA, 20 nt, synthetic construct
  source 1..20: mol_type = other RNA
gaccccgcagagcgaaggag

SEQ ID NO: 9947 - RNA, 20 nt, synthetic construct
  source 1..20: mol_type = other RNA
accccgcagagcgaaggagc

SEQ ID NO: 9948 - RNA, 20 nt, synthetic construct
  source 1..20: mol_type = other RNA
cgcagagcgaaggagcgggc

SEQ ID NO: 9949 - RNA, 20 nt, synthetic construct
  source 1..20: mol_type = other RNA
gcagagcgaaggagcgggct

SEQ ID NO: 9950 - RNA, 20 nt, synthetic construct
  source 1..20: mol_type = other RNA
cagagcgaaggagcgggctg

SEQ ID NO: 9951 - RNA, 20 nt, synthetic construct
  source 1..20: mol_type = other RNA
agagcgaaggagcgggctgg

SEQ ID NO: 9952 - RNA, 20 nt, synthetic construct
  source 1..20: mol_type = other RNA
cagcccgctccttcgctctg

SEQ ID NO: 9953 - RNA, 20 nt, synthetic construct
  source 1..20: mol_type = other RNA
aaggagcgggctgggggaaa

SEQ ID NO: 9954 - RNA, 20 nt, synthetic construct
  source 1..20: mol_type = other RNA
aggagcgggctgggggaaac

SEQ ID NO: 9955 - RNA, 20 nt, synthetic construct
  source 1..20: mol_type = other RNA
agcgggctgggggaaacggg

SEQ ID NO: 9956 - RNA, 20 nt, synthetic construct
  source 1..20: mol_type = other RNA
gggggaaacgggcggactgc

SEQ ID NO: 9957 - RNA, 20 nt, synthetic construct
  source 1..20: mol_type = other RNA
gaaacgggcggactgcaggc

SEQ ID NO: 9958 - RNA, 20 nt, synthetic construct
  source 1..20: mol_type = other RNA
aaacgggcggactgcaggct

SEQ ID NO: 9959 - RNA, 20 nt, synthetic construct
  source 1..20: mol_type = other RNA
cggactgcaggctgggcctg

SEQ ID NO: 9960 - RNA, 20 nt, synthetic construct
  source 1..20: mol_type = other RNA
ggactgcaggctgggcctgc

SEQ ID NO: 9961 - RNA, 20 nt, synthetic construct
  source 1..20: mol_type = other RNA
gcctgcgggaaaagatctga

SEQ ID NO: 9962 - RNA, 20 nt, synthetic construct
  source 1..20: mol_type = other RNA
gccttcagatcttttcccgc

SEQ ID NO: 9963 - RNA, 20 nt, synthetic construct
  source 1..20: mol_type = other RNA
gacatccaaaatactaagaa

SEQ ID NO: 9964 - RNA, 20 nt, synthetic construct
  source 1..20: mol_type = other RNA
tcagacctttcttagtattt

SEQ ID NO: 9965 - RNA, 20 nt, synthetic construct
  source 1..20: mol_type = other RNA
gtctgaagacagaccctcac

SEQ ID NO: 9966 - RNA, 20 nt, synthetic construct
  source 1..20: mol_type = other RNA
tctgaagacagaccctcaca

SEQ ID NO: 9967 - RNA, 20 nt, synthetic construct
  source 1..20: mol_type = other RNA
gaagacagaccctcacaggg

SEQ ID NO: 9968 - RNA, 20 nt, synthetic construct
  source 1..20: mol_type = other RNA
aagacagaccctcacaggga

SEQ ID NO: 9969 - RNA, 20 nt, synthetic construct
  source 1..20: mol_type = other RNA
acagaccctcacagggaggg

SEQ ID NO: 9970 - RNA, 20 nt, synthetic construct
  source 1..20: mol_type = other RNA
accctcacagggagggagga

SEQ ID NO: 9971 - RNA, 20 nt, synthetic construct
  source 1..20: mol_type = other RNA
cacagggagggaggatggtg

SEQ ID NO: 9972 - RNA, 20 nt, synthetic construct
  source 1..20: mol_type = other RNA
accatcctccctccctgtga

SEQ ID NO: 9973 - RNA, 20 nt, synthetic construct
  source 1..20: mol_type = other RNA
caccatcctccctccctgtg

SEQ ID NO: 9974 - RNA, 20 nt, synthetic construct
  source 1..20: mol_type = other RNA
agggagggaggatggtgagg

SEQ ID NO: 9975 - RNA, 20 nt, synthetic construct
  source 1..20: mol_type = other RNA
gggagggaggatggtgagga

SEQ ID NO: 9976 - RNA, 20 nt, synthetic construct
  source 1..20: mol_type = other RNA
ggagggaccccacagactga

SEQ ID NO: 9977 - RNA, 20 nt, synthetic construct
  source 1..20: mol_type = other RNA
gggaccccacagactgatgg

SEQ ID NO: 9978 - RNA, 20 nt, synthetic construct
  source 1..20: mol_type = other RNA
accccacagactgatggagg

SEQ ID NO: 9979 - RNA, 20 nt, synthetic construct
  source 1..20: mol_type = other RNA
ccacagactgatggaggagg

SEQ ID NO: 9980 - RNA, 20 nt, synthetic construct
  source 1..20: mol_type = other RNA
cagactgatggaggaggcgg

SEQ ID NO: 9981 - RNA, 20 nt, synthetic construct
  source 1..20: mol_type = other RNA
cgcctcctccatcagtctgt

SEQ ID NO: 9982 - RNA, 20 nt, synthetic construct
  source 1..20: mol_type = other RNA
ccgcctcctccatcagtctg

SEQ ID NO: 9983 - RNA, 20 nt, synthetic construct
  source 1..20: mol_type = other RNA
aggcggaggagagagcccta

SEQ ID NO: 9984 - RNA, 20 nt, synthetic construct
  source 1..20: mol_type = other RNA
ggcggaggagagagccctaa

SEQ ID NO: 9985 - RNA, 20 nt, synthetic construct
  source 1..20: mol_type = other RNA
gcggaggagagagccctaag

SEQ ID NO: 9986 - RNA, 20 nt, synthetic construct
  source 1..20: mol_type = other RNA
cggaggagagagccctaagg

SEQ ID NO: 9987 - RNA, 20 nt, synthetic construct
  source 1..20: mol_type = other RNA
ggaggagagagccctaaggg

SEQ ID NO: 9988 - RNA, 20 nt, synthetic construct
  source 1..20: mol_type = other RNA
gagccctaaggggggacccc

SEQ ID NO: 9989 - RNA, 20 nt, synthetic construct
  source 1..20: mol_type = other RNA
cctaaggggggaccccaggt

SEQ ID NO: 9990 - RNA, 20 nt, synthetic construct
  source 1..20: mol_type = other RNA
ctaaggggggaccccaggta

SEQ ID NO: 9991 - RNA, 20 nt, synthetic construct
  source 1..20: mol_type = other RNA
aggggggaccccaggtaggg

SEQ ID NO: 9992 - RNA, 20 nt, synthetic construct
  source 1..20: mol_type = other RNA
cctacctggggtcccccctt

SEQ ID NO: 9993 - RNA, 20 nt, synthetic construct
  source 1..20: mol_type = other RNA
gaccccaggtagggaggctg

SEQ ID NO: 9994 - RNA, 20 nt, synthetic construct
  source 1..20: mol_type = other RNA
cgcctcagcctccctacctg

SEQ ID NO: 9995 - RNA, 20 nt, synthetic construct
  source 1..20: mol_type = other RNA
tcgcctcagcctccctacct

SEQ ID NO: 9996 - RNA, 20 nt, synthetic construct
  source 1..20: mol_type = other RNA
ctcgcctcagcctccctacc

SEQ ID NO: 9997 - RNA, 20 nt, synthetic construct
  source 1..20: mol_type = other RNA
ctgaggcgagagagctgcga

SEQ ID NO: 9998 - RNA, 20 nt, synthetic construct
  source 1..20: mol_type = other RNA
tgaggcgagagagctgcgat

SEQ ID NO: 9999 - RNA, 20 nt, synthetic construct
  source 1..20: mol_type = other RNA
gaggcgagagagctgcgatg

SEQ ID NO: 10000 - RNA, 20 nt, synthetic construct
  source 1..20: mol_type = other RNA
aggcgagagagctgcgatgg

SEQ ID NO: 10001 - RNA, 20 nt, synthetic construct
  source 1..20: mol_type = other RNA
gagagctgcgatgggggcgc

SEQ ID NO: 10002 - RNA, 20 nt, synthetic construct
  source 1..20: mol_type = other RNA
agagctgcgatgggggcgcc

SEQ ID NO: 10003 - RNA, 20 nt, synthetic construct
  source 1..20: mol_type = other RNA
gagctgcgatgggggcgccg

SEQ ID NO: 10004 - RNA, 20 nt, synthetic construct
  source 1..20: mol_type = other RNA
tgcgatgggggcgccggggc

SEQ ID NO: 10005 - RNA, 20 nt, synthetic construct
  source 1..20: mol_type = other RNA
gcgatgggggcgccggggct

SEQ ID NO: 10006 - RNA, 20 nt, synthetic construct
  source 1..20: mol_type = other RNA
cgatgggggcgccggggctg

SEQ ID NO: 10007 - RNA, 20 nt, synthetic construct
  source 1..20: mol_type = other RNA
gcgccggggctggggtgaag

SEQ ID NO: 10008 - RNA, 20 nt, synthetic construct
  source 1..20: mol_type = other RNA
ccggggctggggtgaagtgg

SEQ ID NO: 10009 - RNA, 20 nt, synthetic construct
  source 1..20: mol_type = other RNA
gctggggtgaagtggaggaa

SEQ ID NO: 10010 - RNA, 20 nt, synthetic construct
  source 1..20: mol_type = other RNA
ggggtgaagtggaggaaagg

SEQ ID NO: 10011 - RNA, 20 nt, synthetic construct
  source 1..20: mol_type = other RNA
agtggaggaaaggaggtgag

SEQ ID NO: 10012 - RNA, 20 nt, synthetic construct
  source 1..20: mol_type = other RNA
ggaggaaaggaggtgagagg

SEQ ID NO: 10013 - RNA, 20 nt, synthetic construct
  source 1..20: mol_type = other RNA
gtgagaggaggctgcgagca

SEQ ID NO: 10014 - RNA, 20 nt, synthetic construct
  source 1..20: mol_type = other RNA
ggaggctgcgagcaaggccg

SEQ ID NO: 10015 - RNA, 20 nt, synthetic construct
  source 1..20: mol_type = other RNA
ggctgcgagcaaggccgagg

SEQ ID NO: 10016 - RNA, 20 nt, synthetic construct
  source 1..20: mol_type = other RNA
aggccgaggcggatcctcct

SEQ ID NO: 10017 - RNA, 20 nt, synthetic construct
  source 1..20: mol_type = other RNA
cagccaaggaggatccgcct

SEQ ID NO: 10018 - RNA, 20 nt, synthetic construct
  source 1..20: mol_type = other RNA
ggatcctccttggctgcccc

SEQ ID NO: 10019 - RNA, 20 nt, synthetic construct
  source 1..20: mol_type = other RNA
gatcctccttggctgcccct

SEQ ID NO: 10020 - RNA, 20 nt, synthetic construct
  source 1..20: mol_type = other RNA
ctccttggctgcccctgggc

SEQ ID NO: 10021 - RNA, 20 nt, synthetic construct
  source 1..20: mol_type = other RNA
tccttggctgcccctgggca

SEQ ID NO: 10022 - RNA, 20 nt, synthetic construct
  source 1..20: mol_type = other RNA
ttggctgcccctgggcaggg

SEQ ID NO: 10023 - RNA, 20 nt, synthetic construct
  source 1..20: mol_type = other RNA
tccctgcccaggggcagcca

SEQ ID NO: 10024 - RNA, 20 nt, synthetic construct
  source 1..20: mol_type = other RNA
ggtgctacctccctgcccag

SEQ ID NO: 10025 - RNA, 20 nt, synthetic construct
  source 1..20: mol_type = other RNA
aggtgctacctccctgccca

SEQ ID NO: 10026 - RNA, 20 nt, synthetic construct
  source 1..20: mol_type = other RNA
aaggtgctacctccctgccc

SEQ ID NO: 10027 - RNA, 20 nt, synthetic construct
  source 1..20: mol_type = other RNA
aggggggcataagaggagaa

SEQ ID NO: 10028 - RNA, 20 nt, synthetic construct
  source 1..20: mol_type = other RNA
gatcaacaggggggcataag

SEQ ID NO: 10029 - RNA, 20 nt, synthetic construct
  source 1..20: mol_type = other RNA
ttggaagaagatcaacaggg

SEQ ID NO: 10030 - RNA, 20 nt, synthetic construct
  source 1..20: mol_type = other RNA
gttggaagaagatcaacagg

SEQ ID NO: 10031 - RNA, 20 nt, synthetic construct
  source 1..20: mol_type = other RNA
ggttggaagaagatcaacag

SEQ ID NO: 10032 - RNA, 20 nt, synthetic construct
  source 1..20: mol_type = other RNA
gggttggaagaagatcaaca

SEQ ID NO: 10033 - RNA, 20 nt, synthetic construct
  source 1..20: mol_type = other RNA
tgggttggaagaagatcaac

SEQ ID NO: 10034 - RNA, 20 nt, synthetic construct
  source 1..20: mol_type = other RNA
caacccacctttttaaaaaa

SEQ ID NO: 10035 - RNA, 20 nt, synthetic construct
  source 1..20: mol_type = other RNA
aacccacctttttaaaaaaa

SEQ ID NO: 10036 - RNA, 20 nt, synthetic construct
  source 1..20: mol_type = other RNA
ctttttttaaaaaggtgggt

SEQ ID NO: 10037 - RNA, 20 nt, synthetic construct
  source 1..20: mol_type = other RNA
cctttttaaaaaaagggaca

SEQ ID NO: 10038 - RNA, 20 nt, synthetic construct
  source 1..20: mol_type = other RNA
gtccctttttttaaaaaggt

SEQ ID NO: 10039 - RNA, 20 nt, synthetic construct
  source 1..20: mol_type = other RNA
tgtccctttttttaaaaagg

SEQ ID NO: 10040 - RNA, 20 nt, synthetic construct
  source 1..20: mol_type = other RNA
ccatgtccctttttttaaaa

SEQ ID NO: 10041 - RNA, 20 nt, synthetic construct
  source 1..20: mol_type = other RNA
atggtcttgctctgtccccc

SEQ ID NO: 10042 - RNA, 20 nt, synthetic construct
  source 1..20: mol_type = other RNA
tcttgctctgtcccccaggc

SEQ ID NO: 10043 - RNA, 20 nt, synthetic construct
  source 1..20: mol_type = other RNA
actactgcactccagcctgg

SEQ ID NO: 10044 - RNA, 20 nt, synthetic construct
  source 1..20: mol_type = other RNA
cactactgcactccagcctg

SEQ ID NO: 10045 - RNA, 20 nt, synthetic construct
  source 1..20: mol_type = other RNA
gcactactgcactccagcct

SEQ ID NO: 10046 - RNA, 20 nt, synthetic construct
  source 1..20: mol_type = other RNA
tgcactactgcactccagcc

SEQ ID NO: 10047 - RNA, 20 nt, synthetic construct
  source 1..20: mol_type = other RNA
tcactgcagcctcaacctgc

SEQ ID NO: 10048 - RNA, 20 nt, synthetic construct
  source 1..20: mol_type = other RNA
cgcttgaggccagcaggttg

SEQ ID NO: 10049 - RNA, 20 nt, synthetic construct
  source 1..20: mol_type = other RNA
gaggatcgcttgaggccagc

SEQ ID NO: 10050 - RNA, 20 nt, synthetic construct
  source 1..20: mol_type = other RNA
tgaagcaggaggatcgcttg

SEQ ID NO: 10051 - RNA, 20 nt, synthetic construct
  source 1..20: mol_type = other RNA
acttgggaggctgaagcagg

SEQ ID NO: 10052 - RNA, 20 nt, synthetic construct
  source 1..20: mol_type = other RNA
gcttcagcctcccaagtagc

SEQ ID NO: 10053 - RNA, 20 nt, synthetic construct
  source 1..20: mol_type = other RNA
cttcagcctcccaagtagct

SEQ ID NO: 10054 - RNA, 20 nt, synthetic construct
  source 1..20: mol_type = other RNA
gctacttgggaggctgaagc

SEQ ID NO: 10055 - RNA, 20 nt, synthetic construct
  source 1..20: mol_type = other RNA
tcccaagtagctgggactac

SEQ ID NO: 10056 - RNA, 20 nt, synthetic construct
  source 1..20: mol_type = other RNA
tgtagtcccagctacttggg

SEQ ID NO: 10057 - RNA, 20 nt, synthetic construct
  source 1..20: mol_type = other RNA
acctgtagtcccagctactt

SEQ ID NO: 10058 - RNA, 20 nt, synthetic construct
  source 1..20: mol_type = other RNA
cacctgtagtcccagctact

SEQ ID NO: 10059 - RNA, 20 nt, synthetic construct
  source 1..20: mol_type = other RNA
aaatagttagctgggtgtgg

SEQ ID NO: 10060 - RNA, 20 nt, synthetic construct
  source 1..20: mol_type = other RNA
aaaaaatagttagctgggtg

SEQ ID NO: 10061 - RNA, 20 nt, synthetic construct
  source 1..20: mol_type = other RNA
ctaactattttttgtagaga

SEQ ID NO: 10062 - RNA, 20 nt, synthetic construct
  source 1..20: mol_type = other RNA
taactattttttgtagagat

SEQ ID NO: 10063 - RNA, 20 nt, synthetic construct
  source 1..20: mol_type = other RNA
gagatgggatctcacgatgt

SEQ ID NO: 10064 - RNA, 20 nt, synthetic construct
  source 1..20: mol_type = other RNA
gggatctcacgatgttggcc

SEQ ID NO: 10065 - RNA, 20 nt, synthetic construct
  source 1..20: mol_type = other RNA
tctcacgatgttggccaggc

SEQ ID NO: 10066 - RNA, 20 nt, synthetic construct
  source 1..20: mol_type = other RNA
ccaggctggtctctgtctcc

SEQ ID NO: 10067 - RNA, 20 nt, synthetic construct
  source 1..20: mol_type = other RNA
ccaggagacagagaccagcc

SEQ ID NO: 10068 - RNA, 20 nt, synthetic construct
  source 1..20: mol_type = other RNA
caggaggatcgcttgagtcc

SEQ ID NO: 10069 - RNA, 20 nt, synthetic construct
  source 1..20: mol_type = other RNA
ctttgggaggtcgaggcagg

SEQ ID NO: 10070 - RNA, 20 nt, synthetic construct
  source 1..20: mol_type = other RNA
gcactttgggaggtcgaggc

SEQ ID NO: 10071 - RNA, 20 nt, synthetic construct
  source 1..20: mol_type = other RNA
actagcactttgggaggtcg

SEQ ID NO: 10072 - RNA, 20 nt, synthetic construct
  source 1..20: mol_type = other RNA
tcccaaagtgctagtattac

SEQ ID NO: 10073 - RNA, 20 nt, synthetic construct
  source 1..20: mol_type = other RNA
tgtaatactagcactttggg

SEQ ID NO: 10074 - RNA, 20 nt, synthetic construct
  source 1..20: mol_type = other RNA
gcctgtaatactagcacttt

SEQ ID NO: 10075 - RNA, 20 nt, synthetic construct
  source 1..20: mol_type = other RNA
cgcctgtaatactagcactt

SEQ ID NO: 10076 - RNA, 20 nt, synthetic construct
  source 1..20: mol_type = other RNA
tgggaaggagctgggcgcgg

SEQ ID NO: 10077 - RNA, 20 nt, synthetic construct
  source 1..20: mol_type = other RNA
ggatgggaaggagctgggcg

SEQ ID NO: 10078 - RNA, 20 nt, synthetic construct
  source 1..20: mol_type = other RNA
cttaaggatgggaaggagct

SEQ ID NO: 10079 - RNA, 20 nt, synthetic construct
  source 1..20: mol_type = other RNA
tcttaaggatgggaaggagc

SEQ ID NO: 10080 - RNA, 20 nt, synthetic construct
  source 1..20: mol_type = other RNA
gttgagtcttaaggatggga

SEQ ID NO: 10081 - RNA, 20 nt, synthetic construct
  source 1..20: mol_type = other RNA
tggggttgagtcttaaggat

SEQ ID NO: 10082 - RNA, 20 nt, synthetic construct
  source 1..20: mol_type = other RNA
ttggggttgagtcttaagga

SEQ ID NO: 10083 - RNA, 20 nt, synthetic construct
  source 1..20: mol_type = other RNA
tgacttggggttgagtctta

SEQ ID NO: 10084 - RNA, 20 nt, synthetic construct
  source 1..20: mol_type = other RNA
actcaaccccaagtcagacc

SEQ ID NO: 10085 - RNA, 20 nt, synthetic construct
  source 1..20: mol_type = other RNA
accccaagtcagaccaggct

SEQ ID NO: 10086 - RNA, 20 nt, synthetic construct
  source 1..20: mol_type = other RNA
ccaagtcagaccaggctcgg

SEQ ID NO: 10087 - RNA, 20 nt, synthetic construct
  source 1..20: mol_type = other RNA
accgagcctggtctgacttg

SEQ ID NO: 10088 - RNA, 20 nt, synthetic construct
  source 1..20: mol_type = other RNA
caccgagcctggtctgactt

SEQ ID NO: 10089 - RNA, 20 nt, synthetic construct
  source 1..20: mol_type = other RNA
ccaccgagcctggtctgact

SEQ ID NO: 10090 - RNA, 20 nt, synthetic construct
  source 1..20: mol_type = other RNA
caggtgtgagccaccgagcc

SEQ ID NO: 10091 - RNA, 20 nt, synthetic construct
  source 1..20: mol_type = other RNA
cacctgtaatctcagcactt

SEQ ID NO: 10092 - RNA, 20 nt, synthetic construct
  source 1..20: mol_type = other RNA
acctgtaatctcagcacttt

SEQ ID NO: 10093 - RNA, 20 nt, synthetic construct
  source 1..20: mol_type = other RNA
tgtaatctcagcactttggg

SEQ ID NO: 10094 - RNA, 20 nt, synthetic construct
  source 1..20: mol_type = other RNA
tcccaaagtgctgagattac

SEQ ID NO: 10095 - RNA, 20 nt, synthetic construct
  source 1..20: mol_type = other RNA
ctcagcactttgggaggcag

SEQ ID NO: 10096 - RNA, 20 nt, synthetic construct
  source 1..20: mol_type = other RNA
gcactttgggaggcagaggc

SEQ ID NO: 10097 - RNA, 20 nt, synthetic construct
  source 1..20: mol_type = other RNA
ctttgggaggcagaggcagg

SEQ ID NO: 10098 - RNA, 20 nt, synthetic construct
  source 1..20: mol_type = other RNA
gggaggcagaggcaggaggt

SEQ ID NO: 10099 - RNA, 20 nt, synthetic construct
  source 1..20: mol_type = other RNA
agaggcaggaggttggcttg

SEQ ID NO: 10100 - RNA, 20 nt, synthetic construct
  source 1..20: mol_type = other RNA
caggaggttggcttgaggcc

SEQ ID NO: 10101 - RNA, 20 nt, synthetic construct
  source 1..20: mol_type = other RNA
aggaggttggcttgaggcca

SEQ ID NO: 10102 - RNA, 20 nt, synthetic construct
  source 1..20: mol_type = other RNA
ggaggttggcttgaggccag

SEQ ID NO: 10103 - RNA, 20 nt, synthetic construct
  source 1..20: mol_type = other RNA
gttggcttgaggccaggggt

SEQ ID NO: 10104 - RNA, 20 nt, synthetic construct
  source 1..20: mol_type = other RNA
ctaggatggtctccaacccc

SEQ ID NO: 10105 - RNA, 20 nt, synthetic construct
  source 1..20: mol_type = other RNA
tttcactctgttggctagga

SEQ ID NO: 10106 - RNA, 20 nt, synthetic construct
  source 1..20: mol_type = other RNA
gaggtttcactctgttggct

SEQ ID NO: 10107 - RNA, 20 nt, synthetic construct
  source 1..20: mol_type = other RNA
gaggcgaggtttcactctgt

SEQ ID NO: 10108 - RNA, 20 nt, synthetic construct
  source 1..20: mol_type = other RNA
ttgtatttttagtagaggcg

SEQ ID NO: 10109 - RNA, 20 nt, synthetic construct
  source 1..20: mol_type = other RNA
aatttttgtatttttagtag

SEQ ID NO: 10110 - RNA, 20 nt, synthetic construct
  source 1..20: mol_type = other RNA
atacaaaaattagccccgtg

SEQ ID NO: 10111 - RNA, 20 nt, synthetic construct
  source 1..20: mol_type = other RNA
tacaaaaattagccccgtgt

SEQ ID NO: 10112 - RNA, 20 nt, synthetic construct
  source 1..20: mol_type = other RNA
aaaattagccccgtgtgggc

SEQ ID NO: 10113 - RNA, 20 nt, synthetic construct
  source 1..20: mol_type = other RNA
aaattagccccgtgtgggcc

SEQ ID NO: 10114 - RNA, 20 nt, synthetic construct
  source 1..20: mol_type = other RNA
cccgtgtgggccgggcgcag

SEQ ID NO: 10115 - RNA, 20 nt, synthetic construct
  source 1..20: mol_type = other RNA
cactgcgcccggcccacacg

SEQ ID NO: 10116 - RNA, 20 nt, synthetic construct
  source 1..20: mol_type = other RNA
ccactgcgcccggcccacac

SEQ ID NO: 10117 - RNA, 20 nt, synthetic construct
  source 1..20: mol_type = other RNA
gccactgcgcccggcccaca

SEQ ID NO: 10118 - RNA, 20 nt, synthetic construct
  source 1..20: mol_type = other RNA
caggcgtgagccactgcgcc

SEQ ID NO: 10119 - RNA, 20 nt, synthetic construct
  source 1..20: mol_type = other RNA
cgcctgtaatcccagcactt

SEQ ID NO: 10120 - RNA, 20 nt, synthetic construct
  source 1..20: mol_type = other RNA
gcctgtaatcccagcacttt

SEQ ID NO: 10121 - RNA, 20 nt, synthetic construct
  source 1..20: mol_type = other RNA
tgtaatcccagcactttggg

SEQ ID NO: 10122 - RNA, 20 nt, synthetic construct
  source 1..20: mol_type = other RNA
aatcccagcactttgggagg

SEQ ID NO: 10123 - RNA, 20 nt, synthetic construct
  source 1..20: mol_type = other RNA
atcccagcactttgggaggc

SEQ ID NO: 10124 - RNA, 20 nt, synthetic construct
  source 1..20: mol_type = other RNA
tgcccgcctcccaaagtgct

SEQ ID NO: 10125 - RNA, 20 nt, synthetic construct
  source 1..20: mol_type = other RNA
ctgcccgcctcccaaagtgc

SEQ ID NO: 10126 - RNA, 20 nt, synthetic construct
  source 1..20: mol_type = other RNA
tgggaggcgggcagatcacg

SEQ ID NO: 10127 - RNA, 20 nt, synthetic construct
  source 1..20: mol_type = other RNA
ggcgggcagatcacgaggta

SEQ ID NO: 10128 - RNA, 20 nt, synthetic construct
  source 1..20: mol_type = other RNA
taaggagatcgagaccatcc

SEQ ID NO: 10129 - RNA, 20 nt, synthetic construct
  source 1..20: mol_type = other RNA
cgagaccatcctggctaaga

SEQ ID NO: 10130 - RNA, 20 nt, synthetic construct
  source 1..20: mol_type = other RNA
tttcaccgtcttagccagga

SEQ ID NO: 10131 - RNA, 20 nt, synthetic construct
  source 1..20: mol_type = other RNA
ggggtttcaccgtcttagcc

SEQ ID NO: 10132 - RNA, 20 nt, synthetic construct
  source 1..20: mol_type = other RNA
ttgtatttttagtagagacg

SEQ ID NO: 10133 - RNA, 20 nt, synthetic construct
  source 1..20: mol_type = other RNA
tttgtatttttagtagagac

SEQ ID NO: 10134 - RNA, 20 nt, synthetic construct
  source 1..20: mol_type = other RNA
ttttgtatttttagtagaga

SEQ ID NO: 10135 - RNA, 20 nt, synthetic construct
  source 1..20: mol_type = other RNA
taaaaatacaaaaaattagc

SEQ ID NO: 10136 - RNA, 20 nt, synthetic construct
  source 1..20: mol_type = other RNA
aaaaatacaaaaaattagcc

SEQ ID NO: 10137 - RNA, 20 nt, synthetic construct
  source 1..20: mol_type = other RNA
tacaaaaaattagccgggtg

SEQ ID NO: 10138 - RNA, 20 nt, synthetic construct
  source 1..20: mol_type = other RNA
aaaaaattagccgggtgtgg

SEQ ID NO: 10139 - RNA, 20 nt, synthetic construct
  source 1..20: mol_type = other RNA
aaattagccgggtgtggtgg

SEQ ID NO: 10140 - RNA, 20 nt, synthetic construct
  source 1..20: mol_type = other RNA
aattagccgggtgtggtggt

SEQ ID NO: 10141 - RNA, 20 nt, synthetic construct
  source 1..20: mol_type = other RNA
caggcgcccaccaccacacc

SEQ ID NO: 10142 - RNA, 20 nt, synthetic construct
  source 1..20: mol_type = other RNA
tctcgagtagctgggactac

SEQ ID NO: 10143 - RNA, 20 nt, synthetic construct
  source 1..20: mol_type = other RNA
cccagctactcgagagactg

SEQ ID NO: 10144 - RNA, 20 nt, synthetic construct
  source 1..20: mol_type = other RNA
gctactcgagagactgaggc

SEQ ID NO: 10145 - RNA, 20 nt, synthetic construct
  source 1..20: mol_type = other RNA
cctcagtctctcgagtagct

SEQ ID NO: 10146 - RNA, 20 nt, synthetic construct
  source 1..20: mol_type = other RNA
gcctcagtctctcgagtagc

SEQ ID NO: 10147 - RNA, 20 nt, synthetic construct
  source 1..20: mol_type = other RNA
gagagactgaggcaggagaa

SEQ ID NO: 10148 - RNA, 20 nt, synthetic construct
  source 1..20: mol_type = other RNA
gcaggagaatggcgtgaacc

SEQ ID NO: 10149 - RNA, 20 nt, synthetic construct
  source 1..20: mol_type = other RNA
caggagaatggcgtgaaccc

SEQ ID NO: 10150 - RNA, 20 nt, synthetic construct
  source 1..20: mol_type = other RNA
gagaatggcgtgaacccggg

SEQ ID NO: 10151 - RNA, 20 nt, synthetic construct
  source 1..20: mol_type = other RNA
aatggcgtgaacccgggagg

SEQ ID NO: 10152 - RNA, 20 nt, synthetic construct
  source 1..20: mol_type = other RNA
gaggcggagcttgctgtgag

SEQ ID NO: 10153 - RNA, 20 nt, synthetic construct
  source 1..20: mol_type = other RNA
tcacagcaagctccgcctcc

SEQ ID NO: 10154 - RNA, 20 nt, synthetic construct
  source 1..20: mol_type = other RNA
tcgcacaggctggagtgcag

SEQ ID NO: 10155 - RNA, 20 nt, synthetic construct
  source 1..20: mol_type = other RNA
gtcgcacaggctggagtgca

SEQ ID NO: 10156 - RNA, 20 nt, synthetic construct
  source 1..20: mol_type = other RNA
tgtcgcacaggctggagtgc

SEQ ID NO: 10157 - RNA, 20 nt, synthetic construct
  source 1..20: mol_type = other RNA
tctcgctctgtcgcacaggc

SEQ ID NO: 10158 - RNA, 20 nt, synthetic construct
  source 1..20: mol_type = other RNA
ggagtctcgctctgtcgcac

SEQ ID NO: 10159 - RNA, 20 nt, synthetic construct
  source 1..20: mol_type = other RNA
ttttttttttttttttgaga

SEQ ID NO: 10160 - RNA, 20 nt, synthetic construct
  source 1..20: mol_type = other RNA
aaaaaaaaaaaaaaattagc

SEQ ID NO: 10161 - RNA, 20 nt, synthetic construct
  source 1..20: mol_type = other RNA
aaaaaaaaaaaaaattagcc

SEQ ID NO: 10162 - RNA, 20 nt, synthetic construct
  source 1..20: mol_type = other RNA
aaaaaaaaattagccgggtg

SEQ ID NO: 10163 - RNA, 20 nt, synthetic construct
  source 1..20: mol_type = other RNA
aaaaaattagccgggtgtgg

SEQ ID NO: 10164 - RNA, 20 nt, synthetic construct
  source 1..20: mol_type = other RNA
caggcatgcgccaccacacc

SEQ ID NO: 10165 - RNA, 20 nt, synthetic construct
  source 1..20: mol_type = other RNA
cattacaggcatgggattac

SEQ ID NO: 10166 - RNA, 20 nt, synthetic construct
  source 1..20: mol_type = other RNA
gcctgtaatgccagctactc

SEQ ID NO: 10167 - RNA, 20 nt, synthetic construct
  source 1..20: mol_type = other RNA
agtagctggcattacaggca

SEQ ID NO: 10168 - RNA, 20 nt, synthetic construct
  source 1..20: mol_type = other RNA
tgtaatgccagctactcagg

SEQ ID NO: 10169 - RNA, 20 nt, synthetic construct
  source 1..20: mol_type = other RNA
tcctgagtagctggcattac

SEQ ID NO: 10170 - RNA, 20 nt, synthetic construct
  source 1..20: mol_type = other RNA
gccagctactcaggaggcta

SEQ ID NO: 10171 - RNA, 20 nt, synthetic construct
  source 1..20: mol_type = other RNA
gccttagcctcctgagtagc

SEQ ID NO: 10172 - RNA, 20 nt, synthetic construct
  source 1..20: mol_type = other RNA
gcagaagaatcacttgaacc

SEQ ID NO: 10173 - RNA, 20 nt, synthetic construct
  source 1..20: mol_type = other RNA
cagaagaatcacttgaaccc

SEQ ID NO: 10174 - RNA, 20 nt, synthetic construct
  source 1..20: mol_type = other RNA
aagaatcacttgaacccggg

SEQ ID NO: 10175 - RNA, 20 nt, synthetic construct
  source 1..20: mol_type = other RNA
cacttgaacccgggaggcgt

SEQ ID NO: 10176 - RNA, 20 nt, synthetic construct
  source 1..20: mol_type = other RNA
cactgcaacctacgcctccc

SEQ ID NO: 10177 - RNA, 20 nt, synthetic construct
  source 1..20: mol_type = other RNA
tcactgcaacctacgcctcc

SEQ ID NO: 10178 - RNA, 20 nt, synthetic construct
  source 1..20: mol_type = other RNA
agagtgcagtggcacaatct

SEQ ID NO: 10179 - RNA, 20 nt, synthetic construct
  source 1..20: mol_type = other RNA
tgtgccactgcactctagcc

SEQ ID NO: 10180 - RNA, 20 nt, synthetic construct
  source 1..20: mol_type = other RNA
gtgccactgcactctagcct

SEQ ID NO: 10181 - RNA, 20 nt, synthetic construct
  source 1..20: mol_type = other RNA
tcgcccaggctagagtgcag

SEQ ID NO: 10182 - RNA, 20 nt, synthetic construct
  source 1..20: mol_type = other RNA
ctagcctgggcgacagagca

SEQ ID NO: 10183 - RNA, 20 nt, synthetic construct
  source 1..20: mol_type = other RNA
agagccttgctctgtcgccc

SEQ ID NO: 10184 - RNA, 20 nt, synthetic construct
  source 1..20: mol_type = other RNA
ggttgagtctttttcttttt

SEQ ID NO: 10185 - RNA, 20 nt, synthetic construct
  source 1..20: mol_type = other RNA
ctcaaccctaagtcagctcc

SEQ ID NO: 10186 - RNA, 20 nt, synthetic construct
  source 1..20: mol_type = other RNA
tacgtcctggagctgactta

SEQ ID NO: 10187 - RNA, 20 nt, synthetic construct
  source 1..20: mol_type = other RNA
atacgtcctggagctgactt

SEQ ID NO: 10188 - RNA, 20 nt, synthetic construct
  source 1..20: mol_type = other RNA
tagagtaggcacatacgtcc

SEQ ID NO: 10189 - RNA, 20 nt, synthetic construct
  source 1..20: mol_type = other RNA
cggactcacacatgtagagt

SEQ ID NO: 10190 - DNA, 28 bp, synthetic construct
  source 1..28: mol_type = other DNA
cgtagacttttcacttacatacgaaagg

SEQ ID NO: 10191 - DNA, 28 bp, synthetic construct
  source 1..28: mol_type = other DNA
ttaaacactttagacatttgtagaaggg

SEQ ID NO: 10192 - DNA, 28 bp, synthetic construct
  source 1..28: mol_type = other DNA
attaaacactttagacatttgtagaagg

SEQ ID NO: 10193 - DNA, 28 bp, synthetic construct
  source 1..28: mol_type = other DNA
gtctcagattcactgacataattattgg

SEQ ID NO: 10194 - DNA, 28 bp, synthetic construct
  source 1..28: mol_type = other DNA
cactgtactgtatgcacggatcgcttgg

SEQ ID NO: 10195 - DNA, 28 bp, synthetic construct
  source 1..28: mol_type = other DNA
caagcgatccgtgcatacagtacagtgg

SEQ ID NO: 10196 - DNA, 28 bp, synthetic construct
  source 1..28: mol_type = other DNA
aagcgatccgtgcatacagtacagtggg

SEQ ID NO: 10197 - DNA, 28 bp, synthetic construct
  source 1..28: mol_type = other DNA
agcgatccgtgcatacagtacagtgggg

SEQ ID NO: 10198 - DNA, 28 bp, synthetic construct
  source 1..28: mol_type = other DNA
gcgatccgtgcatacagtacagtggggg

SEQ ID NO: 10199 - DNA, 28 bp, synthetic construct
  source 1..28: mol_type = other DNA
acaagcccccactgtactgtatgcacgg

SEQ ID NO: 10200 - DNA, 28 bp, synthetic construct
  source 1..28: mol_type = other DNA
gggggcttgtacacacctcttactctgg

SEQ ID NO: 10201 - DNA, 28 bp, synthetic construct
  source 1..28: mol_type = other DNA
ttgtacacacctcttactctggtatagg

SEQ ID NO: 10202 - DNA, 28 bp, synthetic construct
  source 1..28: mol_type = other DNA
aatcttagtcctataccagagtaagagg

SEQ ID NO: 10203 - DNA, 28 bp, synthetic construct
  source 1..28: mol_type = other DNA
tataggactaagatttctagtactgtgg

SEQ ID NO: 10204 - DNA, 28 bp, synthetic construct
  source 1..28: mol_type = other DNA
ataggactaagatttctagtactgtggg

SEQ ID NO: 10205 - DNA, 28 bp, synthetic construct
  source 1..28: mol_type = other DNA
gactaagatttctagtactgtgggaagg

SEQ ID NO: 10206 - DNA, 28 bp, synthetic construct
  source 1..28: mol_type = other DNA
actaagatttctagtactgtgggaaggg

SEQ ID NO: 10207 - DNA, 28 bp, synthetic construct
  source 1..28: mol_type = other DNA
agatttctagtactgtgggaagggttgg

SEQ ID NO: 10208 - DNA, 28 bp, synthetic construct
  source 1..28: mol_type = other DNA
gatttctagtactgtgggaagggttggg

SEQ ID NO: 10209 - DNA, 28 bp, synthetic construct
  source 1..28: mol_type = other DNA
tagtactgtgggaagggttgggaaatgg

SEQ ID NO: 10210 - DNA, 28 bp, synthetic construct
  source 1..28: mol_type = other DNA
actgtgggaagggttgggaaatggctgg

SEQ ID NO: 10211 - DNA, 28 bp, synthetic construct
  source 1..28: mol_type = other DNA
tagatcccagttctaattacaacccagg

SEQ ID NO: 10212 - DNA, 28 bp, synthetic construct
  source 1..28: mol_type = other DNA
ctctacctgggttgtaattagaactggg

SEQ ID NO: 10213 - DNA, 28 bp, synthetic construct
  source 1..28: mol_type = other DNA
tctctacctgggttgtaattagaactgg

SEQ ID NO: 10214 - DNA, 28 bp, synthetic construct
  source 1..28: mol_type = other DNA
caacccaggtagagagacacccatcagg

SEQ ID NO: 10215 - DNA, 28 bp, synthetic construct
  source 1..28: mol_type = other DNA
aacccaggtagagagacacccatcaggg

SEQ ID NO: 10216 - DNA, 28 bp, synthetic construct
  source 1..28: mol_type = other DNA
ctccctgatgggtgtctctctacctggg

SEQ ID NO: 10217 - DNA, 28 bp, synthetic construct
  source 1..28: mol_type = other DNA
ccaggtagagagacacccatcagggagg

SEQ ID NO: 10218 - DNA, 28 bp, synthetic construct
  source 1..28: mol_type = other DNA
tagagagacacccatcagggaggtgtgg

SEQ ID NO: 10219 - DNA, 28 bp, synthetic construct
  source 1..28: mol_type = other DNA
gacacccatcagggaggtgtggagaagg

SEQ ID NO: 10220 - DNA, 28 bp, synthetic construct
  source 1..28: mol_type = other DNA
atggccttctccacacctccctgatggg

SEQ ID NO: 10221 - DNA, 28 bp, synthetic construct
  source 1..28: mol_type = other DNA
catggccttctccacacctccctgatgg

SEQ ID NO: 10222 - DNA, 28 bp, synthetic construct
  source 1..28: mol_type = other DNA
catcagggaggtgtggagaaggccatgg

SEQ ID NO: 10223 - DNA, 28 bp, synthetic construct
  source 1..28: mol_type = other DNA
gccatggctgagttaaatcttcagcagg

SEQ ID NO: 10224 - DNA, 28 bp, synthetic construct
  source 1..28: mol_type = other DNA
tcctgctgaagatttaactcagccatgg

SEQ ID NO: 10225 - DNA, 28 bp, synthetic construct
  source 1..28: mol_type = other DNA
agagaaaactatccagctcagcagttgg

SEQ ID NO: 10226 - DNA, 28 bp, synthetic construct
  source 1..28: mol_type = other DNA
actatccagctcagcagttggacccagg

SEQ ID NO: 10227 - DNA, 28 bp, synthetic construct
  source 1..28: mol_type = other DNA
tccagctcagcagttggacccaggctgg

SEQ ID NO: 10228 - DNA, 28 bp, synthetic construct
  source 1..28: mol_type = other DNA
ccagctcagcagttggacccaggctggg

SEQ ID NO: 10229 - DNA, 28 bp, synthetic construct
  source 1..28: mol_type = other DNA
cagctcagcagttggacccaggctgggg

SEQ ID NO: 10230 - DNA, 28 bp, synthetic construct
  source 1..28: mol_type = other DNA
ttttgttcagacacttccccagcctggg

SEQ ID NO: 10231 - DNA, 28 bp, synthetic construct
  source 1..28: mol_type = other DNA
gttttgttcagacacttccccagcctgg

SEQ ID NO: 10232 - DNA, 28 bp, synthetic construct
  source 1..28: mol_type = other DNA
gctggggaagtgtctgaacaaaacaagg

SEQ ID NO: 10233 - DNA, 28 bp, synthetic construct
  source 1..28: mol_type = other DNA
gaacaaaacaaggaacaaaaatgagtgg

SEQ ID NO: 10234 - DNA, 28 bp, synthetic construct
  source 1..28: mol_type = other DNA
aacaaaacaaggaacaaaaatgagtggg

SEQ ID NO: 10235 - DNA, 28 bp, synthetic construct
  source 1..28: mol_type = other DNA
aaaacaaggaacaaaaatgagtgggtgg

SEQ ID NO: 10236 - DNA, 28 bp, synthetic construct
  source 1..28: mol_type = other DNA
aaacaaggaacaaaaatgagtgggtggg

SEQ ID NO: 10237 - DNA, 28 bp, synthetic construct
  source 1..28: mol_type = other DNA
acaaaaatgagtgggtgggatgagatgg

SEQ ID NO: 10238 - DNA, 28 bp, synthetic construct
  source 1..28: mol_type = other DNA
aagtgtgacgtatttaggttctttgggg

SEQ ID NO: 10239 - DNA, 28 bp, synthetic construct
  source 1..28: mol_type = other DNA
caagtgtgacgtatttaggttctttggg

SEQ ID NO: 10240 - DNA, 28 bp, synthetic construct
  source 1..28: mol_type = other DNA
tcaagtgtgacgtatttaggttctttgg

SEQ ID NO: 10241 - DNA, 28 bp, synthetic construct
  source 1..28: mol_type = other DNA
gaacctaaatacgtcacacttgaagtgg

SEQ ID NO: 10242 - DNA, 28 bp, synthetic construct
  source 1..28: mol_type = other DNA
gtgccacttcaagtgtgacgtatttagg

SEQ ID NO: 10243 - DNA, 28 bp, synthetic construct
  source 1..28: mol_type = other DNA
atacgtcacacttgaagtggcacagtgg

SEQ ID NO: 10244 - DNA, 28 bp, synthetic construct
  source 1..28: mol_type = other DNA
agtggtatatgagaaagtgcctgagtgg

SEQ ID NO: 10245 - DNA, 28 bp, synthetic construct
  source 1..28: mol_type = other DNA
gtggtatatgagaaagtgcctgagtggg

SEQ ID NO: 10246 - DNA, 28 bp, synthetic construct
  source 1..28: mol_type = other DNA
atatgagaaagtgcctgagtgggcatgg

SEQ ID NO: 10247 - DNA, 28 bp, synthetic construct
  source 1..28: mol_type = other DNA
acttcttcgatgtccatgcccactcagg

SEQ ID NO: 10248 - DNA, 28 bp, synthetic construct
  source 1..28: mol_type = other DNA
tgagtgggcatggacatcgaagaagtgg

SEQ ID NO: 10249 - DNA, 28 bp, synthetic construct
  source 1..28: mol_type = other DNA
gagtgggcatggacatcgaagaagtggg

SEQ ID NO: 10250 - DNA, 28 bp, synthetic construct
  source 1..28: mol_type = other DNA
agtgggcatggacatcgaagaagtgggg

SEQ ID NO: 10251 - DNA, 28 bp, synthetic construct
  source 1..28: mol_type = other DNA
gtgggcatggacatcgaagaagtggggg

SEQ ID NO: 10252 - DNA, 28 bp, synthetic construct
  source 1..28: mol_type = other DNA
tgggcatggacatcgaagaagtgggggg

SEQ ID NO: 10253 - DNA, 28 bp, synthetic construct
  source 1..28: mol_type = other DNA
gacatcgaagaagtggggggacctctgg

SEQ ID NO: 10254 - DNA, 28 bp, synthetic construct
  source 1..28: mol_type = other DNA
tcgaagaagtggggggacctctggctgg

SEQ ID NO: 10255 - DNA, 28 bp, synthetic construct
  source 1..28: mol_type = other DNA
gggtgtggttcaggcatccagccagagg

SEQ ID NO: 10256 - DNA, 28 bp, synthetic construct
  source 1..28: mol_type = other DNA
ctggatgcctgaaccacaccctcacagg

SEQ ID NO: 10257 - DNA, 28 bp, synthetic construct
  source 1..28: mol_type = other DNA
tggatgcctgaaccacaccctcacaggg

SEQ ID NO: 10258 - DNA, 28 bp, synthetic construct
  source 1..28: mol_type = other DNA
atgcctgaaccacaccctcacagggagg

SEQ ID NO: 10259 - DNA, 28 bp, synthetic construct
  source 1..28: mol_type = other DNA
aaacctccctgtgagggtgtggttcagg

SEQ ID NO: 10260 - DNA, 28 bp, synthetic construct
  source 1..28: mol_type = other DNA
tgaaccacaccctcacagggaggtttgg

SEQ ID NO: 10261 - DNA, 28 bp, synthetic construct
  source 1..28: mol_type = other DNA
tctgccaaacctccctgtgagggtgtgg

SEQ ID NO: 10262 - DNA, 28 bp, synthetic construct
  source 1..28: mol_type = other DNA
ttggatctgccaaacctccctgtgaggg

SEQ ID NO: 10263 - DNA, 28 bp, synthetic construct
  source 1..28: mol_type = other DNA
tttggatctgccaaacctccctgtgagg

SEQ ID NO: 10264 - DNA, 28 bp, synthetic construct
  source 1..28: mol_type = other DNA
ggtttggcagatccaaagacaataaagg

SEQ ID NO: 10265 - DNA, 28 bp, synthetic construct
  source 1..28: mol_type = other DNA
atccaaagacaataaaggacctttcagg

SEQ ID NO: 10266 - DNA, 28 bp, synthetic construct
  source 1..28: mol_type = other DNA
gacctgaaaggtcctttattgtctttgg

SEQ ID NO: 10267 - DNA, 28 bp, synthetic construct
  source 1..28: mol_type = other DNA
ataaaggacctttcaggtcaaaaagagg

SEQ ID NO: 10268 - DNA, 28 bp, synthetic construct
  source 1..28: mol_type = other DNA
taaaggacctttcaggtcaaaaagaggg

SEQ ID NO: 10269 - DNA, 28 bp, synthetic construct
  source 1..28: mol_type = other DNA
aaaggacctttcaggtcaaaaagagggg

SEQ ID NO: 10270 - DNA, 28 bp, synthetic construct
  source 1..28: mol_type = other DNA
ctacatcccctctttttgacctgaaagg

SEQ ID NO: 10271 - DNA, 28 bp, synthetic construct
  source 1..28: mol_type = other DNA
ctttcaggtcaaaaagaggggatgtagg

SEQ ID NO: 10272 - DNA, 28 bp, synthetic construct
  source 1..28: mol_type = other DNA
attatatacttgtatcttacatcttagg

SEQ ID NO: 10273 - DNA, 28 bp, synthetic construct
  source 1..28: mol_type = other DNA
ttatatacttgtatcttacatcttaggg

SEQ ID NO: 10274 - DNA, 28 bp, synthetic construct
  source 1..28: mol_type = other DNA
tatatacttgtatcttacatcttagggg

SEQ ID NO: 10275 - DNA, 28 bp, synthetic construct
  source 1..28: mol_type = other DNA
tatcttacatcttaggggctcttcttgg

SEQ ID NO: 10276 - DNA, 28 bp, synthetic construct
  source 1..28: mol_type = other DNA
atcttacatcttaggggctcttcttggg

SEQ ID NO: 10277 - DNA, 28 bp, synthetic construct
  source 1..28: mol_type = other DNA
cttcttgggcgtcacccgtgccttgtgg

SEQ ID NO: 10278 - DNA, 28 bp, synthetic construct
  source 1..28: mol_type = other DNA
ttgggcgtcacccgtgccttgtggctgg

SEQ ID NO: 10279 - DNA, 28 bp, synthetic construct
  source 1..28: mol_type = other DNA
tgggcgtcacccgtgccttgtggctggg

SEQ ID NO: 10280 - DNA, 28 bp, synthetic construct
  source 1..28: mol_type = other DNA
gggcgtcacccgtgccttgtggctgggg

SEQ ID NO: 10281 - DNA, 28 bp, synthetic construct
  source 1..28: mol_type = other DNA
tgtacatgccccagccacaaggcacggg

SEQ ID NO: 10282 - DNA, 28 bp, synthetic construct
  source 1..28: mol_type = other DNA
atgtacatgccccagccacaaggcacgg

SEQ ID NO: 10283 - DNA, 28 bp, synthetic construct
  source 1..28: mol_type = other DNA
tgtgtatgtacatgccccagccacaagg

SEQ ID NO: 10284 - DNA, 28 bp, synthetic construct
  source 1..28: mol_type = other DNA
tggctggggcatgtacatacacaagtgg

SEQ ID NO: 10285 - DNA, 28 bp, synthetic construct
  source 1..28: mol_type = other DNA
catgtacatacacaagtggacacacagg

SEQ ID NO: 10286 - DNA, 28 bp, synthetic construct
  source 1..28: mol_type = other DNA
gacacacaggcagagcagccacctgtgg

SEQ ID NO: 10287 - DNA, 28 bp, synthetic construct
  source 1..28: mol_type = other DNA
acacacaggcagagcagccacctgtggg

SEQ ID NO: 10288 - DNA, 28 bp, synthetic construct
  source 1..28: mol_type = other DNA
cagagcagccacctgtgggctttcttgg

SEQ ID NO: 10289 - DNA, 28 bp, synthetic construct
  source 1..28: mol_type = other DNA
cagccacctgtgggctttcttggacagg

SEQ ID NO: 10290 - DNA, 28 bp, synthetic construct
  source 1..28: mol_type = other DNA
attcctgtccaagaaagcccacaggtgg

SEQ ID NO: 10291 - DNA, 28 bp, synthetic construct
  source 1..28: mol_type = other DNA
cacattcctgtccaagaaagcccacagg

SEQ ID NO: 10292 - DNA, 28 bp, synthetic construct
  source 1..28: mol_type = other DNA
ggacaggaatgtgtgtgtatgtgcatgg

SEQ ID NO: 10293 - DNA, 28 bp, synthetic construct
  source 1..28: mol_type = other DNA
gacaggaatgtgtgtgtatgtgcatggg

SEQ ID NO: 10294 - DNA, 28 bp, synthetic construct
  source 1..28: mol_type = other DNA
acaggaatgtgtgtgtatgtgcatgggg

SEQ ID NO: 10295 - DNA, 28 bp, synthetic construct
  source 1..28: mol_type = other DNA
caggaatgtgtgtgtatgtgcatggggg

SEQ ID NO: 10296 - DNA, 28 bp, synthetic construct
  source 1..28: mol_type = other DNA
aggaatgtgtgtgtatgtgcatgggggg

SEQ ID NO: 10297 - DNA, 28 bp, synthetic construct
  source 1..28: mol_type = other DNA
tgtgtgtgtatgtgcatggggggtgagg

SEQ ID NO: 10298 - DNA, 28 bp, synthetic construct
  source 1..28: mol_type = other DNA
tgcatggggggtgaggatcctattttgg

SEQ ID NO: 10299 - DNA, 28 bp, synthetic construct
  source 1..28: mol_type = other DNA
gcatggggggtgaggatcctattttggg

SEQ ID NO: 10300 - DNA, 28 bp, synthetic construct
  source 1..28: mol_type = other DNA
catggggggtgaggatcctattttgggg

SEQ ID NO: 10301 - DNA, 28 bp, synthetic construct
  source 1..28: mol_type = other DNA
atggggggtgaggatcctattttggggg

SEQ ID NO: 10302 - DNA, 28 bp, synthetic construct
  source 1..28: mol_type = other DNA
gatataagtctacatcccccaaaatagg

SEQ ID NO: 10303 - DNA, 28 bp, synthetic construct
  source 1..28: mol_type = other DNA
atgtagacttatatctaagagtatctgg

SEQ ID NO: 10304 - DNA, 28 bp, synthetic construct
  source 1..28: mol_type = other DNA
ctggttaaccctgagcttaaatgaaagg

SEQ ID NO: 10305 - DNA, 28 bp, synthetic construct
  source 1..28: mol_type = other DNA
gttaaccctgagcttaaatgaaaggagg

SEQ ID NO: 10306 - DNA, 28 bp, synthetic construct
  source 1..28: mol_type = other DNA
taactcctcctttcatttaagctcaggg

SEQ ID NO: 10307 - DNA, 28 bp, synthetic construct
  source 1..28: mol_type = other DNA
ctaactcctcctttcatttaagctcagg

SEQ ID NO: 10308 - DNA, 28 bp, synthetic construct
  source 1..28: mol_type = other DNA
ctgagcttaaatgaaaggaggagttagg

SEQ ID NO: 10309 - DNA, 28 bp, synthetic construct
  source 1..28: mol_type = other DNA
ttaaatgaaaggaggagttaggttgagg

SEQ ID NO: 10310 - DNA, 28 bp, synthetic construct
  source 1..28: mol_type = other DNA
atgaaaggaggagttaggttgaggcagg

SEQ ID NO: 10311 - DNA, 28 bp, synthetic construct
  source 1..28: mol_type = other DNA
aggaggagttaggttgaggcaggcaagg

SEQ ID NO: 10312 - DNA, 28 bp, synthetic construct
  source 1..28: mol_type = other DNA
aggagttaggttgaggcaggcaaggtgg

SEQ ID NO: 10313 - DNA, 28 bp, synthetic construct
  source 1..28: mol_type = other DNA
ggagttaggttgaggcaggcaaggtggg

SEQ ID NO: 10314 - DNA, 28 bp, synthetic construct
  source 1..28: mol_type = other DNA
gttgaggcaggcaaggtgggagaagtgg

SEQ ID NO: 10315 - DNA, 28 bp, synthetic construct
  source 1..28: mol_type = other DNA
ggtgggagaagtggcccaagtcctttgg

SEQ ID NO: 10316 - DNA, 28 bp, synthetic construct
  source 1..28: mol_type = other DNA
gaagtggcccaagtcctttggtgagtgg

SEQ ID NO: 10317 - DNA, 28 bp, synthetic construct
  source 1..28: mol_type = other DNA
aagtggcccaagtcctttggtgagtggg

SEQ ID NO: 10318 - DNA, 28 bp, synthetic construct
  source 1..28: mol_type = other DNA
agtggcccaagtcctttggtgagtgggg

SEQ ID NO: 10319 - DNA, 28 bp, synthetic construct
  source 1..28: mol_type = other DNA
gtggcccaagtcctttggtgagtggggg

SEQ ID NO: 10320 - DNA, 28 bp, synthetic construct
  source 1..28: mol_type = other DNA
tggcccaagtcctttggtgagtgggggg

SEQ ID NO: 10321 - DNA, 28 bp, synthetic construct
  source 1..28: mol_type = other DNA
tgtccccccactcaccaaaggacttggg

SEQ ID NO: 10322 - DNA, 28 bp, synthetic construct
  source 1..28: mol_type = other DNA
ctgtccccccactcaccaaaggacttgg

SEQ ID NO: 10323 - DNA, 28 bp, synthetic construct
  source 1..28: mol_type = other DNA
caagtcctttggtgagtggggggacagg

SEQ ID NO: 10324 - DNA, 28 bp, synthetic construct
  source 1..28: mol_type = other DNA
tcctttggtgagtggggggacaggatgg

SEQ ID NO: 10325 - DNA, 28 bp, synthetic construct
  source 1..28: mol_type = other DNA
tccatcctgtccccccactcaccaaagg

SEQ ID NO: 10326 - DNA, 28 bp, synthetic construct
  source 1..28: mol_type = other DNA
ggtgagtggggggacaggatggagtagg

SEQ ID NO: 10327 - DNA, 28 bp, synthetic construct
  source 1..28: mol_type = other DNA
gtgagtggggggacaggatggagtaggg

SEQ ID NO: 10328 - DNA, 28 bp, synthetic construct
  source 1..28: mol_type = other DNA
tgagtggggggacaggatggagtagggg

SEQ ID NO: 10329 - DNA, 28 bp, synthetic construct
  source 1..28: mol_type = other DNA
gagtggggggacaggatggagtaggggg

SEQ ID NO: 10330 - DNA, 28 bp, synthetic construct
  source 1..28: mol_type = other DNA
agtggggggacaggatggagtagggggg

SEQ ID NO: 10331 - DNA, 28 bp, synthetic construct
  source 1..28: mol_type = other DNA
ggggacaggatggagtaggggggacagg

SEQ ID NO: 10332 - DNA, 28 bp, synthetic construct
  source 1..28: mol_type = other DNA
acaggatggagtaggggggacaggatgg

SEQ ID NO: 10333 - DNA, 28 bp, synthetic construct
  source 1..28: mol_type = other DNA
tggagtaggggggacaggatggagtagg

SEQ ID NO: 10334 - DNA, 28 bp, synthetic construct
  source 1..28: mol_type = other DNA
ggagtaggggggacaggatggagtaggg

SEQ ID NO: 10335 - DNA, 28 bp, synthetic construct
  source 1..28: mol_type = other DNA
gtaggggggacaggatggagtagggtgg

SEQ ID NO: 10336 - DNA, 28 bp, synthetic construct
  source 1..28: mol_type = other DNA
ggggggacaggatggagtagggtggagg

SEQ ID NO: 10337 - DNA, 28 bp, synthetic construct
  source 1..28: mol_type = other DNA
gggggacaggatggagtagggtggaggg

SEQ ID NO: 10338 - DNA, 28 bp, synthetic construct
  source 1..28: mol_type = other DNA
ggggacaggatggagtagggtggagggg

SEQ ID NO: 10339 - DNA, 28 bp, synthetic construct
  source 1..28: mol_type = other DNA
tagggtggaggggaagaatactgtctgg

SEQ ID NO: 10340 - DNA, 28 bp, synthetic construct
  source 1..28: mol_type = other DNA
gaggggaagaatactgtctggagtctgg

SEQ ID NO: 10341 - DNA, 28 bp, synthetic construct
  source 1..28: mol_type = other DNA
gaagaatactgtctggagtctggccagg

SEQ ID NO: 10342 - DNA, 28 bp, synthetic construct
  source 1..28: mol_type = other DNA
aagaatactgtctggagtctggccaggg

SEQ ID NO: 10343 - DNA, 28 bp, synthetic construct
  source 1..28: mol_type = other DNA
tggagggtgtgctctagcagaaccctgg

SEQ ID NO: 10344 - DNA, 28 bp, synthetic construct
  source 1..28: mol_type = other DNA
ctagagcacaccctccacctcagccagg

SEQ ID NO: 10345 - DNA, 28 bp, synthetic construct
  source 1..28: mol_type = other DNA
tagagcacaccctccacctcagccaggg

SEQ ID NO: 10346 - DNA, 28 bp, synthetic construct
  source 1..28: mol_type = other DNA
ccctccacctcagccagggtccacaagg

SEQ ID NO: 10347 - DNA, 28 bp, synthetic construct
  source 1..28: mol_type = other DNA
tccttgtggaccctggctgaggtggagg

SEQ ID NO: 10348 - DNA, 28 bp, synthetic construct
  source 1..28: mol_type = other DNA
ccacctcagccagggtccacaaggatgg

SEQ ID NO: 10349 - DNA, 28 bp, synthetic construct
  source 1..28: mol_type = other DNA
cacctcagccagggtccacaaggatggg

SEQ ID NO: 10350 - DNA, 28 bp, synthetic construct
  source 1..28: mol_type = other DNA
tacccatccttgtggaccctggctgagg

SEQ ID NO: 10351 - DNA, 28 bp, synthetic construct
  source 1..28: mol_type = other DNA
agccagggtccacaaggatgggtaccgg

SEQ ID NO: 10352 - DNA, 28 bp, synthetic construct
  source 1..28: mol_type = other DNA
gccagggtccacaaggatgggtaccggg

SEQ ID NO: 10353 - DNA, 28 bp, synthetic construct
  source 1..28: mol_type = other DNA
gcccggtacccatccttgtggaccctgg

SEQ ID NO: 10354 - DNA, 28 bp, synthetic construct
  source 1..28: mol_type = other DNA
acgcagagcccggtacccatccttgtgg

SEQ ID NO: 10355 - DNA, 28 bp, synthetic construct
  source 1..28: mol_type = other DNA
caagctgaagctgtgacgcagagcccgg

SEQ ID NO: 10356 - DNA, 28 bp, synthetic construct
  source 1..28: mol_type = other DNA
cgggctctgcgtcacagcttcagcttgg

SEQ ID NO: 10357 - DNA, 28 bp, synthetic construct
  source 1..28: mol_type = other DNA
gggctctgcgtcacagcttcagcttggg

SEQ ID NO: 10358 - DNA, 28 bp, synthetic construct
  source 1..28: mol_type = other DNA
ggctctgcgtcacagcttcagcttgggg

SEQ ID NO: 10359 - DNA, 28 bp, synthetic construct
  source 1..28: mol_type = other DNA
tctgcgtcacagcttcagcttggggtgg

SEQ ID NO: 10360 - DNA, 28 bp, synthetic construct
  source 1..28: mol_type = other DNA
ttggggtggttgctatgagtctgcgtgg

SEQ ID NO: 10361 - DNA, 28 bp, synthetic construct
  source 1..28: mol_type = other DNA
ctatgagtctgcgtggctcccgcccagg

SEQ ID NO: 10362 - DNA, 28 bp, synthetic construct
  source 1..28: mol_type = other DNA
tatgagtctgcgtggctcccgcccaggg

SEQ ID NO: 10363 - DNA, 28 bp, synthetic construct
  source 1..28: mol_type = other DNA
tgcgtggctcccgcccagggcagacagg

SEQ ID NO: 10364 - DNA, 28 bp, synthetic construct
  source 1..28: mol_type = other DNA
gcgtggctcccgcccagggcagacaggg

SEQ ID NO: 10365 - DNA, 28 bp, synthetic construct
  source 1..28: mol_type = other DNA
gctcccgcccagggcagacagggacagg

SEQ ID NO: 10366 - DNA, 28 bp, synthetic construct
  source 1..28: mol_type = other DNA
tgacctgtccctgtctgccctgggcggg

SEQ ID NO: 10367 - DNA, 28 bp, synthetic construct
  source 1..28: mol_type = other DNA
gtgacctgtccctgtctgccctgggcgg

SEQ ID NO: 10368 - DNA, 28 bp, synthetic construct
  source 1..28: mol_type = other DNA
cccagggcagacagggacaggtcacagg

SEQ ID NO: 10369 - DNA, 28 bp, synthetic construct
  source 1..28: mol_type = other DNA
tcctgtgacctgtccctgtctgccctgg

SEQ ID NO: 10370 - DNA, 28 bp, synthetic construct
  source 1..28: mol_type = other DNA
ggcagacagggacaggtcacaggagagg

SEQ ID NO: 10371 - DNA, 28 bp, synthetic construct
  source 1..28: mol_type = other DNA
gcagacagggacaggtcacaggagaggg

SEQ ID NO: 10372 - DNA, 28 bp, synthetic construct
  source 1..28: mol_type = other DNA
cagacagggacaggtcacaggagagggg

SEQ ID NO: 10373 - DNA, 28 bp, synthetic construct
  source 1..28: mol_type = other DNA
agggacaggtcacaggagaggggctagg

SEQ ID NO: 10374 - DNA, 28 bp, synthetic construct
  source 1..28: mol_type = other DNA
cacaggagaggggctaggtaatccctgg

SEQ ID NO: 10375 - DNA, 28 bp, synthetic construct
  source 1..28: mol_type = other DNA
atccctggcagtagttcctgtacagagg

SEQ ID NO: 10376 - DNA, 28 bp, synthetic construct
  source 1..28: mol_type = other DNA
cacctctgtacaggaactactgccaggg

SEQ ID NO: 10377 - DNA, 28 bp, synthetic construct
  source 1..28: mol_type = other DNA
cctggcagtagttcctgtacagaggtgg

SEQ ID NO: 10378 - DNA, 28 bp, synthetic construct
  source 1..28: mol_type = other DNA
cagtagttcctgtacagaggtggtctgg

SEQ ID NO: 10379 - DNA, 28 bp, synthetic construct
  source 1..28: mol_type = other DNA
agtagttcctgtacagaggtggtctggg

SEQ ID NO: 10380 - DNA, 28 bp, synthetic construct
  source 1..28: mol_type = other DNA
gtagttcctgtacagaggtggtctgggg

SEQ ID NO: 10381 - DNA, 28 bp, synthetic construct
  source 1..28: mol_type = other DNA
cctgtacagaggtggtctggggtccagg

SEQ ID NO: 10382 - DNA, 28 bp, synthetic construct
  source 1..28: mol_type = other DNA
ctgtacagaggtggtctggggtccaggg

SEQ ID NO: 10383 - DNA, 28 bp, synthetic construct
  source 1..28: mol_type = other DNA
tgtacagaggtggtctggggtccagggg

SEQ ID NO: 10384 - DNA, 28 bp, synthetic construct
  source 1..28: mol_type = other DNA
gtacagaggtggtctggggtccaggggg

SEQ ID NO: 10385 - DNA, 28 bp, synthetic construct
  source 1..28: mol_type = other DNA
gtggtctggggtccagggggtcccctgg

SEQ ID NO: 10386 - DNA, 28 bp, synthetic construct
  source 1..28: mol_type = other DNA
tggtctggggtccagggggtcccctggg

SEQ ID NO: 10387 - DNA, 28 bp, synthetic construct
  source 1..28: mol_type = other DNA
ccagggggtcccctgggcctagcctagg

SEQ ID NO: 10388 - DNA, 28 bp, synthetic construct
  source 1..28: mol_type = other DNA
caactgttgcctaggctaggcccagggg

SEQ ID NO: 10389 - DNA, 28 bp, synthetic construct
  source 1..28: mol_type = other DNA
ccctgggcctagcctaggcaacagttgg

SEQ ID NO: 10390 - DNA, 28 bp, synthetic construct
  source 1..28: mol_type = other DNA
accaactgttgcctaggctaggcccagg

SEQ ID NO: 10391 - DNA, 28 bp, synthetic construct
  source 1..28: mol_type = other DNA
ttgtgaaccaactgttgcctaggctagg

SEQ ID NO: 10392 - DNA, 28 bp, synthetic construct
  source 1..28: mol_type = other DNA
tttctttgtgaaccaactgttgcctagg

SEQ ID NO: 10393 - DNA, 28 bp, synthetic construct
  source 1..28: mol_type = other DNA
aacagttggttcacaaagaaatgtcagg

SEQ ID NO: 10394 - DNA, 28 bp, synthetic construct
  source 1..28: mol_type = other DNA
acagttggttcacaaagaaatgtcaggg

SEQ ID NO: 10395 - DNA, 28 bp, synthetic construct
  source 1..28: mol_type = other DNA
aaacacatctctctttttttaatgctgg

SEQ ID NO: 10396 - DNA, 28 bp, synthetic construct
  source 1..28: mol_type = other DNA
atatgcatttggtctgtactgatcatgg

SEQ ID NO: 10397 - DNA, 28 bp, synthetic construct
  source 1..28: mol_type = other DNA
gactttcatacggtgaatatgcatttgg

SEQ ID NO: 10398 - DNA, 28 bp, synthetic construct
  source 1..28: mol_type = other DNA
gtcactgactggtttgactttcatacgg

SEQ ID NO: 10399 - DNA, 28 bp, synthetic construct
  source 1..28: mol_type = other DNA
caaaccagtcagtgactccagagtttgg

SEQ ID NO: 10400 - DNA, 28 bp, synthetic construct
  source 1..28: mol_type = other DNA
ttggccaaactctggagtcactgactgg

SEQ ID NO: 10401 - DNA, 28 bp, synthetic construct
  source 1..28: mol_type = other DNA
tgactccagagtttggccaacactgagg

SEQ ID NO: 10402 - DNA, 28 bp, synthetic construct
  source 1..28: mol_type = other DNA
tggtgcctcagtgttggccaaactctgg

SEQ ID NO: 10403 - DNA, 28 bp, synthetic construct
  source 1..28: mol_type = other DNA
ggccaacactgaggcaccagcgtcgtgg

SEQ ID NO: 10404 - DNA, 28 bp, synthetic construct
  source 1..28: mol_type = other DNA
caccacgacgctggtgcctcagtgttgg

SEQ ID NO: 10405 - DNA, 28 bp, synthetic construct
  source 1..28: mol_type = other DNA
gaggcaccagcgtcgtggtgtagagtgg

SEQ ID NO: 10406 - DNA, 28 bp, synthetic construct
  source 1..28: mol_type = other DNA
aggcaccagcgtcgtggtgtagagtggg

SEQ ID NO: 10407 - DNA, 28 bp, synthetic construct
  source 1..28: mol_type = other DNA
gagaacccactctacaccacgacgctgg

SEQ ID NO: 10408 - DNA, 28 bp, synthetic construct
  source 1..28: mol_type = other DNA
cgtcgtggtgtagagtgggttctcatgg

SEQ ID NO: 10409 - DNA, 28 bp, synthetic construct
  source 1..28: mol_type = other DNA
ttctcatggcacgcgtaacctcaccagg

SEQ ID NO: 10410 - DNA, 28 bp, synthetic construct
  source 1..28: mol_type = other DNA
tctcatggcacgcgtaacctcaccaggg

SEQ ID NO: 10411 - DNA, 28 bp, synthetic construct
  source 1..28: mol_type = other DNA
ctcatggcacgcgtaacctcaccagggg

SEQ ID NO: 10412 - DNA, 28 bp, synthetic construct
  source 1..28: mol_type = other DNA
atttttataattggagcccctggtgagg

SEQ ID NO: 10413 - DNA, 28 bp, synthetic construct
  source 1..28: mol_type = other DNA
ttttaatttttataattggagcccctgg

SEQ ID NO: 10414 - DNA, 28 bp, synthetic construct
  source 1..28: mol_type = other DNA
tttttttttttttaatttttataattgg

SEQ ID NO: 10415 - DNA, 28 bp, synthetic construct
  source 1..28: mol_type = other DNA
ttaaaaaaaaaaaaaaaaaaaagcatgg

SEQ ID NO: 10416 - DNA, 28 bp, synthetic construct
  source 1..28: mol_type = other DNA
taaaaaaaaaaaaaaaaaaaagcatggg

SEQ ID NO: 10417 - DNA, 28 bp, synthetic construct
  source 1..28: mol_type = other DNA
aaaaaaaaaaaaaaaaagcatgggcagg

SEQ ID NO: 10418 - DNA, 28 bp, synthetic construct
  source 1..28: mol_type = other DNA
aaaaaaaaaaaagcatgggcaggagcgg

SEQ ID NO: 10419 - DNA, 28 bp, synthetic construct
  source 1..28: mol_type = other DNA
aaaagcatgggcaggagcggccagctgg

SEQ ID NO: 10420 - DNA, 28 bp, synthetic construct
  source 1..28: mol_type = other DNA
gcatgggcaggagcggccagctggttgg

SEQ ID NO: 10421 - DNA, 28 bp, synthetic construct
  source 1..28: mol_type = other DNA
catgggcaggagcggccagctggttggg

SEQ ID NO: 10422 - DNA, 28 bp, synthetic construct
  source 1..28: mol_type = other DNA
atgggcaggagcggccagctggttgggg

SEQ ID NO: 10423 - DNA, 28 bp, synthetic construct
  source 1..28: mol_type = other DNA
gcaggagcggccagctggttggggctgg

SEQ ID NO: 10424 - DNA, 28 bp, synthetic construct
  source 1..28: mol_type = other DNA
caggagcggccagctggttggggctggg

SEQ ID NO: 10425 - DNA, 28 bp, synthetic construct
  source 1..28: mol_type = other DNA
ggccagctggttggggctgggcgccagg

SEQ ID NO: 10426 - DNA, 28 bp, synthetic construct
  source 1..28: mol_type = other DNA
tacctggcgcccagccccaaccagctgg

SEQ ID NO: 10427 - DNA, 28 bp, synthetic construct
  source 1..28: mol_type = other DNA
agctggttggggctgggcgccaggtagg

SEQ ID NO: 10428 - DNA, 28 bp, synthetic construct
  source 1..28: mol_type = other DNA
gctggttggggctgggcgccaggtaggg

SEQ ID NO: 10429 - DNA, 28 bp, synthetic construct
  source 1..28: mol_type = other DNA
ctggttggggctgggcgccaggtagggg

SEQ ID NO: 10430 - DNA, 28 bp, synthetic construct
  source 1..28: mol_type = other DNA
agactaaggcagagactcccctacctgg

SEQ ID NO: 10431 - DNA, 28 bp, synthetic construct
  source 1..28: mol_type = other DNA
gtaggggagtctctgccttagtctgtgg

SEQ ID NO: 10432 - DNA, 28 bp, synthetic construct
  source 1..28: mol_type = other DNA
ctctgccttagtctgtggcgcccccagg

SEQ ID NO: 10433 - DNA, 28 bp, synthetic construct
  source 1..28: mol_type = other DNA
tctgccttagtctgtggcgcccccaggg

SEQ ID NO: 10434 - DNA, 28 bp, synthetic construct
  source 1..28: mol_type = other DNA
cgggccctgggggcgccacagactaagg

SEQ ID NO: 10435 - DNA, 28 bp, synthetic construct
  source 1..28: mol_type = other DNA
cttagtctgtggcgcccccagggcccgg

SEQ ID NO: 10436 - DNA, 28 bp, synthetic construct
  source 1..28: mol_type = other DNA
ggatgaggtgggaaccgggccctggggg

SEQ ID NO: 10437 - DNA, 28 bp, synthetic construct
  source 1..28: mol_type = other DNA
gggatgaggtgggaaccgggccctgggg

SEQ ID NO: 10438 - DNA, 28 bp, synthetic construct
  source 1..28: mol_type = other DNA
agggatgaggtgggaaccgggccctggg

SEQ ID NO: 10439 - DNA, 28 bp, synthetic construct
  source 1..28: mol_type = other DNA
aagggatgaggtgggaaccgggccctgg

SEQ ID NO: 10440 - DNA, 28 bp, synthetic construct
  source 1..28: mol_type = other DNA
agggcccggttcccacctcatcccttgg

SEQ ID NO: 10441 - DNA, 28 bp, synthetic construct
  source 1..28: mol_type = other DNA
agggccaagggatgaggtgggaaccggg

SEQ ID NO: 10442 - DNA, 28 bp, synthetic construct
  source 1..28: mol_type = other DNA
aagggccaagggatgaggtgggaaccgg

SEQ ID NO: 10443 - DNA, 28 bp, synthetic construct
  source 1..28: mol_type = other DNA
gaaaggaagggccaagggatgaggtggg

SEQ ID NO: 10444 - DNA, 28 bp, synthetic construct
  source 1..28: mol_type = other DNA
agaaaggaagggccaagggatgaggtgg

SEQ ID NO: 10445 - DNA, 28 bp, synthetic construct
  source 1..28: mol_type = other DNA
ctgagaaaggaagggccaagggatgagg

SEQ ID NO: 10446 - DNA, 28 bp, synthetic construct
  source 1..28: mol_type = other DNA
tttttactgagaaaggaagggccaaggg

SEQ ID NO: 10447 - DNA, 28 bp, synthetic construct
  source 1..28: mol_type = other DNA
ttttttactgagaaaggaagggccaagg

SEQ ID NO: 10448 - DNA, 28 bp, synthetic construct
  source 1..28: mol_type = other DNA
tttttgttttttactgagaaaggaaggg

SEQ ID NO: 10449 - DNA, 28 bp, synthetic construct
  source 1..28: mol_type = other DNA
gtttttgttttttactgagaaaggaagg

SEQ ID NO: 10450 - DNA, 28 bp, synthetic construct
  source 1..28: mol_type = other DNA
ttttgtttttgttttttactgagaaagg

SEQ ID NO: 10451 - DNA, 28 bp, synthetic construct
  source 1..28: mol_type = other DNA
tctgttgagttggtttttttggttttgg

SEQ ID NO: 10452 - DNA, 28 bp, synthetic construct
  source 1..28: mol_type = other DNA
gtcagatctgttgagttggtttttttgg

SEQ ID NO: 10453 - DNA, 28 bp, synthetic construct
  source 1..28: mol_type = other DNA
ttttttaatgtcagatctgttgagttgg

SEQ ID NO: 10454 - DNA, 28 bp, synthetic construct
  source 1..28: mol_type = other DNA
attaaaaaacaaaaaagccaacaaatgg

SEQ ID NO: 10455 - DNA, 28 bp, synthetic construct
  source 1..28: mol_type = other DNA
ttaaaaaacaaaaaagccaacaaatggg

SEQ ID NO: 10456 - DNA, 28 bp, synthetic construct
  source 1..28: mol_type = other DNA
aaaaacaaaaaagccaacaaatgggtgg

SEQ ID NO: 10457 - DNA, 28 bp, synthetic construct
  source 1..28: mol_type = other DNA
aaaacaaaaaagccaacaaatgggtggg

SEQ ID NO: 10458 - DNA, 28 bp, synthetic construct
  source 1..28: mol_type = other DNA
aaacaaaaaagccaacaaatgggtgggg

SEQ ID NO: 10459 - DNA, 28 bp, synthetic construct
  source 1..28: mol_type = other DNA
aacaaaaaagccaacaaatgggtggggg

SEQ ID NO: 10460 - DNA, 28 bp, synthetic construct
  source 1..28: mol_type = other DNA
acaaaaaagccaacaaatgggtgggggg

SEQ ID NO: 10461 - DNA, 28 bp, synthetic construct
  source 1..28: mol_type = other DNA
caaaaaagccaacaaatgggtggggggg

SEQ ID NO: 10462 - DNA, 28 bp, synthetic construct
  source 1..28: mol_type = other DNA
aaaaaagccaacaaatgggtgggggggg

SEQ ID NO: 10463 - DNA, 28 bp, synthetic construct
  source 1..28: mol_type = other DNA
aaaaagccaacaaatgggtggggggggg

SEQ ID NO: 10464 - DNA, 28 bp, synthetic construct
  source 1..28: mol_type = other DNA
aaaagccaacaaatgggtgggggggggg

SEQ ID NO: 10465 - DNA, 28 bp, synthetic construct
  source 1..28: mol_type = other DNA
aaagccaacaaatgggtggggggggggg

SEQ ID NO: 10466 - DNA, 28 bp, synthetic construct
  source 1..28: mol_type = other DNA
aagccaacaaatgggtgggggggggggg

SEQ ID NO: 10467 - DNA, 28 bp, synthetic construct
  source 1..28: mol_type = other DNA
agccaacaaatgggtggggggggggggg

SEQ ID NO: 10468 - DNA, 28 bp, synthetic construct
  source 1..28: mol_type = other DNA
gccaacaaatgggtgggggggggggggg

SEQ ID NO: 10469 - DNA, 28 bp, synthetic construct
  source 1..28: mol_type = other DNA
accccccccccccccacccatttgttgg

SEQ ID NO: 10470 - DNA, 28 bp, synthetic construct
  source 1..28: mol_type = other DNA
aacaaatgggtggggggggggggggtgg

SEQ ID NO: 10471 - DNA, 28 bp, synthetic construct
  source 1..28: mol_type = other DNA
aaatgggtggggggggggggggtggagg

SEQ ID NO: 10472 - DNA, 28 bp, synthetic construct
  source 1..28: mol_type = other DNA
aatgggtggggggggggggggtggaggg

SEQ ID NO: 10473 - DNA, 28 bp, synthetic construct
  source 1..28: mol_type = other DNA
atgggtggggggggggggggtggagggg

SEQ ID NO: 10474 - DNA, 28 bp, synthetic construct
  source 1..28: mol_type = other DNA
ggaaagaaaagaaattgtagctttctgg

SEQ ID NO: 10475 - DNA, 28 bp, synthetic construct
  source 1..28: mol_type = other DNA
taaagtttgaaactgagtaaaatatagg

SEQ ID NO: 10476 - DNA, 28 bp, synthetic construct
  source 1..28: mol_type = other DNA
gtttgaaactgagtaaaatataggcagg

SEQ ID NO: 10477 - DNA, 28 bp, synthetic construct
  source 1..28: mol_type = other DNA
tttttttgtgtgttttgtctttttgtgg

SEQ ID NO: 10478 - DNA, 28 bp, synthetic construct
  source 1..28: mol_type = other DNA
gcttttttcttttttcacaccagtttgg

SEQ ID NO: 10479 - DNA, 28 bp, synthetic construct
  source 1..28: mol_type = other DNA
tttttcttttttcacaccagtttggtgg

SEQ ID NO: 10480 - DNA, 28 bp, synthetic construct
  source 1..28: mol_type = other DNA
aagtttgttggtgactccaccaaactgg

SEQ ID NO: 10481 - DNA, 28 bp, synthetic construct
  source 1..28: mol_type = other DNA
tggcatatctttgtttgaagtttgttgg

SEQ ID NO: 10482 - DNA, 28 bp, synthetic construct
  source 1..28: mol_type = other DNA
ggctgtactgtatagtgaacatagttgg

SEQ ID NO: 10483 - DNA, 28 bp, synthetic construct
  source 1..28: mol_type = other DNA
ctatgttcactatacagtacagccacgg

SEQ ID NO: 10484 - DNA, 28 bp, synthetic construct
  source 1..28: mol_type = other DNA
ccacggtcacacactacccacagcgcgg

SEQ ID NO: 10485 - DNA, 28 bp, synthetic construct
  source 1..28: mol_type = other DNA
cggtcacacactacccacagcgcggtgg

SEQ ID NO: 10486 - DNA, 28 bp, synthetic construct
  source 1..28: mol_type = other DNA
tgagcagcggctgccaccgcgctgtggg

SEQ ID NO: 10487 - DNA, 28 bp, synthetic construct
  source 1..28: mol_type = other DNA
ttgagcagcggctgccaccgcgctgtgg

SEQ ID NO: 10488 - DNA, 28 bp, synthetic construct
  source 1..28: mol_type = other DNA
gcgcggtggcagccgctgctcaatgagg

SEQ ID NO: 10489 - DNA, 28 bp, synthetic construct
  source 1..28: mol_type = other DNA
gtgtgatcgtctcctcattgagcagcgg

SEQ ID NO: 10490 - DNA, 28 bp, synthetic construct
  source 1..28: mol_type = other DNA
caatgaggagacgatcacaccatttcgg

SEQ ID NO: 10491 - DNA, 28 bp, synthetic construct
  source 1..28: mol_type = other DNA
acaatggcactgcttatctccgaaatgg

SEQ ID NO: 10492 - DNA, 28 bp, synthetic construct
  source 1..28: mol_type = other DNA
cggagataagcagtgccattgtgtctgg

SEQ ID NO: 10493 - DNA, 28 bp, synthetic construct
  source 1..28: mol_type = other DNA
agataagcagtgccattgtgtctggagg

SEQ ID NO: 10494 - DNA, 28 bp, synthetic construct
  source 1..28: mol_type = other DNA
attctctcttctcctccagacacaatgg

SEQ ID NO: 10495 - DNA, 28 bp, synthetic construct
  source 1..28: mol_type = other DNA
aaaaaaaaaaacgaaacagaaacacagg

SEQ ID NO: 10496 - DNA, 28 bp, synthetic construct
  source 1..28: mol_type = other DNA
aaaaaaaacgaaacagaaacacaggtgg

SEQ ID NO: 10497 - DNA, 28 bp, synthetic construct
  source 1..28: mol_type = other DNA
aaaaaaacgaaacagaaacacaggtggg

SEQ ID NO: 10498 - DNA, 28 bp, synthetic construct
  source 1..28: mol_type = other DNA
aaacgaaacagaaacacaggtgggaagg

SEQ ID NO: 10499 - DNA, 28 bp, synthetic construct
  source 1..28: mol_type = other DNA
aacacaggtgggaaggaactgactttgg

SEQ ID NO: 10500 - DNA, 28 bp, synthetic construct
  source 1..28: mol_type = other DNA
caggtgggaaggaactgactttggttgg

SEQ ID NO: 10501 - DNA, 28 bp, synthetic construct
  source 1..28: mol_type = other DNA
gtgggaaggaactgactttggttggtgg

SEQ ID NO: 10502 - DNA, 28 bp, synthetic construct
  source 1..28: mol_type = other DNA
gactttggttggtggcctcactccccgg

SEQ ID NO: 10503 - DNA, 28 bp, synthetic construct
  source 1..28: mol_type = other DNA
ggttggtggcctcactccccggccgagg

SEQ ID NO: 10504 - DNA, 28 bp, synthetic construct
  source 1..28: mol_type = other DNA
gttggtggcctcactccccggccgaggg

SEQ ID NO: 10505 - DNA, 28 bp, synthetic construct
  source 1..28: mol_type = other DNA
gtgggtagccctcggccggggagtgagg

SEQ ID NO: 10506 - DNA, 28 bp, synthetic construct
  source 1..28: mol_type = other DNA
ctccccggccgagggctacccacgcagg

SEQ ID NO: 10507 - DNA, 28 bp, synthetic construct
  source 1..28: mol_type = other DNA
gtcctgcgtgggtagccctcggccgggg

SEQ ID NO: 10508 - DNA, 28 bp, synthetic construct
  source 1..28: mol_type = other DNA
tgtcctgcgtgggtagccctcggccggg

SEQ ID NO: 10509 - DNA, 28 bp, synthetic construct
  source 1..28: mol_type = other DNA
ctgtcctgcgtgggtagccctcggccgg

SEQ ID NO: 10510 - DNA, 28 bp, synthetic construct
  source 1..28: mol_type = other DNA
gcgactgtcctgcgtgggtagccctcgg

SEQ ID NO: 10511 - DNA, 28 bp, synthetic construct
  source 1..28: mol_type = other DNA
cccacgcaggacagtcgcctcgctccgg

SEQ ID NO: 10512 - DNA, 28 bp, synthetic construct
  source 1..28: mol_type = other DNA
tccggagcgaggcgactgtcctgcgtgg

SEQ ID NO: 10513 - DNA, 28 bp, synthetic construct
  source 1..28: mol_type = other DNA
gacagtcgcctcgctccggatgccatgg

SEQ ID NO: 10514 - DNA, 28 bp, synthetic construct
  source 1..28: mol_type = other DNA
gtgtgtgtccatggcatccggagcgagg

SEQ ID NO: 10515 - DNA, 28 bp, synthetic construct
  source 1..28: mol_type = other DNA
tggaggtgtgtgtgtccatggcatccgg

SEQ ID NO: 10516 - DNA, 28 bp, synthetic construct
  source 1..28: mol_type = other DNA
gatgccatggacacacacacctccacgg

SEQ ID NO: 10517 - DNA, 28 bp, synthetic construct
  source 1..28: mol_type = other DNA
agtgccgtggaggtgtgtgtgtccatgg

SEQ ID NO: 10518 - DNA, 28 bp, synthetic construct
  source 1..28: mol_type = other DNA
tgtgcaaaagggaatagtgccgtggagg

SEQ ID NO: 10519 - DNA, 28 bp, synthetic construct
  source 1..28: mol_type = other DNA
gcttgtgcaaaagggaatagtgccgtgg

SEQ ID NO: 10520 - DNA, 28 bp, synthetic construct
  source 1..28: mol_type = other DNA
tctgtaagtgtttgcttgtgcaaaaggg

SEQ ID NO: 10521 - DNA, 28 bp, synthetic construct
  source 1..28: mol_type = other DNA
ctctgtaagtgtttgcttgtgcaaaagg

SEQ ID NO: 10522 - DNA, 28 bp, synthetic construct
  source 1..28: mol_type = other DNA
tgcacaagcaaacacttacagagagcgg

SEQ ID NO: 10523 - DNA, 28 bp, synthetic construct
  source 1..28: mol_type = other DNA
cttacagagagcggctctcaattaaagg

SEQ ID NO: 10524 - DNA, 28 bp, synthetic construct
  source 1..28: mol_type = other DNA
agagcggctctcaattaaaggcttgtgg

SEQ ID NO: 10525 - DNA, 28 bp, synthetic construct
  source 1..28: mol_type = other DNA
gagcggctctcaattaaaggcttgtggg

SEQ ID NO: 10526 - DNA, 28 bp, synthetic construct
  source 1..28: mol_type = other DNA
agcggctctcaattaaaggcttgtgggg

SEQ ID NO: 10527 - DNA, 28 bp, synthetic construct
  source 1..28: mol_type = other DNA
gcggctctcaattaaaggcttgtggggg

SEQ ID NO: 10528 - DNA, 28 bp, synthetic construct
  source 1..28: mol_type = other DNA
gctctcaattaaaggcttgtgggggagg

SEQ ID NO: 10529 - DNA, 28 bp, synthetic construct
  source 1..28: mol_type = other DNA
ctctcaattaaaggcttgtgggggaggg

SEQ ID NO: 10530 - DNA, 28 bp, synthetic construct
  source 1..28: mol_type = other DNA
caattaaaggcttgtgggggagggtcgg

SEQ ID NO: 10531 - DNA, 28 bp, synthetic construct
  source 1..28: mol_type = other DNA
aattaaaggcttgtgggggagggtcggg

SEQ ID NO: 10532 - DNA, 28 bp, synthetic construct
  source 1..28: mol_type = other DNA
attaaaggcttgtgggggagggtcgggg

SEQ ID NO: 10533 - DNA, 28 bp, synthetic construct
  source 1..28: mol_type = other DNA
ttaaaggcttgtgggggagggtcggggg

SEQ ID NO: 10534 - DNA, 28 bp, synthetic construct
  source 1..28: mol_type = other DNA
taaaggcttgtgggggagggtcgggggg

SEQ ID NO: 10535 - DNA, 28 bp, synthetic construct
  source 1..28: mol_type = other DNA
gggggagggtcggggggtctgttcaagg

SEQ ID NO: 10536 - DNA, 28 bp, synthetic construct
  source 1..28: mol_type = other DNA
gttcaaggcaaagtcagtgccagcgagg

SEQ ID NO: 10537 - DNA, 28 bp, synthetic construct
  source 1..28: mol_type = other DNA
ttcaaggcaaagtcagtgccagcgaggg

SEQ ID NO: 10538 - DNA, 28 bp, synthetic construct
  source 1..28: mol_type = other DNA
tcaaggcaaagtcagtgccagcgagggg

SEQ ID NO: 10539 - DNA, 28 bp, synthetic construct
  source 1..28: mol_type = other DNA
caaggcaaagtcagtgccagcgaggggg

SEQ ID NO: 10540 - DNA, 28 bp, synthetic construct
  source 1..28: mol_type = other DNA
ggcaaagtcagtgccagcgagggggtgg

SEQ ID NO: 10541 - DNA, 28 bp, synthetic construct
  source 1..28: mol_type = other DNA
gcaaagtcagtgccagcgagggggtggg

SEQ ID NO: 10542 - DNA, 28 bp, synthetic construct
  source 1..28: mol_type = other DNA
agtcagtgccagcgagggggtgggccgg

SEQ ID NO: 10543 - DNA, 28 bp, synthetic construct
  source 1..28: mol_type = other DNA
gggcgaggccggcccaccccctcgctgg

SEQ ID NO: 10544 - DNA, 28 bp, synthetic construct
  source 1..28: mol_type = other DNA
tgcgtgggctggaggcgggcgaggccgg

SEQ ID NO: 10545 - DNA, 28 bp, synthetic construct
  source 1..28: mol_type = other DNA
ggcctcgcccgcctccagcccacgcagg

SEQ ID NO: 10546 - DNA, 28 bp, synthetic construct
  source 1..28: mol_type = other DNA
ggcctgcgtgggctggaggcgggcgagg

SEQ ID NO: 10547 - DNA, 28 bp, synthetic construct
  source 1..28: mol_type = other DNA
gggcaggcctgcgtgggctggaggcggg

SEQ ID NO: 10548 - DNA, 28 bp, synthetic construct
  source 1..28: mol_type = other DNA
agggcaggcctgcgtgggctggaggcgg

SEQ ID NO: 10549 - DNA, 28 bp, synthetic construct
  source 1..28: mol_type = other DNA
gcctccagcccacgcaggcctgccctgg

SEQ ID NO: 10550 - DNA, 28 bp, synthetic construct
  source 1..28: mol_type = other DNA
gccagggcaggcctgcgtgggctggagg

SEQ ID NO: 10551 - DNA, 28 bp, synthetic construct
  source 1..28: mol_type = other DNA
gaggccagggcaggcctgcgtgggctgg

SEQ ID NO: 10552 - DNA, 28 bp, synthetic construct
  source 1..28: mol_type = other DNA
cccacgcaggcctgccctggcctcctgg

SEQ ID NO: 10553 - DNA, 28 bp, synthetic construct
  source 1..28: mol_type = other DNA
ccacgcaggcctgccctggcctcctggg

SEQ ID NO: 10554 - DNA, 28 bp, synthetic construct
  source 1..28: mol_type = other DNA
caggcctgccctggcctcctgggagcgg

SEQ ID NO: 10555 - DNA, 28 bp, synthetic construct
  source 1..28: mol_type = other DNA
aggcctgccctggcctcctgggagcggg

SEQ ID NO: 10556 - DNA, 28 bp, synthetic construct
  source 1..28: mol_type = other DNA
cctgccctggcctcctgggagcgggcgg

SEQ ID NO: 10557 - DNA, 28 bp, synthetic construct
  source 1..28: mol_type = other DNA
atcgccgcccgctcccaggaggccaggg

SEQ ID NO: 10558 - DNA, 28 bp, synthetic construct
  source 1..28: mol_type = other DNA
catcgccgcccgctcccaggaggccagg

SEQ ID NO: 10559 - DNA, 28 bp, synthetic construct
  source 1..28: mol_type = other DNA
ctggcctcctgggagcgggcggcgatgg

SEQ ID NO: 10560 - DNA, 28 bp, synthetic construct
  source 1..28: mol_type = other DNA
cctcctgggagcgggcggcgatggctgg

SEQ ID NO: 10561 - DNA, 28 bp, synthetic construct
  source 1..28: mol_type = other DNA
ctcctgggagcgggcggcgatggctggg

SEQ ID NO: 10562 - DNA, 28 bp, synthetic construct
  source 1..28: mol_type = other DNA
tcctgggagcgggcggcgatggctgggg

SEQ ID NO: 10563 - DNA, 28 bp, synthetic construct
  source 1..28: mol_type = other DNA
accccagccatcgccgcccgctcccagg

SEQ ID NO: 10564 - DNA, 28 bp, synthetic construct
  source 1..28: mol_type = other DNA
ggagcgggcggcgatggctggggtgtgg

SEQ ID NO: 10565 - DNA, 28 bp, synthetic construct
  source 1..28: mol_type = other DNA
gagcgggcggcgatggctggggtgtggg

SEQ ID NO: 10566 - DNA, 28 bp, synthetic construct
  source 1..28: mol_type = other DNA
agcgggcggcgatggctggggtgtgggg

SEQ ID NO: 10567 - DNA, 28 bp, synthetic construct
  source 1..28: mol_type = other DNA
tggctggggtgtggggaaagactcccgg

SEQ ID NO: 10568 - DNA, 28 bp, synthetic construct
  source 1..28: mol_type = other DNA
ctggggtgtggggaaagactcccggcgg

SEQ ID NO: 10569 - DNA, 28 bp, synthetic construct
  source 1..28: mol_type = other DNA
tggggtgtggggaaagactcccggcggg

SEQ ID NO: 10570 - DNA, 28 bp, synthetic construct
  source 1..28: mol_type = other DNA
gtgtggggaaagactcccggcgggcagg

SEQ ID NO: 10571 - DNA, 28 bp, synthetic construct
  source 1..28: mol_type = other DNA
tgacgttcgtgatgtcctgcccgccggg

SEQ ID NO: 10572 - DNA, 28 bp, synthetic construct
  source 1..28: mol_type = other DNA
gtgacgttcgtgatgtcctgcccgccgg

SEQ ID NO: 10573 - DNA, 28 bp, synthetic construct
  source 1..28: mol_type = other DNA
caggacatcacgaacgtcacgttcttgg

SEQ ID NO: 10574 - DNA, 28 bp, synthetic construct
  source 1..28: mol_type = other DNA
aggacatcacgaacgtcacgttcttggg

SEQ ID NO: 10575 - DNA, 28 bp, synthetic construct
  source 1..28: mol_type = other DNA
ggacatcacgaacgtcacgttcttgggg

SEQ ID NO: 10576 - DNA, 28 bp, synthetic construct
  source 1..28: mol_type = other DNA
gttcttggggacagaaaaccagtcacgg

SEQ ID NO: 10577 - DNA, 28 bp, synthetic construct
  source 1..28: mol_type = other DNA
cttggggacagaaaaccagtcacggcgg

SEQ ID NO: 10578 - DNA, 28 bp, synthetic construct
  source 1..28: mol_type = other DNA
aggacatcgttgctgccgccgtgactgg

SEQ ID NO: 10579 - DNA, 28 bp, synthetic construct
  source 1..28: mol_type = other DNA
gtcctgtgtatactgtgtagacatttgg

SEQ ID NO: 10580 - DNA, 28 bp, synthetic construct
  source 1..28: mol_type = other DNA
cgccaaatgtctacacagtatacacagg

SEQ ID NO: 10581 - DNA, 28 bp, synthetic construct
  source 1..28: mol_type = other DNA
ctgtgtatactgtgtagacatttggcgg

SEQ ID NO: 10582 - DNA, 28 bp, synthetic construct
  source 1..28: mol_type = other DNA
actgtgtagacatttggcggagagaagg

SEQ ID NO: 10583 - DNA, 28 bp, synthetic construct
  source 1..28: mol_type = other DNA
ctgtgtagacatttggcggagagaaggg

SEQ ID NO: 10584 - DNA, 28 bp, synthetic construct
  source 1..28: mol_type = other DNA
gagagaagggcctctgccccgcatgtgg

SEQ ID NO: 10585 - DNA, 28 bp, synthetic construct
  source 1..28: mol_type = other DNA
agagaagggcctctgccccgcatgtggg

SEQ ID NO: 10586 - DNA, 28 bp, synthetic construct
  source 1..28: mol_type = other DNA
gagaagggcctctgccccgcatgtgggg

SEQ ID NO: 10587 - DNA, 28 bp, synthetic construct
  source 1..28: mol_type = other DNA
gcctctgccccgcatgtggggatgcagg

SEQ ID NO: 10588 - DNA, 28 bp, synthetic construct
  source 1..28: mol_type = other DNA
cctctgccccgcatgtggggatgcaggg

SEQ ID NO: 10589 - DNA, 28 bp, synthetic construct
  source 1..28: mol_type = other DNA
gccccgcatgtggggatgcagggcttgg

SEQ ID NO: 10590 - DNA, 28 bp, synthetic construct
  source 1..28: mol_type = other DNA
ccccgcatgtggggatgcagggcttggg

SEQ ID NO: 10591 - DNA, 28 bp, synthetic construct
  source 1..28: mol_type = other DNA
acccaagccctgcatccccacatgcggg

SEQ ID NO: 10592 - DNA, 28 bp, synthetic construct
  source 1..28: mol_type = other DNA
gacccaagccctgcatccccacatgcgg

SEQ ID NO: 10593 - DNA, 28 bp, synthetic construct
  source 1..28: mol_type = other DNA
tggggatgcagggcttgggtccagccgg

SEQ ID NO: 10594 - DNA, 28 bp, synthetic construct
  source 1..28: mol_type = other DNA
gtccagccggcacttgctcgtaacaagg

SEQ ID NO: 10595 - DNA, 28 bp, synthetic construct
  source 1..28: mol_type = other DNA
cgccttgttacgagcaagtgccggctgg

SEQ ID NO: 10596 - DNA, 28 bp, synthetic construct
  source 1..28: mol_type = other DNA
cacacgccttgttacgagcaagtgccgg

SEQ ID NO: 10597 - DNA, 28 bp, synthetic construct
  source 1..28: mol_type = other DNA
tgctcgtaacaaggcgtgtgctgagcgg

SEQ ID NO: 10598 - DNA, 28 bp, synthetic construct
  source 1..28: mol_type = other DNA
gcgtgtgctgagcggacgtcctgtgagg

SEQ ID NO: 10599 - DNA, 28 bp, synthetic construct
  source 1..28: mol_type = other DNA
cgtgtgctgagcggacgtcctgtgaggg

SEQ ID NO: 10600 - DNA, 28 bp, synthetic construct
  source 1..28: mol_type = other DNA
gtgtgctgagcggacgtcctgtgagggg

SEQ ID NO: 10601 - DNA, 28 bp, synthetic construct
  source 1..28: mol_type = other DNA
tgctgagcggacgtcctgtgaggggtgg

SEQ ID NO: 10602 - DNA, 28 bp, synthetic construct
  source 1..28: mol_type = other DNA
tgagcggacgtcctgtgaggggtggtgg

SEQ ID NO: 10603 - DNA, 28 bp, synthetic construct
  source 1..28: mol_type = other DNA
gagcggacgtcctgtgaggggtggtggg

SEQ ID NO: 10604 - DNA, 28 bp, synthetic construct
  source 1..28: mol_type = other DNA
cggacgtcctgtgaggggtggtgggtgg

SEQ ID NO: 10605 - DNA, 28 bp, synthetic construct
  source 1..28: mol_type = other DNA
acgtcctgtgaggggtggtgggtggcgg

SEQ ID NO: 10606 - DNA, 28 bp, synthetic construct
  source 1..28: mol_type = other DNA
cgtcctgtgaggggtggtgggtggcggg

SEQ ID NO: 10607 - DNA, 28 bp, synthetic construct
  source 1..28: mol_type = other DNA
cgtcccgccacccaccacccctcacagg

SEQ ID NO: 10608 - DNA, 28 bp, synthetic construct
  source 1..28: mol_type = other DNA
gtgggtggcgggacgtctgtccgactgg

SEQ ID NO: 10609 - DNA, 28 bp, synthetic construct
  source 1..28: mol_type = other DNA
cgggacgtctgtccgactggccgtaagg

SEQ ID NO: 10610 - DNA, 28 bp, synthetic construct
  source 1..28: mol_type = other DNA
ctgtccgactggccgtaaggcagacagg

SEQ ID NO: 10611 - DNA, 28 bp, synthetic construct
  source 1..28: mol_type = other DNA
agagcctgtctgccttacggccagtcgg

SEQ ID NO: 10612 - DNA, 28 bp, synthetic construct
  source 1..28: mol_type = other DNA
aggattgcagagcctgtctgccttacgg

SEQ ID NO: 10613 - DNA, 28 bp, synthetic construct
  source 1..28: mol_type = other DNA
gctctgcaatcctcagctgcccgtcagg

SEQ ID NO: 10614 - DNA, 28 bp, synthetic construct
  source 1..28: mol_type = other DNA
cctcagctgcccgtcaggcctgccccgg

SEQ ID NO: 10615 - DNA, 28 bp, synthetic construct
  source 1..28: mol_type = other DNA
ctcagctgcccgtcaggcctgccccggg

SEQ ID NO: 10616 - DNA, 28 bp, synthetic construct
  source 1..28: mol_type = other DNA
atgctatgcccggggcaggcctgacggg

SEQ ID NO: 10617 - DNA, 28 bp, synthetic construct
  source 1..28: mol_type = other DNA
catgctatgcccggggcaggcctgacgg

SEQ ID NO: 10618 - DNA, 28 bp, synthetic construct
  source 1..28: mol_type = other DNA
caggcctgccccgggcatagcatgcagg

SEQ ID NO: 10619 - DNA, 28 bp, synthetic construct
  source 1..28: mol_type = other DNA
gcctgccccgggcatagcatgcaggagg

SEQ ID NO: 10620 - DNA, 28 bp, synthetic construct
  source 1..28: mol_type = other DNA
cctgccccgggcatagcatgcaggaggg

SEQ ID NO: 10621 - DNA, 28 bp, synthetic construct
  source 1..28: mol_type = other DNA
ctggccctcctgcatgctatgcccgggg

SEQ ID NO: 10622 - DNA, 28 bp, synthetic construct
  source 1..28: mol_type = other DNA
cccgggcatagcatgcaggagggccagg

SEQ ID NO: 10623 - DNA, 28 bp, synthetic construct
  source 1..28: mol_type = other DNA
gcctggccctcctgcatgctatgcccgg

SEQ ID NO: 10624 - DNA, 28 bp, synthetic construct
  source 1..28: mol_type = other DNA
tagcatgcaggagggccaggccctgagg

SEQ ID NO: 10625 - DNA, 28 bp, synthetic construct
  source 1..28: mol_type = other DNA
gagggccaggccctgaggcatcccctgg

SEQ ID NO: 10626 - DNA, 28 bp, synthetic construct
  source 1..28: mol_type = other DNA
agcggccaggggatgcctcagggcctgg

SEQ ID NO: 10627 - DNA, 28 bp, synthetic construct
  source 1..28: mol_type = other DNA
ggatcagcggccaggggatgcctcaggg

SEQ ID NO: 10628 - DNA, 28 bp, synthetic construct
  source 1..28: mol_type = other DNA
gggatcagcggccaggggatgcctcagg

SEQ ID NO: 10629 - DNA, 28 bp, synthetic construct
  source 1..28: mol_type = other DNA
tggtggaggtgggatcagcggccagggg

SEQ ID NO: 10630 - DNA, 28 bp, synthetic construct
  source 1..28: mol_type = other DNA
gtggtggaggtgggatcagcggccaggg

SEQ ID NO: 10631 - DNA, 28 bp, synthetic construct
  source 1..28: mol_type = other DNA
ggtggtggaggtgggatcagcggccagg

SEQ ID NO: 10632 - DNA, 28 bp, synthetic construct
  source 1..28: mol_type = other DNA
ggggcggtggtggaggtgggatcagcgg

SEQ ID NO: 10633 - DNA, 28 bp, synthetic construct
  source 1..28: mol_type = other DNA
tagtgttaggggcggtggtggaggtggg

SEQ ID NO: 10634 - DNA, 28 bp, synthetic construct
  source 1..28: mol_type = other DNA
atagtgttaggggcggtggtggaggtgg

SEQ ID NO: 10635 - DNA, 28 bp, synthetic construct
  source 1..28: mol_type = other DNA
acctccaccaccgcccctaacactatgg

SEQ ID NO: 10636 - DNA, 28 bp, synthetic construct
  source 1..28: mol_type = other DNA
tccatagtgttaggggcggtggtggagg

SEQ ID NO: 10637 - DNA, 28 bp, synthetic construct
  source 1..28: mol_type = other DNA
ctttccatagtgttaggggcggtggtgg

SEQ ID NO: 10638 - DNA, 28 bp, synthetic construct
  source 1..28: mol_type = other DNA
tgactttccatagtgttaggggcggtgg

SEQ ID NO: 10639 - DNA, 28 bp, synthetic construct
  source 1..28: mol_type = other DNA
cattgactttccatagtgttaggggcgg

SEQ ID NO: 10640 - DNA, 28 bp, synthetic construct
  source 1..28: mol_type = other DNA
aaacattgactttccatagtgttagggg

SEQ ID NO: 10641 - DNA, 28 bp, synthetic construct
  source 1..28: mol_type = other DNA
aaaacattgactttccatagtgttaggg

SEQ ID NO: 10642 - DNA, 28 bp, synthetic construct
  source 1..28: mol_type = other DNA
caaaacattgactttccatagtgttagg

SEQ ID NO: 10643 - DNA, 28 bp, synthetic construct
  source 1..28: mol_type = other DNA
taggtggcttctgactttgattttctgg

SEQ ID NO: 10644 - DNA, 28 bp, synthetic construct
  source 1..28: mol_type = other DNA
agaaaatcaaagtcagaagccacctagg

SEQ ID NO: 10645 - DNA, 28 bp, synthetic construct
  source 1..28: mol_type = other DNA
aaaatcttttctgagcgcacctaggtgg

SEQ ID NO: 10646 - DNA, 28 bp, synthetic construct
  source 1..28: mol_type = other DNA
aagaaaatcttttctgagcgcacctagg

SEQ ID NO: 10647 - DNA, 28 bp, synthetic construct
  source 1..28: mol_type = other DNA
ttcaaatattgacaatagatcactctgg

SEQ ID NO: 10648 - DNA, 28 bp, synthetic construct
  source 1..28: mol_type = other DNA
agatcactctggaaattcatgtcaatgg

SEQ ID NO: 10649 - DNA, 28 bp, synthetic construct
  source 1..28: mol_type = other DNA
attcatgtcaatggtagctgccatctgg

SEQ ID NO: 10650 - DNA, 28 bp, synthetic construct
  source 1..28: mol_type = other DNA
catgtcaatggtagctgccatctggagg

SEQ ID NO: 10651 - DNA, 28 bp, synthetic construct
  source 1..28: mol_type = other DNA
atggtagctgccatctggaggagaaagg

SEQ ID NO: 10652 - DNA, 28 bp, synthetic construct
  source 1..28: mol_type = other DNA
tagctgccatctggaggagaaaggaagg

SEQ ID NO: 10653 - DNA, 28 bp, synthetic construct
  source 1..28: mol_type = other DNA
ctgccatctggaggagaaaggaaggagg

SEQ ID NO: 10654 - DNA, 28 bp, synthetic construct
  source 1..28: mol_type = other DNA
tgccatctggaggagaaaggaaggaggg

SEQ ID NO: 10655 - DNA, 28 bp, synthetic construct
  source 1..28: mol_type = other DNA
ctccctccttcctttctcctccagatgg

SEQ ID NO: 10656 - DNA, 28 bp, synthetic construct
  source 1..28: mol_type = other DNA
ggtccccaccaggcctccagactcacgg

SEQ ID NO: 10657 - DNA, 28 bp, synthetic construct
  source 1..28: mol_type = other DNA
aagccgtgagtctggaggcctggtgggg

SEQ ID NO: 10658 - DNA, 28 bp, synthetic construct
  source 1..28: mol_type = other DNA
gaagccgtgagtctggaggcctggtggg

SEQ ID NO: 10659 - DNA, 28 bp, synthetic construct
  source 1..28: mol_type = other DNA
ggaagccgtgagtctggaggcctggtgg

SEQ ID NO: 10660 - DNA, 28 bp, synthetic construct
  source 1..28: mol_type = other DNA
ccaggcctccagactcacggcttcccgg

SEQ ID NO: 10661 - DNA, 28 bp, synthetic construct
  source 1..28: mol_type = other DNA
agacgccgggaagccgtgagtctggagg

SEQ ID NO: 10662 - DNA, 28 bp, synthetic construct
  source 1..28: mol_type = other DNA
cgaagacgccgggaagccgtgagtctgg

SEQ ID NO: 10663 - DNA, 28 bp, synthetic construct
  source 1..28: mol_type = other DNA
aagcgggagcaggagcgaagacgccggg

SEQ ID NO: 10664 - DNA, 28 bp, synthetic construct
  source 1..28: mol_type = other DNA
gaagcgggagcaggagcgaagacgccgg

SEQ ID NO: 10665 - DNA, 28 bp, synthetic construct
  source 1..28: mol_type = other DNA
gcgtcttcgctcctgctcccgcttccgg

SEQ ID NO: 10666 - DNA, 28 bp, synthetic construct
  source 1..28: mol_type = other DNA
cgtcttcgctcctgctcccgcttccggg

SEQ ID NO: 10667 - DNA, 28 bp, synthetic construct
  source 1..28: mol_type = other DNA
agggagttggcccggaagcgggagcagg

SEQ ID NO: 10668 - DNA, 28 bp, synthetic construct
  source 1..28: mol_type = other DNA
cagcagagggagttggcccggaagcggg

SEQ ID NO: 10669 - DNA, 28 bp, synthetic construct
  source 1..28: mol_type = other DNA
ccgcttccgggccaactccctctgctgg

SEQ ID NO: 10670 - DNA, 28 bp, synthetic construct
  source 1..28: mol_type = other DNA
gctggaccagcagagggagttggcccgg

SEQ ID NO: 10671 - DNA, 28 bp, synthetic construct
  source 1..28: mol_type = other DNA
gccaactccctctgctggtccagcatgg

SEQ ID NO: 10672 - DNA, 28 bp, synthetic construct
  source 1..28: mol_type = other DNA
tccatgctggaccagcagagggagttgg

SEQ ID NO: 10673 - DNA, 28 bp, synthetic construct
  source 1..28: mol_type = other DNA
ctccctctgctggtccagcatggactgg

SEQ ID NO: 10674 - DNA, 28 bp, synthetic construct
  source 1..28: mol_type = other DNA
tccctctgctggtccagcatggactggg

SEQ ID NO: 10675 - DNA, 28 bp, synthetic construct
  source 1..28: mol_type = other DNA
ccctctgctggtccagcatggactgggg

SEQ ID NO: 10676 - DNA, 28 bp, synthetic construct
  source 1..28: mol_type = other DNA
gccccagtccatgctggaccagcagagg

SEQ ID NO: 10677 - DNA, 28 bp, synthetic construct
  source 1..28: mol_type = other DNA
ctgctggtccagcatggactggggctgg

SEQ ID NO: 10678 - DNA, 28 bp, synthetic construct
  source 1..28: mol_type = other DNA
tgctggtccagcatggactggggctggg

SEQ ID NO: 10679 - DNA, 28 bp, synthetic construct
  source 1..28: mol_type = other DNA
cagagctcccagccccagtccatgctgg

SEQ ID NO: 10680 - DNA, 28 bp, synthetic construct
  source 1..28: mol_type = other DNA
cagcatggactggggctgggagctctgg

SEQ ID NO: 10681 - DNA, 28 bp, synthetic construct
  source 1..28: mol_type = other DNA
agcatggactggggctgggagctctggg

SEQ ID NO: 10682 - DNA, 28 bp, synthetic construct
  source 1..28: mol_type = other DNA
actggggctgggagctctgggcctgtgg

SEQ ID NO: 10683 - DNA, 28 bp, synthetic construct
  source 1..28: mol_type = other DNA
ctggggctgggagctctgggcctgtggg

SEQ ID NO: 10684 - DNA, 28 bp, synthetic construct
  source 1..28: mol_type = other DNA
tggggctgggagctctgggcctgtgggg

SEQ ID NO: 10685 - DNA, 28 bp, synthetic construct
  source 1..28: mol_type = other DNA
ggctgggagctctgggcctgtggggtgg

SEQ ID NO: 10686 - DNA, 28 bp, synthetic construct
  source 1..28: mol_type = other DNA
tgggagctctgggcctgtggggtggcgg

SEQ ID NO: 10687 - DNA, 28 bp, synthetic construct
  source 1..28: mol_type = other DNA
gagctctgggcctgtggggtggcggcgg

SEQ ID NO: 10688 - DNA, 28 bp, synthetic construct
  source 1..28: mol_type = other DNA
gcggtggctgccgccgccaccccacagg

SEQ ID NO: 10689 - DNA, 28 bp, synthetic construct
  source 1..28: mol_type = other DNA
cagcagcaacagcaagcagctgcggtgg

SEQ ID NO: 10690 - DNA, 28 bp, synthetic construct
  source 1..28: mol_type = other DNA
cagcagcagcaacagcaagcagctgcgg

SEQ ID NO: 10691 - DNA, 28 bp, synthetic construct
  source 1..28: mol_type = other DNA
ctgttgctgctgctgctgttgctcctgg

SEQ ID NO: 10692 - DNA, 28 bp, synthetic construct
  source 1..28: mol_type = other DNA
caggagcagcagcagcagcagcgccagg

SEQ ID NO: 10693 - DNA, 28 bp, synthetic construct
  source 1..28: mol_type = other DNA
ctggcgctgctgctgctgctgctcctgg

SEQ ID NO: 10694 - DNA, 28 bp, synthetic construct
  source 1..28: mol_type = other DNA
ctcctggcgccgacgtgcctcctcatgg

SEQ ID NO: 10695 - DNA, 28 bp, synthetic construct
  source 1..28: mol_type = other DNA
tcctggcgccgacgtgcctcctcatggg

SEQ ID NO: 10696 - DNA, 28 bp, synthetic construct
  source 1..28: mol_type = other DNA
gcccatgaggaggcacgtcggcgccagg

SEQ ID NO: 10697 - DNA, 28 bp, synthetic construct
  source 1..28: mol_type = other DNA
ccgacgtgcctcctcatgggcccgccgg

SEQ ID NO: 10698 - DNA, 28 bp, synthetic construct
  source 1..28: mol_type = other DNA
cgacgtgcctcctcatgggcccgccggg

SEQ ID NO: 10699 - DNA, 28 bp, synthetic construct
  source 1..28: mol_type = other DNA
gagcaggcccggcgggcccatgaggagg

SEQ ID NO: 10700 - DNA, 28 bp, synthetic construct
  source 1..28: mol_type = other DNA
ctggagcaggcccggcgggcccatgagg

SEQ ID NO: 10701 - DNA, 28 bp, synthetic construct
  source 1..28: mol_type = other DNA
gaggatgcgctggagcaggcccggcggg

SEQ ID NO: 10702 - DNA, 28 bp, synthetic construct
  source 1..28: mol_type = other DNA
cgaggatgcgctggagcaggcccggcgg

SEQ ID NO: 10703 - DNA, 28 bp, synthetic construct
  source 1..28: mol_type = other DNA
ggacgaggatgcgctggagcaggcccgg

SEQ ID NO: 10704 - DNA, 28 bp, synthetic construct
  source 1..28: mol_type = other DNA
cgagaggacgaggatgcgctggagcagg

SEQ ID NO: 10705 - DNA, 28 bp, synthetic construct
  source 1..28: mol_type = other DNA
ctgctccagcgcatcctcgtcctctcgg

SEQ ID NO: 10706 - DNA, 28 bp, synthetic construct
  source 1..28: mol_type = other DNA
aggagccgagaggacgaggatgcgctgg

SEQ ID NO: 10707 - DNA, 28 bp, synthetic construct
  source 1..28: mol_type = other DNA
agcgcatcctcgtcctctcggctcctgg

SEQ ID NO: 10708 - DNA, 28 bp, synthetic construct
  source 1..28: mol_type = other DNA
gcgcatcctcgtcctctcggctcctggg

SEQ ID NO: 10709 - DNA, 28 bp, synthetic construct
  source 1..28: mol_type = other DNA
cctcgtcctctcggctcctgggcagagg

SEQ ID NO: 10710 - DNA, 28 bp, synthetic construct
  source 1..28: mol_type = other DNA
ctcgtcctctcggctcctgggcagaggg

SEQ ID NO: 10711 - DNA, 28 bp, synthetic construct
  source 1..28: mol_type = other DNA
tgggaccctctgcccaggagccgagagg

SEQ ID NO: 10712 - DNA, 28 bp, synthetic construct
  source 1..28: mol_type = other DNA
cctgggcagagggtcccagtcagcctgg

SEQ ID NO: 10713 - DNA, 28 bp, synthetic construct
  source 1..28: mol_type = other DNA
ggtgggcgggtgtctgggtggggcatgg

SEQ ID NO: 10714 - DNA, 28 bp, synthetic construct
  source 1..28: mol_type = other DNA
catgaggtgggcgggtgtctgggtgggg

SEQ ID NO: 10715 - DNA, 28 bp, synthetic construct
  source 1..28: mol_type = other DNA
gcatgaggtgggcgggtgtctgggtggg

SEQ ID NO: 10716 - DNA, 28 bp, synthetic construct
  source 1..28: mol_type = other DNA
cgcatgaggtgggcgggtgtctgggtgg

SEQ ID NO: 10717 - DNA, 28 bp, synthetic construct
  source 1..28: mol_type = other DNA
gagcgcatgaggtgggcgggtgtctggg

SEQ ID NO: 10718 - DNA, 28 bp, synthetic construct
  source 1..28: mol_type = other DNA
ggagcgcatgaggtgggcgggtgtctgg

SEQ ID NO: 10719 - DNA, 28 bp, synthetic construct
  source 1..28: mol_type = other DNA
tgcggcaggagcgcatgaggtgggcggg

SEQ ID NO: 10720 - DNA, 28 bp, synthetic construct
  source 1..28: mol_type = other DNA
ctgcggcaggagcgcatgaggtgggcgg

SEQ ID NO: 10721 - DNA, 28 bp, synthetic construct
  source 1..28: mol_type = other DNA
cggctgcggcaggagcgcatgaggtggg

SEQ ID NO: 10722 - DNA, 28 bp, synthetic construct
  source 1..28: mol_type = other DNA
gcggctgcggcaggagcgcatgaggtgg

SEQ ID NO: 10723 - DNA, 28 bp, synthetic construct
  source 1..28: mol_type = other DNA
ggagcggctgcggcaggagcgcatgagg

SEQ ID NO: 10724 - DNA, 28 bp, synthetic construct
  source 1..28: mol_type = other DNA
gagaaggagaaggagcggctgcggcagg

SEQ ID NO: 10725 - DNA, 28 bp, synthetic construct
  source 1..28: mol_type = other DNA
cgctgagaaggagaaggagcggctgcgg

SEQ ID NO: 10726 - DNA, 28 bp, synthetic construct
  source 1..28: mol_type = other DNA
cgagcacgctgagaaggagaaggagcgg

SEQ ID NO: 10727 - DNA, 28 bp, synthetic construct
  source 1..28: mol_type = other DNA
cgctccttctccttctcagcgtgctcgg

SEQ ID NO: 10728 - DNA, 28 bp, synthetic construct
  source 1..28: mol_type = other DNA
caggccgagcacgctgagaaggagaagg

SEQ ID NO: 10729 - DNA, 28 bp, synthetic construct
  source 1..28: mol_type = other DNA
aaggctcaggccgagcacgctgagaagg

SEQ ID NO: 10730 - DNA, 28 bp, synthetic construct
  source 1..28: mol_type = other DNA
ctcagcgtgctcggcctgagccttcagg

SEQ ID NO: 10731 - DNA, 28 bp, synthetic construct
  source 1..28: mol_type = other DNA
tcagcgtgctcggcctgagccttcaggg

SEQ ID NO: 10732 - DNA, 28 bp, synthetic construct
  source 1..28: mol_type = other DNA
gagcgtgagaaggccctgaaggctcagg

SEQ ID NO: 10733 - DNA, 28 bp, synthetic construct
  source 1..28: mol_type = other DNA
aaagaggagcgtgagaaggccctgaagg

SEQ ID NO: 10734 - DNA, 28 bp, synthetic construct
  source 1..28: mol_type = other DNA
gctcgggagaaagaggagcgtgagaagg

SEQ ID NO: 10735 - DNA, 28 bp, synthetic construct
  source 1..28: mol_type = other DNA
ttctcacgctcctctttctcccgagcgg

SEQ ID NO: 10736 - DNA, 28 bp, synthetic construct
  source 1..28: mol_type = other DNA
acgctcctctttctcccgagcggcgcgg

SEQ ID NO: 10737 - DNA, 28 bp, synthetic construct
  source 1..28: mol_type = other DNA
ctcctctttctcccgagcggcgcggcgg

SEQ ID NO: 10738 - DNA, 28 bp, synthetic construct
  source 1..28: mol_type = other DNA
ttccgccgcgccgctcgggagaaagagg

SEQ ID NO: 10739 - DNA, 28 bp, synthetic construct
  source 1..28: mol_type = other DNA
ttcgagcagttccgccgcgccgctcggg

SEQ ID NO: 10740 - DNA, 28 bp, synthetic construct
  source 1..28: mol_type = other DNA
cttcgagcagttccgccgcgccgctcgg

SEQ ID NO: 10741 - DNA, 28 bp, synthetic construct
  source 1..28: mol_type = other DNA
cggcggaactgctcgaagctgtcgctgg

SEQ ID NO: 10742 - DNA, 28 bp, synthetic construct
  source 1..28: mol_type = other DNA
tgctcgaagctgtcgctggatgacttgg

SEQ ID NO: 10743 - DNA, 28 bp, synthetic construct
  source 1..28: mol_type = other DNA
aagctgtcgctggatgacttggctgtgg

SEQ ID NO: 10744 - DNA, 28 bp, synthetic construct
  source 1..28: mol_type = other DNA
ctgtcgctggatgacttggctgtggagg

SEQ ID NO: 10745 - DNA, 28 bp, synthetic construct
  source 1..28: mol_type = other DNA
tcgctggatgacttggctgtggaggagg

SEQ ID NO: 10746 - DNA, 28 bp, synthetic construct
  source 1..28: mol_type = other DNA
cgctggatgacttggctgtggaggaggg

SEQ ID NO: 10747 - DNA, 28 bp, synthetic construct
  source 1..28: mol_type = other DNA
gctggatgacttggctgtggaggagggg

SEQ ID NO: 10748 - DNA, 28 bp, synthetic construct
  source 1..28: mol_type = other DNA
ctggatgacttggctgtggaggaggggg

SEQ ID NO: 10749 - DNA, 28 bp, synthetic construct
  source 1..28: mol_type = other DNA
gatgacttggctgtggaggagggggtgg

SEQ ID NO: 10750 - DNA, 28 bp, synthetic construct
  source 1..28: mol_type = other DNA
acttggctgtggaggagggggtggtcgg

SEQ ID NO: 10751 - DNA, 28 bp, synthetic construct
  source 1..28: mol_type = other DNA
gggggtggtcggatgcttctgcactagg

SEQ ID NO: 10752 - DNA, 28 bp, synthetic construct
  source 1..28: mol_type = other DNA
gtggtcggatgcttctgcactaggctgg

SEQ ID NO: 10753 - DNA, 28 bp, synthetic construct
  source 1..28: mol_type = other DNA
ggatgcttctgcactaggctggcccagg

SEQ ID NO: 10754 - DNA, 28 bp, synthetic construct
  source 1..28: mol_type = other DNA
ctgaaaatcaagaacatgggctcctggg

SEQ ID NO: 10755 - DNA, 28 bp, synthetic construct
  source 1..28: mol_type = other DNA
ccaggagcccatgttcttgattttcagg

SEQ ID NO: 10756 - DNA, 28 bp, synthetic construct
  source 1..28: mol_type = other DNA
tgcaggacctgaaaatcaagaacatggg

SEQ ID NO: 10757 - DNA, 28 bp, synthetic construct
  source 1..28: mol_type = other DNA
ctgcaggacctgaaaatcaagaacatgg

SEQ ID NO: 10758 - DNA, 28 bp, synthetic construct
  source 1..28: mol_type = other DNA
gattttcaggtcctgcagaacagagagg

SEQ ID NO: 10759 - DNA, 28 bp, synthetic construct
  source 1..28: mol_type = other DNA
ttcaggtcctgcagaacagagaggttgg

SEQ ID NO: 10760 - DNA, 28 bp, synthetic construct
  source 1..28: mol_type = other DNA
tcaggtcctgcagaacagagaggttggg

SEQ ID NO: 10761 - DNA, 28 bp, synthetic construct
  source 1..28: mol_type = other DNA
caggtcctgcagaacagagaggttgggg

SEQ ID NO: 10762 - DNA, 28 bp, synthetic construct
  source 1..28: mol_type = other DNA
gtcctgcagaacagagaggttggggtgg

SEQ ID NO: 10763 - DNA, 28 bp, synthetic construct
  source 1..28: mol_type = other DNA
tcctgcagaacagagaggttggggtggg

SEQ ID NO: 10764 - DNA, 28 bp, synthetic construct
  source 1..28: mol_type = other DNA
acccaccccaacctctctgttctgcagg

SEQ ID NO: 10765 - DNA, 28 bp, synthetic construct
  source 1..28: mol_type = other DNA
caaaaaggttgggatggaggtccatggg

SEQ ID NO: 10766 - DNA, 28 bp, synthetic construct
  source 1..28: mol_type = other DNA
ccatggacctccatcccaacctttttgg

SEQ ID NO: 10767 - DNA, 28 bp, synthetic construct
  source 1..28: mol_type = other DNA
catggacctccatcccaacctttttggg

SEQ ID NO: 10768 - DNA, 28 bp, synthetic construct
  source 1..28: mol_type = other DNA
gttgcgcccaaaaaggttgggatggagg

SEQ ID NO: 10769 - DNA, 28 bp, synthetic construct
  source 1..28: mol_type = other DNA
ccatcccaacctttttgggcgcaactgg

SEQ ID NO: 10770 - DNA, 28 bp, synthetic construct
  source 1..28: mol_type = other DNA
gactccagttgcgcccaaaaaggttggg

SEQ ID NO: 10771 - DNA, 28 bp, synthetic construct
  source 1..28: mol_type = other DNA
agactccagttgcgcccaaaaaggttgg

SEQ ID NO: 10772 - DNA, 28 bp, synthetic construct
  source 1..28: mol_type = other DNA
cctttttgggcgcaactggagtcttcgg

SEQ ID NO: 10773 - DNA, 28 bp, synthetic construct
  source 1..28: mol_type = other DNA
gctcctgtttctgtttgtccttgtcagg

SEQ ID NO: 10774 - DNA, 28 bp, synthetic construct
  source 1..28: mol_type = other DNA
ctcctgtttctgtttgtccttgtcaggg

SEQ ID NO: 10775 - DNA, 28 bp, synthetic construct
  source 1..28: mol_type = other DNA
tcctgtttctgtttgtccttgtcagggg

SEQ ID NO: 10776 - DNA, 28 bp, synthetic construct
  source 1..28: mol_type = other DNA
gcccctgacaaggacaaacagaaacagg

SEQ ID NO: 10777 - DNA, 28 bp, synthetic construct
  source 1..28: mol_type = other DNA
tctgtttgtccttgtcaggggcccctgg

SEQ ID NO: 10778 - DNA, 28 bp, synthetic construct
  source 1..28: mol_type = other DNA
gtttgtccttgtcaggggcccctggtgg

SEQ ID NO: 10779 - DNA, 28 bp, synthetic construct
  source 1..28: mol_type = other DNA
tgtccttgtcaggggcccctggtggcgg

SEQ ID NO: 10780 - DNA, 28 bp, synthetic construct
  source 1..28: mol_type = other DNA
gcaccgccaccaggggcccctgacaagg

SEQ ID NO: 10781 - DNA, 28 bp, synthetic construct
  source 1..28: mol_type = other DNA
cccctggtggcggtgcgttctgctctgg

SEQ ID NO: 10782 - DNA, 28 bp, synthetic construct
  source 1..28: mol_type = other DNA
ccctggtggcggtgcgttctgctctggg

SEQ ID NO: 10783 - DNA, 28 bp, synthetic construct
  source 1..28: mol_type = other DNA
cctggtggcggtgcgttctgctctgggg

SEQ ID NO: 10784 - DNA, 28 bp, synthetic construct
  source 1..28: mol_type = other DNA
ctggtggcggtgcgttctgctctggggg

SEQ ID NO: 10785 - DNA, 28 bp, synthetic construct
  source 1..28: mol_type = other DNA
tggcggtgcgttctgctctgggggccgg

SEQ ID NO: 10786 - DNA, 28 bp, synthetic construct
  source 1..28: mol_type = other DNA
cgttctgctctgggggccggatcacagg

SEQ ID NO: 10787 - DNA, 28 bp, synthetic construct
  source 1..28: mol_type = other DNA
tgtggatgtcgggaggcctgtgatccgg

SEQ ID NO: 10788 - DNA, 28 bp, synthetic construct
  source 1..28: mol_type = other DNA
ggatcacaggcctcccgacatccacagg

SEQ ID NO: 10789 - DNA, 28 bp, synthetic construct
  source 1..28: mol_type = other DNA
ggaaatgaagcctgtggatgtcgggagg

SEQ ID NO: 10790 - DNA, 28 bp, synthetic construct
  source 1..28: mol_type = other DNA
tcccgacatccacaggcttcatttccgg

SEQ ID NO: 10791 - DNA, 28 bp, synthetic construct
  source 1..28: mol_type = other DNA
gccggaaatgaagcctgtggatgtcggg

SEQ ID NO: 10792 - DNA, 28 bp, synthetic construct
  source 1..28: mol_type = other DNA
ggccggaaatgaagcctgtggatgtcgg

SEQ ID NO: 10793 - DNA, 28 bp, synthetic construct
  source 1..28: mol_type = other DNA
catccacaggcttcatttccggccctgg

SEQ ID NO: 10794 - DNA, 28 bp, synthetic construct
  source 1..28: mol_type = other DNA
gttccagggccggaaatgaagcctgtgg

SEQ ID NO: 10795 - DNA, 28 bp, synthetic construct
  source 1..28: mol_type = other DNA
tttccggccctggaacataaacagccgg

SEQ ID NO: 10796 - DNA, 28 bp, synthetic construct
  source 1..28: mol_type = other DNA
ccggccctggaacataaacagccggtgg

SEQ ID NO: 10797 - DNA, 28 bp, synthetic construct
  source 1..28: mol_type = other DNA
cggccctggaacataaacagccggtggg

SEQ ID NO: 10798 - DNA, 28 bp, synthetic construct
  source 1..28: mol_type = other DNA
gggcccaccggctgtttatgttccaggg

SEQ ID NO: 10799 - DNA, 28 bp, synthetic construct
  source 1..28: mol_type = other DNA
agggcccaccggctgtttatgttccagg

SEQ ID NO: 10800 - DNA, 28 bp, synthetic construct
  source 1..28: mol_type = other DNA
ctgtgggcagggagagcactcacgctgg

SEQ ID NO: 10801 - DNA, 28 bp, synthetic construct
  source 1..28: mol_type = other DNA
tgtgggcagggagagcactcacgctggg

SEQ ID NO: 10802 - DNA, 28 bp, synthetic construct
  source 1..28: mol_type = other DNA
gtgggcagggagagcactcacgctgggg

SEQ ID NO: 10803 - DNA, 28 bp, synthetic construct
  source 1..28: mol_type = other DNA
gcagggagagcactcacgctggggcagg

SEQ ID NO: 10804 - DNA, 28 bp, synthetic construct
  source 1..28: mol_type = other DNA
gggagagcactcacgctggggcaggtgg

SEQ ID NO: 10805 - DNA, 28 bp, synthetic construct
  source 1..28: mol_type = other DNA
gagcactcacgctggggcaggtggacgg

SEQ ID NO: 10806 - DNA, 28 bp, synthetic construct
  source 1..28: mol_type = other DNA
agcactcacgctggggcaggtggacggg

SEQ ID NO: 10807 - DNA, 28 bp, synthetic construct
  source 1..28: mol_type = other DNA
gcactcacgctggggcaggtggacgggg

SEQ ID NO: 10808 - DNA, 28 bp, synthetic construct
  source 1..28: mol_type = other DNA
cactcacgctggggcaggtggacggggg

SEQ ID NO: 10809 - DNA, 28 bp, synthetic construct
  source 1..28: mol_type = other DNA
ggtggacgggggccttgatgctctccgg

SEQ ID NO: 10810 - DNA, 28 bp, synthetic construct
  source 1..28: mol_type = other DNA
gtggacgggggccttgatgctctccggg

SEQ ID NO: 10811 - DNA, 28 bp, synthetic construct
  source 1..28: mol_type = other DNA
ggggccttgatgctctccgggtgcttgg

SEQ ID NO: 10812 - DNA, 28 bp, synthetic construct
  source 1..28: mol_type = other DNA
gggccttgatgctctccgggtgcttggg

SEQ ID NO: 10813 - DNA, 28 bp, synthetic construct
  source 1..28: mol_type = other DNA
ggccttgatgctctccgggtgcttgggg

SEQ ID NO: 10814 - DNA, 28 bp, synthetic construct
  source 1..28: mol_type = other DNA
gccttgatgctctccgggtgcttggggg

SEQ ID NO: 10815 - DNA, 28 bp, synthetic construct
  source 1..28: mol_type = other DNA
ccttgatgctctccgggtgcttgggggg

SEQ ID NO: 10816 - DNA, 28 bp, synthetic construct
  source 1..28: mol_type = other DNA
tgctctccgggtgcttggggggctccgg

SEQ ID NO: 10817 - DNA, 28 bp, synthetic construct
  source 1..28: mol_type = other DNA
ctgcggccggagccccccaagcacccgg

SEQ ID NO: 10818 - DNA, 28 bp, synthetic construct
  source 1..28: mol_type = other DNA
tgcttggggggctccggccgcagcgagg

SEQ ID NO: 10819 - DNA, 28 bp, synthetic construct
  source 1..28: mol_type = other DNA
gcttggggggctccggccgcagcgaggg

SEQ ID NO: 10820 - DNA, 28 bp, synthetic construct
  source 1..28: mol_type = other DNA
cttggggggctccggccgcagcgagggg

SEQ ID NO: 10821 - DNA, 28 bp, synthetic construct
  source 1..28: mol_type = other DNA
ggctccggccgcagcgaggggctgaagg

SEQ ID NO: 10822 - DNA, 28 bp, synthetic construct
  source 1..28: mol_type = other DNA
gctccggccgcagcgaggggctgaaggg

SEQ ID NO: 10823 - DNA, 28 bp, synthetic construct
  source 1..28: mol_type = other DNA
gagcccttcagcccctcgctgcggccgg

SEQ ID NO: 10824 - DNA, 28 bp, synthetic construct
  source 1..28: mol_type = other DNA
cagcgagcccttcagcccctcgctgcgg

SEQ ID NO: 10825 - DNA, 28 bp, synthetic construct
  source 1..28: mol_type = other DNA
cagcgaggggctgaagggctcgctgcgg

SEQ ID NO: 10826 - DNA, 28 bp, synthetic construct
  source 1..28: mol_type = other DNA
gggctgaagggctcgctgcggatgatgg

SEQ ID NO: 10827 - DNA, 28 bp, synthetic construct
  source 1..28: mol_type = other DNA
ggctgaagggctcgctgcggatgatggg

SEQ ID NO: 10828 - DNA, 28 bp, synthetic construct
  source 1..28: mol_type = other DNA
gggctcgctgcggatgatgggtgagtgg

SEQ ID NO: 10829 - DNA, 28 bp, synthetic construct
  source 1..28: mol_type = other DNA
gatcttctcctccttcaccaccacgagg

SEQ ID NO: 10830 - DNA, 28 bp, synthetic construct
  source 1..28: mol_type = other DNA
atcttctcctccttcaccaccacgaggg

SEQ ID NO: 10831 - DNA, 28 bp, synthetic construct
  source 1..28: mol_type = other DNA
tcttctcctccttcaccaccacgagggg

SEQ ID NO: 10832 - DNA, 28 bp, synthetic construct
  source 1..28: mol_type = other DNA
ctcctccttcaccaccacgaggggctgg

SEQ ID NO: 10833 - DNA, 28 bp, synthetic construct
  source 1..28: mol_type = other DNA
tcctccttcaccaccacgaggggctggg

SEQ ID NO: 10834 - DNA, 28 bp, synthetic construct
  source 1..28: mol_type = other DNA
cctccttcaccaccacgaggggctgggg

SEQ ID NO: 10835 - DNA, 28 bp, synthetic construct
  source 1..28: mol_type = other DNA
cagccccagcccctcgtggtggtgaagg

SEQ ID NO: 10836 - DNA, 28 bp, synthetic construct
  source 1..28: mol_type = other DNA
cttcaccaccacgaggggctggggctgg

SEQ ID NO: 10837 - DNA, 28 bp, synthetic construct
  source 1..28: mol_type = other DNA
gtggtccagccccagcccctcgtggtgg

SEQ ID NO: 10838 - DNA, 28 bp, synthetic construct
  source 1..28: mol_type = other DNA
accacgaggggctggggctggaccacgg

SEQ ID NO: 10839 - DNA, 28 bp, synthetic construct
  source 1..28: mol_type = other DNA
tccgtggtccagccccagcccctcgtgg

SEQ ID NO: 10840 - DNA, 28 bp, synthetic construct
  source 1..28: mol_type = other DNA
acgaggggctggggctggaccacggagg

SEQ ID NO: 10841 - DNA, 28 bp, synthetic construct
  source 1..28: mol_type = other DNA
gaccacggaggcagcacgcagctcctgg

SEQ ID NO: 10842 - DNA, 28 bp, synthetic construct
  source 1..28: mol_type = other DNA
accacggaggcagcacgcagctcctggg

SEQ ID NO: 10843 - DNA, 28 bp, synthetic construct
  source 1..28: mol_type = other DNA
tcccaggagctgcgtgctgcctccgtgg

SEQ ID NO: 10844 - DNA, 28 bp, synthetic construct
  source 1..28: mol_type = other DNA
cggaggcagcacgcagctcctgggatgg

SEQ ID NO: 10845 - DNA, 28 bp, synthetic construct
  source 1..28: mol_type = other DNA
cagcacgcagctcctgggatggcacagg

SEQ ID NO: 10846 - DNA, 28 bp, synthetic construct
  source 1..28: mol_type = other DNA
agctcctgggatggcacaggcacagcgg

SEQ ID NO: 10847 - DNA, 28 bp, synthetic construct
  source 1..28: mol_type = other DNA
cctgggatggcacaggcacagcggccgg

SEQ ID NO: 10848 - DNA, 28 bp, synthetic construct
  source 1..28: mol_type = other DNA
taagaaacaggtaactggcagggctggg

SEQ ID NO: 10849 - DNA, 28 bp, synthetic construct
  source 1..28: mol_type = other DNA
ctaagaaacaggtaactggcagggctgg

SEQ ID NO: 10850 - DNA, 28 bp, synthetic construct
  source 1..28: mol_type = other DNA
cagccctgccagttacctgtttcttagg

SEQ ID NO: 10851 - DNA, 28 bp, synthetic construct
  source 1..28: mol_type = other DNA
cagcctaagaaacaggtaactggcaggg

SEQ ID NO: 10852 - DNA, 28 bp, synthetic construct
  source 1..28: mol_type = other DNA
cctgccagttacctgtttcttaggctgg

SEQ ID NO: 10853 - DNA, 28 bp, synthetic construct
  source 1..28: mol_type = other DNA
acgtccagcctaagaaacaggtaactgg

SEQ ID NO: 10854 - DNA, 28 bp, synthetic construct
  source 1..28: mol_type = other DNA
cagcaaaacgtccagcctaagaaacagg

SEQ ID NO: 10855 - DNA, 28 bp, synthetic construct
  source 1..28: mol_type = other DNA
ctgtttcttaggctggacgttttgctgg

SEQ ID NO: 10856 - DNA, 28 bp, synthetic construct
  source 1..28: mol_type = other DNA
tgtttcttaggctggacgttttgctggg

SEQ ID NO: 10857 - DNA, 28 bp, synthetic construct
  source 1..28: mol_type = other DNA
gtttcttaggctggacgttttgctgggg

SEQ ID NO: 10858 - DNA, 28 bp, synthetic construct
  source 1..28: mol_type = other DNA
tcttaggctggacgttttgctggggtgg

SEQ ID NO: 10859 - DNA, 28 bp, synthetic construct
  source 1..28: mol_type = other DNA
ctggacgttttgctggggtggagactgg

SEQ ID NO: 10860 - DNA, 28 bp, synthetic construct
  source 1..28: mol_type = other DNA
gacgttttgctggggtggagactggtgg

SEQ ID NO: 10861 - DNA, 28 bp, synthetic construct
  source 1..28: mol_type = other DNA
acgttttgctggggtggagactggtggg

SEQ ID NO: 10862 - DNA, 28 bp, synthetic construct
  source 1..28: mol_type = other DNA
ttgctggggtggagactggtgggtcagg

SEQ ID NO: 10863 - DNA, 28 bp, synthetic construct
  source 1..28: mol_type = other DNA
gggtggagactggtgggtcaggctctgg

SEQ ID NO: 10864 - DNA, 28 bp, synthetic construct
  source 1..28: mol_type = other DNA
ggtcaggctctggaactgtgacatctgg

SEQ ID NO: 10865 - DNA, 28 bp, synthetic construct
  source 1..28: mol_type = other DNA
gtcaggctctggaactgtgacatctggg

SEQ ID NO: 10866 - DNA, 28 bp, synthetic construct
  source 1..28: mol_type = other DNA
tcaggctctggaactgtgacatctgggg

SEQ ID NO: 10867 - DNA, 28 bp, synthetic construct
  source 1..28: mol_type = other DNA
caggctctggaactgtgacatctggggg

SEQ ID NO: 10868 - DNA, 28 bp, synthetic construct
  source 1..28: mol_type = other DNA
aggctctggaactgtgacatctgggggg

SEQ ID NO: 10869 - DNA, 28 bp, synthetic construct
  source 1..28: mol_type = other DNA
acatctggggggaatgtatcataagcgg

SEQ ID NO: 10870 - DNA, 28 bp, synthetic construct
  source 1..28: mol_type = other DNA
catctggggggaatgtatcataagcggg

SEQ ID NO: 10871 - DNA, 28 bp, synthetic construct
  source 1..28: mol_type = other DNA
atctggggggaatgtatcataagcgggg

SEQ ID NO: 10872 - DNA, 28 bp, synthetic construct
  source 1..28: mol_type = other DNA
tggggggaatgtatcataagcggggagg

SEQ ID NO: 10873 - DNA, 28 bp, synthetic construct
  source 1..28: mol_type = other DNA
ggggggaatgtatcataagcggggaggg

SEQ ID NO: 10874 - DNA, 28 bp, synthetic construct
  source 1..28: mol_type = other DNA
gggggaatgtatcataagcggggagggg

SEQ ID NO: 10875 - DNA, 28 bp, synthetic construct
  source 1..28: mol_type = other DNA
ggggaatgtatcataagcggggaggggg

SEQ ID NO: 10876 - DNA, 28 bp, synthetic construct
  source 1..28: mol_type = other DNA
tatcataagcggggagggggcttcgcgg

SEQ ID NO: 10877 - DNA, 28 bp, synthetic construct
  source 1..28: mol_type = other DNA
cataagcggggagggggcttcgcggagg

SEQ ID NO: 10878 - DNA, 28 bp, synthetic construct
  source 1..28: mol_type = other DNA
ggagggggcttcgcggaggtgacctagg

SEQ ID NO: 10879 - DNA, 28 bp, synthetic construct
  source 1..28: mol_type = other DNA
ggcttcgcggaggtgacctaggagaagg

SEQ ID NO: 10880 - DNA, 28 bp, synthetic construct
  source 1..28: mol_type = other DNA
gcttcgcggaggtgacctaggagaaggg

SEQ ID NO: 10881 - DNA, 28 bp, synthetic construct
  source 1..28: mol_type = other DNA
cggaggtgacctaggagaagggacaagg

SEQ ID NO: 10882 - DNA, 28 bp, synthetic construct
  source 1..28: mol_type = other DNA
tgacacattccttgtcccttctcctagg

SEQ ID NO: 10883 - DNA, 28 bp, synthetic construct
  source 1..28: mol_type = other DNA
gagtctacgggtgaggaccacttaccgg

SEQ ID NO: 10884 - DNA, 28 bp, synthetic construct
  source 1..28: mol_type = other DNA
ggtgaggaccacttaccggttgagtagg

SEQ ID NO: 10885 - DNA, 28 bp, synthetic construct
  source 1..28: mol_type = other DNA
gtgaggaccacttaccggttgagtaggg

SEQ ID NO: 10886 - DNA, 28 bp, synthetic construct
  source 1..28: mol_type = other DNA
tgaggaccacttaccggttgagtagggg

SEQ ID NO: 10887 - DNA, 28 bp, synthetic construct
  source 1..28: mol_type = other DNA
gtcggacccctactcaaccggtaagtgg

SEQ ID NO: 10888 - DNA, 28 bp, synthetic construct
  source 1..28: mol_type = other DNA
accggttgagtaggggtccgacttgtgg

SEQ ID NO: 10889 - DNA, 28 bp, synthetic construct
  source 1..28: mol_type = other DNA
accacaagtcggacccctactcaaccgg

SEQ ID NO: 10890 - DNA, 28 bp, synthetic construct
  source 1..28: mol_type = other DNA
tgagtaggggtccgacttgtggtgccgg

SEQ ID NO: 10891 - DNA, 28 bp, synthetic construct
  source 1..28: mol_type = other DNA
gagtaggggtccgacttgtggtgccggg

SEQ ID NO: 10892 - DNA, 28 bp, synthetic construct
  source 1..28: mol_type = other DNA
agtaggggtccgacttgtggtgccgggg

SEQ ID NO: 10893 - DNA, 28 bp, synthetic construct
  source 1..28: mol_type = other DNA
gtccgacttgtggtgccggggtgaatgg

SEQ ID NO: 10894 - DNA, 28 bp, synthetic construct
  source 1..28: mol_type = other DNA
caccattcaccccggcaccacaagtcgg

SEQ ID NO: 10895 - DNA, 28 bp, synthetic construct
  source 1..28: mol_type = other DNA
cgacttgtggtgccggggtgaatggtgg

SEQ ID NO: 10896 - DNA, 28 bp, synthetic construct
  source 1..28: mol_type = other DNA
gtggtgccggggtgaatggtggtgctgg

SEQ ID NO: 10897 - DNA, 28 bp, synthetic construct
  source 1..28: mol_type = other DNA
agtcatccagcaccaccattcaccccgg

SEQ ID NO: 10898 - DNA, 28 bp, synthetic construct
  source 1..28: mol_type = other DNA
aatggtggtgctggatgacttgctgagg

SEQ ID NO: 10899 - DNA, 28 bp, synthetic construct
  source 1..28: mol_type = other DNA
tggtgctggatgacttgctgaggcttgg

SEQ ID NO: 10900 - DNA, 28 bp, synthetic construct
  source 1..28: mol_type = other DNA
gctggatgacttgctgaggcttggcagg

SEQ ID NO: 10901 - DNA, 28 bp, synthetic construct
  source 1..28: mol_type = other DNA
tgacttgctgaggcttggcaggctgcgg

SEQ ID NO: 10902 - DNA, 28 bp, synthetic construct
  source 1..28: mol_type = other DNA
cttgctgaggcttggcaggctgcggcgg

SEQ ID NO: 10903 - DNA, 28 bp, synthetic construct
  source 1..28: mol_type = other DNA
ttgctgaggcttggcaggctgcggcggg

SEQ ID NO: 10904 - DNA, 28 bp, synthetic construct
  source 1..28: mol_type = other DNA
tgctgaggcttggcaggctgcggcgggg

SEQ ID NO: 10905 - DNA, 28 bp, synthetic construct
  source 1..28: mol_type = other DNA
gctgaggcttggcaggctgcggcggggg

SEQ ID NO: 10906 - DNA, 28 bp, synthetic construct
  source 1..28: mol_type = other DNA
gaggcttggcaggctgcggcgggggtgg

SEQ ID NO: 10907 - DNA, 28 bp, synthetic construct
  source 1..28: mol_type = other DNA
ggcaggctgcggcgggggtggctgctgg

SEQ ID NO: 10908 - DNA, 28 bp, synthetic construct
  source 1..28: mol_type = other DNA
gctgcggcgggggtggctgctggcctgg

SEQ ID NO: 10909 - DNA, 28 bp, synthetic construct
  source 1..28: mol_type = other DNA
ctgcggcgggggtggctgctggcctggg

SEQ ID NO: 10910 - DNA, 28 bp, synthetic construct
  source 1..28: mol_type = other DNA
tgcggcgggggtggctgctggcctgggg

SEQ ID NO: 10911 - DNA, 28 bp, synthetic construct
  source 1..28: mol_type = other DNA
gcggcgggggtggctgctggcctggggg

SEQ ID NO: 10912 - DNA, 28 bp, synthetic construct
  source 1..28: mol_type = other DNA
gcgggggtggctgctggcctgggggcgg

SEQ ID NO: 10913 - DNA, 28 bp, synthetic construct
  source 1..28: mol_type = other DNA
gggtggctgctggcctgggggcggatgg

SEQ ID NO: 10914 - DNA, 28 bp, synthetic construct
  source 1..28: mol_type = other DNA
ggtggctgctggcctgggggcggatggg

SEQ ID NO: 10915 - DNA, 28 bp, synthetic construct
  source 1..28: mol_type = other DNA
gtggctgctggcctgggggcggatgggg

SEQ ID NO: 10916 - DNA, 28 bp, synthetic construct
  source 1..28: mol_type = other DNA
tggctgctggcctgggggcggatggggg

SEQ ID NO: 10917 - DNA, 28 bp, synthetic construct
  source 1..28: mol_type = other DNA
ggctgctggcctgggggcggatgggggg

SEQ ID NO: 10918 - DNA, 28 bp, synthetic construct
  source 1..28: mol_type = other DNA
gctgctggcctgggggcggatggggggg

SEQ ID NO: 10919 - DNA, 28 bp, synthetic construct
  source 1..28: mol_type = other DNA
gcctgggggcggatgggggggctgctgg

SEQ ID NO: 10920 - DNA, 28 bp, synthetic construct
  source 1..28: mol_type = other DNA
gccagcagcccccccatccgcccccagg

SEQ ID NO: 10921 - DNA, 28 bp, synthetic construct
  source 1..28: mol_type = other DNA
gggcggatgggggggctgctggccctgg

SEQ ID NO: 10922 - DNA, 28 bp, synthetic construct
  source 1..28: mol_type = other DNA
ggcggatgggggggctgctggccctggg

SEQ ID NO: 10923 - DNA, 28 bp, synthetic construct
  source 1..28: mol_type = other DNA
gcggatgggggggctgctggccctgggg

SEQ ID NO: 10924 - DNA, 28 bp, synthetic construct
  source 1..28: mol_type = other DNA
gatgggggggctgctggccctggggtgg

SEQ ID NO: 10925 - DNA, 28 bp, synthetic construct
  source 1..28: mol_type = other DNA
gggggggctgctggccctggggtggcgg

SEQ ID NO: 10926 - DNA, 28 bp, synthetic construct
  source 1..28: mol_type = other DNA
ggggggctgctggccctggggtggcggg

SEQ ID NO: 10927 - DNA, 28 bp, synthetic construct
  source 1..28: mol_type = other DNA
gggggctgctggccctggggtggcgggg

SEQ ID NO: 10928 - DNA, 28 bp, synthetic construct
  source 1..28: mol_type = other DNA
ggggctgctggccctggggtggcggggg

SEQ ID NO: 10929 - DNA, 28 bp, synthetic construct
  source 1..28: mol_type = other DNA
ctggccctggggtggcgggggctgttgg

SEQ ID NO: 10930 - DNA, 28 bp, synthetic construct
  source 1..28: mol_type = other DNA
acatccaacagcccccgccaccccaggg

SEQ ID NO: 10931 - DNA, 28 bp, synthetic construct
  source 1..28: mol_type = other DNA
cacatccaacagcccccgccaccccagg

SEQ ID NO: 10932 - DNA, 28 bp, synthetic construct
  source 1..28: mol_type = other DNA
ctggggtggcgggggctgttggatgtgg

SEQ ID NO: 10933 - DNA, 28 bp, synthetic construct
  source 1..28: mol_type = other DNA
tggggtggcgggggctgttggatgtggg

SEQ ID NO: 10934 - DNA, 28 bp, synthetic construct
  source 1..28: mol_type = other DNA
ggtggcgggggctgttggatgtgggtgg

SEQ ID NO: 10935 - DNA, 28 bp, synthetic construct
  source 1..28: mol_type = other DNA
tgttggatgtgggtggaaaactgcatgg

SEQ ID NO: 10936 - DNA, 28 bp, synthetic construct
  source 1..28: mol_type = other DNA
gttggatgtgggtggaaaactgcatggg

SEQ ID NO: 10937 - DNA, 28 bp, synthetic construct
  source 1..28: mol_type = other DNA
gaaaactgcatgggctgcaagtgcacgg

SEQ ID NO: 10938 - DNA, 28 bp, synthetic construct
  source 1..28: mol_type = other DNA
aaaactgcatgggctgcaagtgcacggg

SEQ ID NO: 10939 - DNA, 28 bp, synthetic construct
  source 1..28: mol_type = other DNA
gcatgggctgcaagtgcacgggccgtgg

SEQ ID NO: 10940 - DNA, 28 bp, synthetic construct
  source 1..28: mol_type = other DNA
tgggctgcaagtgcacgggccgtggagg

SEQ ID NO: 10941 - DNA, 28 bp, synthetic construct
  source 1..28: mol_type = other DNA
gggctgcaagtgcacgggccgtggaggg

SEQ ID NO: 10942 - DNA, 28 bp, synthetic construct
  source 1..28: mol_type = other DNA
ggctgcaagtgcacgggccgtggagggg

SEQ ID NO: 10943 - DNA, 28 bp, synthetic construct
  source 1..28: mol_type = other DNA
gctgcaagtgcacgggccgtggaggggg

SEQ ID NO: 10944 - DNA, 28 bp, synthetic construct
  source 1..28: mol_type = other DNA
ccgtggagggggctgatgctgctgctgg

SEQ ID NO: 10945 - DNA, 28 bp, synthetic construct
  source 1..28: mol_type = other DNA
cgtggagggggctgatgctgctgctggg

SEQ ID NO: 10946 - DNA, 28 bp, synthetic construct
  source 1..28: mol_type = other DNA
gtggagggggctgatgctgctgctgggg

SEQ ID NO: 10947 - DNA, 28 bp, synthetic construct
  source 1..28: mol_type = other DNA
gagggggctgatgctgctgctggggtgg

SEQ ID NO: 10948 - DNA, 28 bp, synthetic construct
  source 1..28: mol_type = other DNA
ggggctgatgctgctgctggggtggagg

SEQ ID NO: 10949 - DNA, 28 bp, synthetic construct
  source 1..28: mol_type = other DNA
ctgatgctgctgctggggtggaggctgg

SEQ ID NO: 10950 - DNA, 28 bp, synthetic construct
  source 1..28: mol_type = other DNA
tgatgctgctgctggggtggaggctggg

SEQ ID NO: 10951 - DNA, 28 bp, synthetic construct
  source 1..28: mol_type = other DNA
gatgctgctgctggggtggaggctgggg

SEQ ID NO: 10952 - DNA, 28 bp, synthetic construct
  source 1..28: mol_type = other DNA
ctgctgctggggtggaggctggggctgg

SEQ ID NO: 10953 - DNA, 28 bp, synthetic construct
  source 1..28: mol_type = other DNA
tgctgctggggtggaggctggggctggg

SEQ ID NO: 10954 - DNA, 28 bp, synthetic construct
  source 1..28: mol_type = other DNA
gctgctggggtggaggctggggctgggg

SEQ ID NO: 10955 - DNA, 28 bp, synthetic construct
  source 1..28: mol_type = other DNA
gctggggtggaggctggggctggggtgg

SEQ ID NO: 10956 - DNA, 28 bp, synthetic construct
  source 1..28: mol_type = other DNA
ggggtggaggctggggctggggtggtgg

SEQ ID NO: 10957 - DNA, 28 bp, synthetic construct
  source 1..28: mol_type = other DNA
gggtggaggctggggctggggtggtggg

SEQ ID NO: 10958 - DNA, 28 bp, synthetic construct
  source 1..28: mol_type = other DNA
ggtggaggctggggctggggtggtgggg

SEQ ID NO: 10959 - DNA, 28 bp, synthetic construct
  source 1..28: mol_type = other DNA
gtggaggctggggctggggtggtggggg

SEQ ID NO: 10960 - DNA, 28 bp, synthetic construct
  source 1..28: mol_type = other DNA
gaggctggggctggggtggtgggggtgg

SEQ ID NO: 10961 - DNA, 28 bp, synthetic construct
  source 1..28: mol_type = other DNA
gctggggctggggtggtgggggtggtgg

SEQ ID NO: 10962 - DNA, 28 bp, synthetic construct
  source 1..28: mol_type = other DNA
ggggctggggtggtgggggtggtggcgg

SEQ ID NO: 10963 - DNA, 28 bp, synthetic construct
  source 1..28: mol_type = other DNA
tgctgctgcagctgctgctgcacagagg

SEQ ID NO: 10964 - DNA, 28 bp, synthetic construct
  source 1..28: mol_type = other DNA
gctgctgcagctgctgctgcacagaggg

SEQ ID NO: 10965 - DNA, 28 bp, synthetic construct
  source 1..28: mol_type = other DNA
ctgctgcagctgctgctgcacagagggg

SEQ ID NO: 10966 - DNA, 28 bp, synthetic construct
  source 1..28: mol_type = other DNA
ctgcagctgctgctgcacagaggggtgg

SEQ ID NO: 10967 - DNA, 28 bp, synthetic construct
  source 1..28: mol_type = other DNA
tgcagctgctgctgcacagaggggtggg

SEQ ID NO: 10968 - DNA, 28 bp, synthetic construct
  source 1..28: mol_type = other DNA
gcagctgctgctgcacagaggggtgggg

SEQ ID NO: 10969 - DNA, 28 bp, synthetic construct
  source 1..28: mol_type = other DNA
gctgctgctgcacagaggggtggggtgg

SEQ ID NO: 10970 - DNA, 28 bp, synthetic construct
  source 1..28: mol_type = other DNA
ctgctgctgcacagaggggtggggtggg

SEQ ID NO: 10971 - DNA, 28 bp, synthetic construct
  source 1..28: mol_type = other DNA
tgctgctgcacagaggggtggggtgggg

SEQ ID NO: 10972 - DNA, 28 bp, synthetic construct
  source 1..28: mol_type = other DNA
gctgctgcacagaggggtggggtggggg

SEQ ID NO: 10973 - DNA, 28 bp, synthetic construct
  source 1..28: mol_type = other DNA
gctgcacagaggggtggggtgggggcgg

SEQ ID NO: 10974 - DNA, 28 bp, synthetic construct
  source 1..28: mol_type = other DNA
cacagaggggtggggtgggggcggcagg

SEQ ID NO: 10975 - DNA, 28 bp, synthetic construct
  source 1..28: mol_type = other DNA
acagaggggtggggtgggggcggcaggg

SEQ ID NO: 10976 - DNA, 28 bp, synthetic construct
  source 1..28: mol_type = other DNA
cagaggggtggggtgggggcggcagggg

SEQ ID NO: 10977 - DNA, 28 bp, synthetic construct
  source 1..28: mol_type = other DNA
agaggggtggggtgggggcggcaggggg

SEQ ID NO: 10978 - DNA, 28 bp, synthetic construct
  source 1..28: mol_type = other DNA
gaggggtggggtgggggcggcagggggg

SEQ ID NO: 10979 - DNA, 28 bp, synthetic construct
  source 1..28: mol_type = other DNA
aggggtggggtgggggcggcaggggggg

SEQ ID NO: 10980 - DNA, 28 bp, synthetic construct
  source 1..28: mol_type = other DNA
ggtggggtgggggcggcagggggggtgg

SEQ ID NO: 10981 - DNA, 28 bp, synthetic construct
  source 1..28: mol_type = other DNA
gtggggtgggggcggcagggggggtggg

SEQ ID NO: 10982 - DNA, 28 bp, synthetic construct
  source 1..28: mol_type = other DNA
tggggtgggggcggcagggggggtgggg

SEQ ID NO: 10983 - DNA, 28 bp, synthetic construct
  source 1..28: mol_type = other DNA
ggggtgggggcggcagggggggtggggg

SEQ ID NO: 10984 - DNA, 28 bp, synthetic construct
  source 1..28: mol_type = other DNA
tgggggcggcagggggggtgggggctgg

SEQ ID NO: 10985 - DNA, 28 bp, synthetic construct
  source 1..28: mol_type = other DNA
gggggcggcagggggggtgggggctggg

SEQ ID NO: 10986 - DNA, 28 bp, synthetic construct
  source 1..28: mol_type = other DNA
ggtgggggctgggactgcaccttcacgg

SEQ ID NO: 10987 - DNA, 28 bp, synthetic construct
  source 1..28: mol_type = other DNA
ggggctgggactgcaccttcacggaagg

SEQ ID NO: 10988 - DNA, 28 bp, synthetic construct
  source 1..28: mol_type = other DNA
gggctgggactgcaccttcacggaaggg

SEQ ID NO: 10989 - DNA, 28 bp, synthetic construct
  source 1..28: mol_type = other DNA
actgcaccttcacggaagggagtagcgg

SEQ ID NO: 10990 - DNA, 28 bp, synthetic construct
  source 1..28: mol_type = other DNA
ccttcacggaagggagtagcggcgtagg

SEQ ID NO: 10991 - DNA, 28 bp, synthetic construct
  source 1..28: mol_type = other DNA
cttcacggaagggagtagcggcgtaggg

SEQ ID NO: 10992 - DNA, 28 bp, synthetic construct
  source 1..28: mol_type = other DNA
ttcacggaagggagtagcggcgtagggg

SEQ ID NO: 10993 - DNA, 28 bp, synthetic construct
  source 1..28: mol_type = other DNA
tcacggaagggagtagcggcgtaggggg

SEQ ID NO: 10994 - DNA, 28 bp, synthetic construct
  source 1..28: mol_type = other DNA
gggctgcaccttctgcagctgctgcagg

SEQ ID NO: 10995 - DNA, 28 bp, synthetic construct
  source 1..28: mol_type = other DNA
cagctgtacctgcagcagctgcagaagg

SEQ ID NO: 10996 - DNA, 28 bp, synthetic construct
  source 1..28: mol_type = other DNA
tgctgcaggtacagctgcatctgcatgg

SEQ ID NO: 10997 - DNA, 28 bp, synthetic construct
  source 1..28: mol_type = other DNA
tgcaggtacagctgcatctgcatggagg

SEQ ID NO: 10998 - DNA, 28 bp, synthetic construct
  source 1..28: mol_type = other DNA
gtacagctgcatctgcatggaggtgagg

SEQ ID NO: 10999 - DNA, 28 bp, synthetic construct
  source 1..28: mol_type = other DNA
tacagctgcatctgcatggaggtgaggg

SEQ ID NO: 11000 - DNA, 28 bp, synthetic construct
  source 1..28: mol_type = other DNA
acagctgcatctgcatggaggtgagggg

SEQ ID NO: 11001 - DNA, 28 bp, synthetic construct
  source 1..28: mol_type = other DNA
gctgcatctgcatggaggtgaggggtgg

SEQ ID NO: 11002 - DNA, 28 bp, synthetic construct
  source 1..28: mol_type = other DNA
ctgcatctgcatggaggtgaggggtggg

SEQ ID NO: 11003 - DNA, 28 bp, synthetic construct
  source 1..28: mol_type = other DNA
tgcatctgcatggaggtgaggggtgggg

SEQ ID NO: 11004 - DNA, 28 bp, synthetic construct
  source 1..28: mol_type = other DNA
tctgcatggaggtgaggggtggggcagg

SEQ ID NO: 11005 - DNA, 28 bp, synthetic construct
  source 1..28: mol_type = other DNA
gcatggaggtgaggggtggggcaggtgg

SEQ ID NO: 11006 - DNA, 28 bp, synthetic construct
  source 1..28: mol_type = other DNA
tggctcttcatcctccagcagcacttgg

SEQ ID NO: 11007 - DNA, 28 bp, synthetic construct
  source 1..28: mol_type = other DNA
ggctcttcatcctccagcagcacttggg

SEQ ID NO: 11008 - DNA, 28 bp, synthetic construct
  source 1..28: mol_type = other DNA
gctcttcatcctccagcagcacttgggg

SEQ ID NO: 11009 - DNA, 28 bp, synthetic construct
  source 1..28: mol_type = other DNA
ctcttcatcctccagcagcacttggggg

SEQ ID NO: 11010 - DNA, 28 bp, synthetic construct
  source 1..28: mol_type = other DNA
tcttcatcctccagcagcacttgggggg

SEQ ID NO: 11011 - DNA, 28 bp, synthetic construct
  source 1..28: mol_type = other DNA
cttcatcctccagcagcacttggggggg

SEQ ID NO: 11012 - DNA, 28 bp, synthetic construct
  source 1..28: mol_type = other DNA
atcctccagcagcacttgggggggttgg

SEQ ID NO: 11013 - DNA, 28 bp, synthetic construct
  source 1..28: mol_type = other DNA
tcctccagcagcacttgggggggttggg

SEQ ID NO: 11014 - DNA, 28 bp, synthetic construct
  source 1..28: mol_type = other DNA
gcccaacccccccaagtgctgctggagg

SEQ ID NO: 11015 - DNA, 28 bp, synthetic construct
  source 1..28: mol_type = other DNA
atggcccaacccccccaagtgctgctgg

SEQ ID NO: 11016 - DNA, 28 bp, synthetic construct
  source 1..28: mol_type = other DNA
agcagcacttgggggggttgggccatgg

SEQ ID NO: 11017 - DNA, 28 bp, synthetic construct
  source 1..28: mol_type = other DNA
gcagcacttgggggggttgggccatggg

SEQ ID NO: 11018 - DNA, 28 bp, synthetic construct
  source 1..28: mol_type = other DNA
cagcacttgggggggttgggccatgggg

SEQ ID NO: 11019 - DNA, 28 bp, synthetic construct
  source 1..28: mol_type = other DNA
agcacttgggggggttgggccatggggg

SEQ ID NO: 11020 - DNA, 28 bp, synthetic construct
  source 1..28: mol_type = other DNA
gcacttgggggggttgggccatgggggg

SEQ ID NO: 11021 - DNA, 28 bp, synthetic construct
  source 1..28: mol_type = other DNA
gggggggttgggccatggggggctgtgg

SEQ ID NO: 11022 - DNA, 28 bp, synthetic construct
  source 1..28: mol_type = other DNA
ggggggttgggccatggggggctgtggg

SEQ ID NO: 11023 - DNA, 28 bp, synthetic construct
  source 1..28: mol_type = other DNA
ttgggccatggggggctgtgggagcagg

SEQ ID NO: 11024 - DNA, 28 bp, synthetic construct
  source 1..28: mol_type = other DNA
tgggccatggggggctgtgggagcaggg

SEQ ID NO: 11025 - DNA, 28 bp, synthetic construct
  source 1..28: mol_type = other DNA
gggccatggggggctgtgggagcagggg

SEQ ID NO: 11026 - DNA, 28 bp, synthetic construct
  source 1..28: mol_type = other DNA
acacccctgctcccacagccccccatgg

SEQ ID NO: 11027 - DNA, 28 bp, synthetic construct
  source 1..28: mol_type = other DNA
ggggggctgtgggagcaggggtgtttgg

SEQ ID NO: 11028 - DNA, 28 bp, synthetic construct
  source 1..28: mol_type = other DNA
gggggctgtgggagcaggggtgtttggg

SEQ ID NO: 11029 - DNA, 28 bp, synthetic construct
  source 1..28: mol_type = other DNA
tgtgggagcaggggtgtttgggtcaagg

SEQ ID NO: 11030 - DNA, 28 bp, synthetic construct
  source 1..28: mol_type = other DNA
ggagcaggggtgtttgggtcaaggctgg

SEQ ID NO: 11031 - DNA, 28 bp, synthetic construct
  source 1..28: mol_type = other DNA
ggtgtttgggtcaaggctggtgacacgg

SEQ ID NO: 11032 - DNA, 28 bp, synthetic construct
  source 1..28: mol_type = other DNA
tttgggtcaaggctggtgacacggctgg

SEQ ID NO: 11033 - DNA, 28 bp, synthetic construct
  source 1..28: mol_type = other DNA
ttgggtcaaggctggtgacacggctggg

SEQ ID NO: 11034 - DNA, 28 bp, synthetic construct
  source 1..28: mol_type = other DNA
tgggtcaaggctggtgacacggctgggg

SEQ ID NO: 11035 - DNA, 28 bp, synthetic construct
  source 1..28: mol_type = other DNA
gggtcaaggctggtgacacggctggggg

SEQ ID NO: 11036 - DNA, 28 bp, synthetic construct
  source 1..28: mol_type = other DNA
caaggctggtgacacggctgggggccgg

SEQ ID NO: 11037 - DNA, 28 bp, synthetic construct
  source 1..28: mol_type = other DNA
aaggctggtgacacggctgggggccggg

SEQ ID NO: 11038 - DNA, 28 bp, synthetic construct
  source 1..28: mol_type = other DNA
gctggtgacacggctgggggccgggcgg

SEQ ID NO: 11039 - DNA, 28 bp, synthetic construct
  source 1..28: mol_type = other DNA
ctggtgacacggctgggggccgggcggg

SEQ ID NO: 11040 - DNA, 28 bp, synthetic construct
  source 1..28: mol_type = other DNA
gacacggctgggggccgggcgggcttgg

SEQ ID NO: 11041 - DNA, 28 bp, synthetic construct
  source 1..28: mol_type = other DNA
acacggctgggggccgggcgggcttggg

SEQ ID NO: 11042 - DNA, 28 bp, synthetic construct
  source 1..28: mol_type = other DNA
cggctgggggccgggcgggcttgggagg

SEQ ID NO: 11043 - DNA, 28 bp, synthetic construct
  source 1..28: mol_type = other DNA
tgggggccgggcgggcttgggaggcagg

SEQ ID NO: 11044 - DNA, 28 bp, synthetic construct
  source 1..28: mol_type = other DNA
gggggccgggcgggcttgggaggcaggg

SEQ ID NO: 11045 - DNA, 28 bp, synthetic construct
  source 1..28: mol_type = other DNA
cgctgccctgcctcccaagcccgcccgg

SEQ ID NO: 11046 - DNA, 28 bp, synthetic construct
  source 1..28: mol_type = other DNA
cgggcgggcttgggaggcagggcagcgg

SEQ ID NO: 11047 - DNA, 28 bp, synthetic construct
  source 1..28: mol_type = other DNA
gggcttgggaggcagggcagcggctcgg

SEQ ID NO: 11048 - DNA, 28 bp, synthetic construct
  source 1..28: mol_type = other DNA
ggaggcagggcagcggctcggttgctgg

SEQ ID NO: 11049 - DNA, 28 bp, synthetic construct
  source 1..28: mol_type = other DNA
gaggcagggcagcggctcggttgctggg

SEQ ID NO: 11050 - DNA, 28 bp, synthetic construct
  source 1..28: mol_type = other DNA
cagcggctcggttgctgggccgtgatgg

SEQ ID NO: 11051 - DNA, 28 bp, synthetic construct
  source 1..28: mol_type = other DNA
tcggttgctgggccgtgatggctgctgg

SEQ ID NO: 11052 - DNA, 28 bp, synthetic construct
  source 1..28: mol_type = other DNA
cggttgctgggccgtgatggctgctggg

SEQ ID NO: 11053 - DNA, 28 bp, synthetic construct
  source 1..28: mol_type = other DNA
ggttgctgggccgtgatggctgctgggg

SEQ ID NO: 11054 - DNA, 28 bp, synthetic construct
  source 1..28: mol_type = other DNA
caacgcactaccccagcagccatcacgg

SEQ ID NO: 11055 - DNA, 28 bp, synthetic construct
  source 1..28: mol_type = other DNA
gctggggtagtgcgttgtgcaaagctgg

SEQ ID NO: 11056 - DNA, 28 bp, synthetic construct
  source 1..28: mol_type = other DNA
gcaaagctggaagaacacaacaccgagg

SEQ ID NO: 11057 - DNA, 28 bp, synthetic construct
  source 1..28: mol_type = other DNA
aagctggaagaacacaacaccgaggcgg

SEQ ID NO: 11058 - DNA, 28 bp, synthetic construct
  source 1..28: mol_type = other DNA
ggtgagccgtggcctgccccagtgtggg

SEQ ID NO: 11059 - DNA, 28 bp, synthetic construct
  source 1..28: mol_type = other DNA
aggtgagccgtggcctgccccagtgtgg

SEQ ID NO: 11060 - DNA, 28 bp, synthetic construct
  source 1..28: mol_type = other DNA
acactggggcaggccacggctcacctgg

SEQ ID NO: 11061 - DNA, 28 bp, synthetic construct
  source 1..28: mol_type = other DNA
ctggggcaggccacggctcacctggagg

SEQ ID NO: 11062 - DNA, 28 bp, synthetic construct
  source 1..28: mol_type = other DNA
agtggtctctcctccaggtgagccgtgg

SEQ ID NO: 11063 - DNA, 28 bp, synthetic construct
  source 1..28: mol_type = other DNA
acctggaggagagaccactgcgtgctgg

SEQ ID NO: 11064 - DNA, 28 bp, synthetic construct
  source 1..28: mol_type = other DNA
accagcacgcagtggtctctcctccagg

SEQ ID NO: 11065 - DNA, 28 bp, synthetic construct
  source 1..28: mol_type = other DNA
agagaccactgcgtgctggttgagatgg

SEQ ID NO: 11066 - DNA, 28 bp, synthetic construct
  source 1..28: mol_type = other DNA
gagaccactgcgtgctggttgagatggg

SEQ ID NO: 11067 - DNA, 28 bp, synthetic construct
  source 1..28: mol_type = other DNA
agaccactgcgtgctggttgagatgggg

SEQ ID NO: 11068 - DNA, 28 bp, synthetic construct
  source 1..28: mol_type = other DNA
ccactgcgtgctggttgagatggggtgg

SEQ ID NO: 11069 - DNA, 28 bp, synthetic construct
  source 1..28: mol_type = other DNA
tgagatggggtggagtgctgtgctcagg

SEQ ID NO: 11070 - DNA, 28 bp, synthetic construct
  source 1..28: mol_type = other DNA
gatggggtggagtgctgtgctcaggcgg

SEQ ID NO: 11071 - DNA, 28 bp, synthetic construct
  source 1..28: mol_type = other DNA
gggtggagtgctgtgctcaggcggctgg

SEQ ID NO: 11072 - DNA, 28 bp, synthetic construct
  source 1..28: mol_type = other DNA
ggtggagtgctgtgctcaggcggctggg

SEQ ID NO: 11073 - DNA, 28 bp, synthetic construct
  source 1..28: mol_type = other DNA
gtggagtgctgtgctcaggcggctgggg

SEQ ID NO: 11074 - DNA, 28 bp, synthetic construct
  source 1..28: mol_type = other DNA
agtgctgtgctcaggcggctggggcagg

SEQ ID NO: 11075 - DNA, 28 bp, synthetic construct
  source 1..28: mol_type = other DNA
tgtgctcaggcggctggggcaggtgagg

SEQ ID NO: 11076 - DNA, 28 bp, synthetic construct
  source 1..28: mol_type = other DNA
gtgctcaggcggctggggcaggtgaggg

SEQ ID NO: 11077 - DNA, 28 bp, synthetic construct
  source 1..28: mol_type = other DNA
tgctcaggcggctggggcaggtgagggg

SEQ ID NO: 11078 - DNA, 28 bp, synthetic construct
  source 1..28: mol_type = other DNA
gctcaggcggctggggcaggtgaggggg

SEQ ID NO: 11079 - DNA, 28 bp, synthetic construct
  source 1..28: mol_type = other DNA
gctggggcaggtgagggggcagctcagg

SEQ ID NO: 11080 - DNA, 28 bp, synthetic construct
  source 1..28: mol_type = other DNA
gcaggtgagggggcagctcaggctgcgg

SEQ ID NO: 11081 - DNA, 28 bp, synthetic construct
  source 1..28: mol_type = other DNA
gtgagggggcagctcaggctgcggcagg

SEQ ID NO: 11082 - DNA, 28 bp, synthetic construct
  source 1..28: mol_type = other DNA
gggcagctcaggctgcggcaggtgcagg

SEQ ID NO: 11083 - DNA, 28 bp, synthetic construct
  source 1..28: mol_type = other DNA
agctcaggctgcggcaggtgcaggatgg

SEQ ID NO: 11084 - DNA, 28 bp, synthetic construct
  source 1..28: mol_type = other DNA
gctcaggctgcggcaggtgcaggatggg

SEQ ID NO: 11085 - DNA, 28 bp, synthetic construct
  source 1..28: mol_type = other DNA
aggctgcggcaggtgcaggatgggctgg

SEQ ID NO: 11086 - DNA, 28 bp, synthetic construct
  source 1..28: mol_type = other DNA
ggctgcggcaggtgcaggatgggctggg

SEQ ID NO: 11087 - DNA, 28 bp, synthetic construct
  source 1..28: mol_type = other DNA
caggtgcaggatgggctgggtgaagtgg

SEQ ID NO: 11088 - DNA, 28 bp, synthetic construct
  source 1..28: mol_type = other DNA
aggatgggctgggtgaagtggccgatgg

SEQ ID NO: 11089 - DNA, 28 bp, synthetic construct
  source 1..28: mol_type = other DNA
ggatgggctgggtgaagtggccgatggg

SEQ ID NO: 11090 - DNA, 28 bp, synthetic construct
  source 1..28: mol_type = other DNA
gatgggctgggtgaagtggccgatgggg

SEQ ID NO: 11091 - DNA, 28 bp, synthetic construct
  source 1..28: mol_type = other DNA
ggccgatggggtcaaagacgctgcctgg

SEQ ID NO: 11092 - DNA, 28 bp, synthetic construct
  source 1..28: mol_type = other DNA
gccgatggggtcaaagacgctgcctggg

SEQ ID NO: 11093 - DNA, 28 bp, synthetic construct
  source 1..28: mol_type = other DNA
tcccaggcagcgtctttgaccccatcgg

SEQ ID NO: 11094 - DNA, 28 bp, synthetic construct
  source 1..28: mol_type = other DNA
ggggtcaaagacgctgcctgggagctgg

SEQ ID NO: 11095 - DNA, 28 bp, synthetic construct
  source 1..28: mol_type = other DNA
gggtcaaagacgctgcctgggagctggg

SEQ ID NO: 11096 - DNA, 28 bp, synthetic construct
  source 1..28: mol_type = other DNA
ggtcaaagacgctgcctgggagctgggg

SEQ ID NO: 11097 - DNA, 28 bp, synthetic construct
  source 1..28: mol_type = other DNA
gacgctgcctgggagctggggctccagg

SEQ ID NO: 11098 - DNA, 28 bp, synthetic construct
  source 1..28: mol_type = other DNA
ctgcctgggagctggggctccaggacgg

SEQ ID NO: 11099 - DNA, 28 bp, synthetic construct
  source 1..28: mol_type = other DNA
tgcctgggagctggggctccaggacggg

SEQ ID NO: 11100 - DNA, 28 bp, synthetic construct
  source 1..28: mol_type = other DNA
tgcccgtcctggagccccagctcccagg

SEQ ID NO: 11101 - DNA, 28 bp, synthetic construct
  source 1..28: mol_type = other DNA
gagctggggctccaggacgggcacctgg

SEQ ID NO: 11102 - DNA, 28 bp, synthetic construct
  source 1..28: mol_type = other DNA
agctggggctccaggacgggcacctggg

SEQ ID NO: 11103 - DNA, 28 bp, synthetic construct
  source 1..28: mol_type = other DNA
tggggctccaggacgggcacctgggtgg

SEQ ID NO: 11104 - DNA, 28 bp, synthetic construct
  source 1..28: mol_type = other DNA
ttcattgccacccaggtgcccgtcctgg

SEQ ID NO: 11105 - DNA, 28 bp, synthetic construct
  source 1..28: mol_type = other DNA
aggacgggcacctgggtggcaatgaagg

SEQ ID NO: 11106 - DNA, 28 bp, synthetic construct
  source 1..28: mol_type = other DNA
ggacgggcacctgggtggcaatgaaggg

SEQ ID NO: 11107 - DNA, 28 bp, synthetic construct
  source 1..28: mol_type = other DNA
cgggcacctgggtggcaatgaagggtgg

SEQ ID NO: 11108 - DNA, 28 bp, synthetic construct
  source 1..28: mol_type = other DNA
gggcacctgggtggcaatgaagggtggg

SEQ ID NO: 11109 - DNA, 28 bp, synthetic construct
  source 1..28: mol_type = other DNA
ggcacctgggtggcaatgaagggtgggg

SEQ ID NO: 11110 - DNA, 28 bp, synthetic construct
  source 1..28: mol_type = other DNA
gcacctgggtggcaatgaagggtggggg

SEQ ID NO: 11111 - DNA, 28 bp, synthetic construct
  source 1..28: mol_type = other DNA
tcgcccccacccttcattgccacccagg

SEQ ID NO: 11112 - DNA, 28 bp, synthetic construct
  source 1..28: mol_type = other DNA
tgggtggcaatgaagggtgggggcgagg

SEQ ID NO: 11113 - DNA, 28 bp, synthetic construct
  source 1..28: mol_type = other DNA
agggtgggggcgaggacttcatcgccgg

SEQ ID NO: 11114 - DNA, 28 bp, synthetic construct
  source 1..28: mol_type = other DNA
gggtgggggcgaggacttcatcgccggg

SEQ ID NO: 11115 - DNA, 28 bp, synthetic construct
  source 1..28: mol_type = other DNA
ggtgggggcgaggacttcatcgccgggg

SEQ ID NO: 11116 - DNA, 28 bp, synthetic construct
  source 1..28: mol_type = other DNA
acttcatcgccggggctgcctgctgcgg

SEQ ID NO: 11117 - DNA, 28 bp, synthetic construct
  source 1..28: mol_type = other DNA
atcgccggggctgcctgctgcggcatgg

SEQ ID NO: 11118 - DNA, 28 bp, synthetic construct
  source 1..28: mol_type = other DNA
gccggggctgcctgctgcggcatggagg

SEQ ID NO: 11119 - DNA, 28 bp, synthetic construct
  source 1..28: mol_type = other DNA
ccggggctgcctgctgcggcatggaggg

SEQ ID NO: 11120 - DNA, 28 bp, synthetic construct
  source 1..28: mol_type = other DNA
gggctgcctgctgcggcatggagggtgg

SEQ ID NO: 11121 - DNA, 28 bp, synthetic construct
  source 1..28: mol_type = other DNA
ggctgcctgctgcggcatggagggtggg

SEQ ID NO: 11122 - DNA, 28 bp, synthetic construct
  source 1..28: mol_type = other DNA
gctgcctgctgcggcatggagggtgggg

SEQ ID NO: 11123 - DNA, 28 bp, synthetic construct
  source 1..28: mol_type = other DNA
ctgcctgctgcggcatggagggtggggg

SEQ ID NO: 11124 - DNA, 28 bp, synthetic construct
  source 1..28: mol_type = other DNA
cctgctgcggcatggagggtgggggagg

SEQ ID NO: 11125 - DNA, 28 bp, synthetic construct
  source 1..28: mol_type = other DNA
gctgcggcatggagggtgggggaggcgg

SEQ ID NO: 11126 - DNA, 28 bp, synthetic construct
  source 1..28: mol_type = other DNA
ctgcggcatggagggtgggggaggcggg

SEQ ID NO: 11127 - DNA, 28 bp, synthetic construct
  source 1..28: mol_type = other DNA
tgcggcatggagggtgggggaggcgggg

SEQ ID NO: 11128 - DNA, 28 bp, synthetic construct
  source 1..28: mol_type = other DNA
gcggcatggagggtgggggaggcggggg

SEQ ID NO: 11129 - DNA, 28 bp, synthetic construct
  source 1..28: mol_type = other DNA
gcatggagggtgggggaggcgggggtgg

SEQ ID NO: 11130 - DNA, 28 bp, synthetic construct
  source 1..28: mol_type = other DNA
tggagggtgggggaggcgggggtggcgg

SEQ ID NO: 11131 - DNA, 28 bp, synthetic construct
  source 1..28: mol_type = other DNA
ggggtggcggctgctgttgctgctgcgg

SEQ ID NO: 11132 - DNA, 28 bp, synthetic construct
  source 1..28: mol_type = other DNA
gtggcggctgctgttgctgctgcggagg

SEQ ID NO: 11133 - DNA, 28 bp, synthetic construct
  source 1..28: mol_type = other DNA
gcggctgctgttgctgctgcggaggtgg

SEQ ID NO: 11134 - DNA, 28 bp, synthetic construct
  source 1..28: mol_type = other DNA
gctgctgttgctgctgcggaggtggagg

SEQ ID NO: 11135 - DNA, 28 bp, synthetic construct
  source 1..28: mol_type = other DNA
gctgttgctgctgcggaggtggaggcgg

SEQ ID NO: 11136 - DNA, 28 bp, synthetic construct
  source 1..28: mol_type = other DNA
gttgctgctgcggaggtggaggcggtgg

SEQ ID NO: 11137 - DNA, 28 bp, synthetic construct
  source 1..28: mol_type = other DNA
ttgctgctgcggaggtggaggcggtggg

SEQ ID NO: 11138 - DNA, 28 bp, synthetic construct
  source 1..28: mol_type = other DNA
tgctgctgcggaggtggaggcggtgggg

SEQ ID NO: 11139 - DNA, 28 bp, synthetic construct
  source 1..28: mol_type = other DNA
gctgctgcggaggtggaggcggtggggg

SEQ ID NO: 11140 - DNA, 28 bp, synthetic construct
  source 1..28: mol_type = other DNA
cggaggtggaggcggtgggggctgctgg

SEQ ID NO: 11141 - DNA, 28 bp, synthetic construct
  source 1..28: mol_type = other DNA
ggaggtggaggcggtgggggctgctggg

SEQ ID NO: 11142 - DNA, 28 bp, synthetic construct
  source 1..28: mol_type = other DNA
gaggtggaggcggtgggggctgctgggg

SEQ ID NO: 11143 - DNA, 28 bp, synthetic construct
  source 1..28: mol_type = other DNA
gtggaggcggtgggggctgctggggagg

SEQ ID NO: 11144 - DNA, 28 bp, synthetic construct
  source 1..28: mol_type = other DNA
gaggcggtgggggctgctggggaggcgg

SEQ ID NO: 11145 - DNA, 28 bp, synthetic construct
  source 1..28: mol_type = other DNA
aggcggtgggggctgctggggaggcggg

SEQ ID NO: 11146 - DNA, 28 bp, synthetic construct
  source 1..28: mol_type = other DNA
ggcggtgggggctgctggggaggcgggg

SEQ ID NO: 11147 - DNA, 28 bp, synthetic construct
  source 1..28: mol_type = other DNA
gcggtgggggctgctggggaggcggggg

SEQ ID NO: 11148 - DNA, 28 bp, synthetic construct
  source 1..28: mol_type = other DNA
gtgggggctgctggggaggcgggggcgg

SEQ ID NO: 11149 - DNA, 28 bp, synthetic construct
  source 1..28: mol_type = other DNA
ctgctggggaggcgggggcggctgctgg

SEQ ID NO: 11150 - DNA, 28 bp, synthetic construct
  source 1..28: mol_type = other DNA
tgctggggaggcgggggcggctgctggg

SEQ ID NO: 11151 - DNA, 28 bp, synthetic construct
  source 1..28: mol_type = other DNA
gctggggaggcgggggcggctgctgggg

SEQ ID NO: 11152 - DNA, 28 bp, synthetic construct
  source 1..28: mol_type = other DNA
gaggcgggggcggctgctggggcacagg

SEQ ID NO: 11153 - DNA, 28 bp, synthetic construct
  source 1..28: mol_type = other DNA
ggggcggctgctggggcacaggagccgg

SEQ ID NO: 11154 - DNA, 28 bp, synthetic construct
  source 1..28: mol_type = other DNA
gggcggctgctggggcacaggagccggg

SEQ ID NO: 11155 - DNA, 28 bp, synthetic construct
  source 1..28: mol_type = other DNA
ggcggctgctggggcacaggagccgggg

SEQ ID NO: 11156 - DNA, 28 bp, synthetic construct
  source 1..28: mol_type = other DNA
agccggggcctgctgcatctgctgatgg

SEQ ID NO: 11157 - DNA, 28 bp, synthetic construct
  source 1..28: mol_type = other DNA
caccatcagcagatgcagcaggccccgg

SEQ ID NO: 11158 - DNA, 28 bp, synthetic construct
  source 1..28: mol_type = other DNA
cggggcctgctgcatctgctgatggtgg

SEQ ID NO: 11159 - DNA, 28 bp, synthetic construct
  source 1..28: mol_type = other DNA
catcaccaccatcagcagatgcagcagg

SEQ ID NO: 11160 - DNA, 28 bp, synthetic construct
  source 1..28: mol_type = other DNA
ctgcatctgctgatggtggtgatgatgg

SEQ ID NO: 11161 - DNA, 28 bp, synthetic construct
  source 1..28: mol_type = other DNA
agcagaagaaggtacatgggctcagggg

SEQ ID NO: 11162 - DNA, 28 bp, synthetic construct
  source 1..28: mol_type = other DNA
gagcagaagaaggtacatgggctcaggg

SEQ ID NO: 11163 - DNA, 28 bp, synthetic construct
  source 1..28: mol_type = other DNA
ggagcagaagaaggtacatgggctcagg

SEQ ID NO: 11164 - DNA, 28 bp, synthetic construct
  source 1..28: mol_type = other DNA
cgggagggagcagaagaaggtacatggg

SEQ ID NO: 11165 - DNA, 28 bp, synthetic construct
  source 1..28: mol_type = other DNA
ccatgtaccttcttctgctccctcccgg

SEQ ID NO: 11166 - DNA, 28 bp, synthetic construct
  source 1..28: mol_type = other DNA
catgtaccttcttctgctccctcccggg

SEQ ID NO: 11167 - DNA, 28 bp, synthetic construct
  source 1..28: mol_type = other DNA
atgtaccttcttctgctccctcccgggg

SEQ ID NO: 11168 - DNA, 28 bp, synthetic construct
  source 1..28: mol_type = other DNA
gggcaccccgggagggagcagaagaagg

SEQ ID NO: 11169 - DNA, 28 bp, synthetic construct
  source 1..28: mol_type = other DNA
tcaaaaaagaaggggcaccccgggaggg

SEQ ID NO: 11170 - DNA, 28 bp, synthetic construct
  source 1..28: mol_type = other DNA
gtcaaaaaagaaggggcaccccgggagg

SEQ ID NO: 11171 - DNA, 28 bp, synthetic construct
  source 1..28: mol_type = other DNA
gaagtcaaaaaagaaggggcaccccggg

SEQ ID NO: 11172 - DNA, 28 bp, synthetic construct
  source 1..28: mol_type = other DNA
cgaagtcaaaaaagaaggggcaccccgg

SEQ ID NO: 11173 - DNA, 28 bp, synthetic construct
  source 1..28: mol_type = other DNA
cggggtgccccttcttttttgacttcgg

SEQ ID NO: 11174 - DNA, 28 bp, synthetic construct
  source 1..28: mol_type = other DNA
gatggctccgaagtcaaaaaagaagggg

SEQ ID NO: 11175 - DNA, 28 bp, synthetic construct
  source 1..28: mol_type = other DNA
agatggctccgaagtcaaaaaagaaggg

SEQ ID NO: 11176 - DNA, 28 bp, synthetic construct
  source 1..28: mol_type = other DNA
gagatggctccgaagtcaaaaaagaagg

SEQ ID NO: 11177 - DNA, 28 bp, synthetic construct
  source 1..28: mol_type = other DNA
tttgacttcggagccatctctgcagagg

SEQ ID NO: 11178 - DNA, 28 bp, synthetic construct
  source 1..28: mol_type = other DNA
agccatctctgcagaggaaaagagaagg

SEQ ID NO: 11179 - DNA, 28 bp, synthetic construct
  source 1..28: mol_type = other DNA
taccttctcttttcctctgcagagatgg

SEQ ID NO: 11180 - DNA, 28 bp, synthetic construct
  source 1..28: mol_type = other DNA
ctctctagaaagggttacatgaagatgg

SEQ ID NO: 11181 - DNA, 28 bp, synthetic construct
  source 1..28: mol_type = other DNA
ggttacatgaagatggcctcaagtacgg

SEQ ID NO: 11182 - DNA, 28 bp, synthetic construct
  source 1..28: mol_type = other DNA
tggaataaagatcacaccgtacttgagg

SEQ ID NO: 11183 - DNA, 28 bp, synthetic construct
  source 1..28: mol_type = other DNA
atttgtgttgagttgaagattgtcatgg

SEQ ID NO: 11184 - DNA, 28 bp, synthetic construct
  source 1..28: mol_type = other DNA
ctcaacacaaatttcatctttacatagg

SEQ ID NO: 11185 - DNA, 28 bp, synthetic construct
  source 1..28: mol_type = other DNA
acacaaatttcatctttacataggatgg

SEQ ID NO: 11186 - DNA, 28 bp, synthetic construct
  source 1..28: mol_type = other DNA
gggtgggtggaatcagtgttttaatcgg

SEQ ID NO: 11187 - DNA, 28 bp, synthetic construct
  source 1..28: mol_type = other DNA
cactggagtggggctggggggtgggtgg

SEQ ID NO: 11188 - DNA, 28 bp, synthetic construct
  source 1..28: mol_type = other DNA
cttcactggagtggggctggggggtggg

SEQ ID NO: 11189 - DNA, 28 bp, synthetic construct
  source 1..28: mol_type = other DNA
ccaccccccagccccactccagtgaagg

SEQ ID NO: 11190 - DNA, 28 bp, synthetic construct
  source 1..28: mol_type = other DNA
ccccccagccccactccagtgaaggagg

SEQ ID NO: 11191 - DNA, 28 bp, synthetic construct
  source 1..28: mol_type = other DNA
acctccttcactggagtggggctggggg

SEQ ID NO: 11192 - DNA, 28 bp, synthetic construct
  source 1..28: mol_type = other DNA
tacctccttcactggagtggggctgggg

SEQ ID NO: 11193 - DNA, 28 bp, synthetic construct
  source 1..28: mol_type = other DNA
ttacctccttcactggagtggggctggg

SEQ ID NO: 11194 - DNA, 28 bp, synthetic construct
  source 1..28: mol_type = other DNA
attacctccttcactggagtggggctgg

SEQ ID NO: 11195 - DNA, 28 bp, synthetic construct
  source 1..28: mol_type = other DNA
agccccactccagtgaaggaggtaatgg

SEQ ID NO: 11196 - DNA, 28 bp, synthetic construct
  source 1..28: mol_type = other DNA
ctccattacctccttcactggagtgggg

SEQ ID NO: 11197 - DNA, 28 bp, synthetic construct
  source 1..28: mol_type = other DNA
cccactccagtgaaggaggtaatggagg

SEQ ID NO: 11198 - DNA, 28 bp, synthetic construct
  source 1..28: mol_type = other DNA
ccactccagtgaaggaggtaatggaggg

SEQ ID NO: 11199 - DNA, 28 bp, synthetic construct
  source 1..28: mol_type = other DNA
ccagtgaaggaggtaatggagggtaagg

SEQ ID NO: 11200 - DNA, 28 bp, synthetic construct
  source 1..28: mol_type = other DNA
gaaggaggtaatggagggtaaggtcagg

SEQ ID NO: 11201 - DNA, 28 bp, synthetic construct
  source 1..28: mol_type = other DNA
aaggaggtaatggagggtaaggtcaggg

SEQ ID NO: 11202 - DNA, 28 bp, synthetic construct
  source 1..28: mol_type = other DNA
gtaatggagggtaaggtcagggcagagg

SEQ ID NO: 11203 - DNA, 28 bp, synthetic construct
  source 1..28: mol_type = other DNA
ggagggtaaggtcagggcagaggagagg

SEQ ID NO: 11204 - DNA, 28 bp, synthetic construct
  source 1..28: mol_type = other DNA
gagaggagtccccatctgcactgagcgg

SEQ ID NO: 11205 - DNA, 28 bp, synthetic construct
  source 1..28: mol_type = other DNA
gggaggcggccgctcagtgcagatgggg

SEQ ID NO: 11206 - DNA, 28 bp, synthetic construct
  source 1..28: mol_type = other DNA
cgggaggcggccgctcagtgcagatggg

SEQ ID NO: 11207 - DNA, 28 bp, synthetic construct
  source 1..28: mol_type = other DNA
gcgggaggcggccgctcagtgcagatgg

SEQ ID NO: 11208 - DNA, 28 bp, synthetic construct
  source 1..28: mol_type = other DNA
gagcggccgcctcccgcccctcctcagg

SEQ ID NO: 11209 - DNA, 28 bp, synthetic construct
  source 1..28: mol_type = other DNA
gtgggtcctgaggaggggcgggaggcgg

SEQ ID NO: 11210 - DNA, 28 bp, synthetic construct
  source 1..28: mol_type = other DNA
gctgtgggtcctgaggaggggcgggagg

SEQ ID NO: 11211 - DNA, 28 bp, synthetic construct
  source 1..28: mol_type = other DNA
ctggctgtgggtcctgaggaggggcggg

SEQ ID NO: 11212 - DNA, 28 bp, synthetic construct
  source 1..28: mol_type = other DNA
gctggctgtgggtcctgaggaggggcgg

SEQ ID NO: 11213 - DNA, 28 bp, synthetic construct
  source 1..28: mol_type = other DNA
cccctcctcaggacccacagccagctgg

SEQ ID NO: 11214 - DNA, 28 bp, synthetic construct
  source 1..28: mol_type = other DNA
accagctggctgtgggtcctgaggaggg

SEQ ID NO: 11215 - DNA, 28 bp, synthetic construct
  source 1..28: mol_type = other DNA
caccagctggctgtgggtcctgaggagg

SEQ ID NO: 11216 - DNA, 28 bp, synthetic construct
  source 1..28: mol_type = other DNA
acgcaccagctggctgtgggtcctgagg

SEQ ID NO: 11217 - DNA, 28 bp, synthetic construct
  source 1..28: mol_type = other DNA
ggacccacagccagctggtgcgtcgagg

SEQ ID NO: 11218 - DNA, 28 bp, synthetic construct
  source 1..28: mol_type = other DNA
gggcctcgacgcaccagctggctgtggg

SEQ ID NO: 11219 - DNA, 28 bp, synthetic construct
  source 1..28: mol_type = other DNA
cgggcctcgacgcaccagctggctgtgg

SEQ ID NO: 11220 - DNA, 28 bp, synthetic construct
  source 1..28: mol_type = other DNA
cacagccagctggtgcgtcgaggcccgg

SEQ ID NO: 11221 - DNA, 28 bp, synthetic construct
  source 1..28: mol_type = other DNA
gccagctggtgcgtcgaggcccggctgg

SEQ ID NO: 11222 - DNA, 28 bp, synthetic construct
  source 1..28: mol_type = other DNA
gccagccgggcctcgacgcaccagctgg

SEQ ID NO: 11223 - DNA, 28 bp, synthetic construct
  source 1..28: mol_type = other DNA
gaggcccggctggcacttcctgcacagg

SEQ ID NO: 11224 - DNA, 28 bp, synthetic construct
  source 1..28: mol_type = other DNA
gcccggctggcacttcctgcacaggagg

SEQ ID NO: 11225 - DNA, 28 bp, synthetic construct
  source 1..28: mol_type = other DNA
gcctcctgtgcaggaagtgccagccggg

SEQ ID NO: 11226 - DNA, 28 bp, synthetic construct
  source 1..28: mol_type = other DNA
agcctcctgtgcaggaagtgccagccgg

SEQ ID NO: 11227 - DNA, 28 bp, synthetic construct
  source 1..28: mol_type = other DNA
acttcttgttggcagcctcctgtgcagg

SEQ ID NO: 11228 - DNA, 28 bp, synthetic construct
  source 1..28: mol_type = other DNA
caggaggctgccaacaagaagtgagtgg

SEQ ID NO: 11229 - DNA, 28 bp, synthetic construct
  source 1..28: mol_type = other DNA
aggaggctgccaacaagaagtgagtggg

SEQ ID NO: 11230 - DNA, 28 bp, synthetic construct
  source 1..28: mol_type = other DNA
aggacagtgcccactcacttcttgttgg

SEQ ID NO: 11231 - DNA, 28 bp, synthetic construct
  source 1..28: mol_type = other DNA
agaagtgagtgggcactgtcctctctgg

SEQ ID NO: 11232 - DNA, 28 bp, synthetic construct
  source 1..28: mol_type = other DNA
gggcactgtcctctctggctgttcctgg

SEQ ID NO: 11233 - DNA, 28 bp, synthetic construct
  source 1..28: mol_type = other DNA
ggcactgtcctctctggctgttcctggg

SEQ ID NO: 11234 - DNA, 28 bp, synthetic construct
  source 1..28: mol_type = other DNA
gcactgtcctctctggctgttcctgggg

SEQ ID NO: 11235 - DNA, 28 bp, synthetic construct
  source 1..28: mol_type = other DNA
cttggtgccccaggaacagccagagagg

SEQ ID NO: 11236 - DNA, 28 bp, synthetic construct
  source 1..28: mol_type = other DNA
tggctgttcctggggcaccaagcacagg

SEQ ID NO: 11237 - DNA, 28 bp, synthetic construct
  source 1..28: mol_type = other DNA
agctgtcacctgtgcttggtgccccagg

SEQ ID NO: 11238 - DNA, 28 bp, synthetic construct
  source 1..28: mol_type = other DNA
ttagacttaagctgtcacctgtgcttgg

SEQ ID NO: 11239 - DNA, 28 bp, synthetic construct
  source 1..28: mol_type = other DNA
caagccctgaacgttctctgccagatgg

SEQ ID NO: 11240 - DNA, 28 bp, synthetic construct
  source 1..28: mol_type = other DNA
gcttccatctggcagagaacgttcaggg

SEQ ID NO: 11241 - DNA, 28 bp, synthetic construct
  source 1..28: mol_type = other DNA
ggcttccatctggcagagaacgttcagg

SEQ ID NO: 11242 - DNA, 28 bp, synthetic construct
  source 1..28: mol_type = other DNA
cgttctctgccagatggaagccccacgg

SEQ ID NO: 11243 - DNA, 28 bp, synthetic construct
  source 1..28: mol_type = other DNA
gttctctgccagatggaagccccacggg

SEQ ID NO: 11244 - DNA, 28 bp, synthetic construct
  source 1..28: mol_type = other DNA
ccagatggaagccccacgggcaagaagg

SEQ ID NO: 11245 - DNA, 28 bp, synthetic construct
  source 1..28: mol_type = other DNA
tggaagccccacgggcaagaaggacagg

SEQ ID NO: 11246 - DNA, 28 bp, synthetic construct
  source 1..28: mol_type = other DNA
ggaagccccacgggcaagaaggacaggg

SEQ ID NO: 11247 - DNA, 28 bp, synthetic construct
  source 1..28: mol_type = other DNA
agggaccctgtccttcttgcccgtgggg

SEQ ID NO: 11248 - DNA, 28 bp, synthetic construct
  source 1..28: mol_type = other DNA
cagggaccctgtccttcttgcccgtggg

SEQ ID NO: 11249 - DNA, 28 bp, synthetic construct
  source 1..28: mol_type = other DNA
ccacgggcaagaaggacagggtccctgg

SEQ ID NO: 11250 - DNA, 28 bp, synthetic construct
  source 1..28: mol_type = other DNA
agaaggacagggtccctggacagcgagg

SEQ ID NO: 11251 - DNA, 28 bp, synthetic construct
  source 1..28: mol_type = other DNA
agggtccctggacagcgaggttgaaagg

SEQ ID NO: 11252 - DNA, 28 bp, synthetic construct
  source 1..28: mol_type = other DNA
agggtcctttcaacctcgctgtccaggg

SEQ ID NO: 11253 - DNA, 28 bp, synthetic construct
  source 1..28: mol_type = other DNA
cagggtcctttcaacctcgctgtccagg

SEQ ID NO: 11254 - DNA, 28 bp, synthetic construct
  source 1..28: mol_type = other DNA
ctggacagcgaggttgaaaggaccctgg

SEQ ID NO: 11255 - DNA, 28 bp, synthetic construct
  source 1..28: mol_type = other DNA
gacagcgaggttgaaaggaccctggagg

SEQ ID NO: 11256 - DNA, 28 bp, synthetic construct
  source 1..28: mol_type = other DNA
ggttgaaaggaccctggaggagagctgg

SEQ ID NO: 11257 - DNA, 28 bp, synthetic construct
  source 1..28: mol_type = other DNA
aggaccctggaggagagctggcttgtgg

SEQ ID NO: 11258 - DNA, 28 bp, synthetic construct
  source 1..28: mol_type = other DNA
atagccacaagccagctctcctccaggg

SEQ ID NO: 11259 - DNA, 28 bp, synthetic construct
  source 1..28: mol_type = other DNA
catagccacaagccagctctcctccagg

SEQ ID NO: 11260 - DNA, 28 bp, synthetic construct
  source 1..28: mol_type = other DNA
ctggaggagagctggcttgtggctatgg

SEQ ID NO: 11261 - DNA, 28 bp, synthetic construct
  source 1..28: mol_type = other DNA
cgcacgcgcacacacgtgtgcacatggg

SEQ ID NO: 11262 - DNA, 28 bp, synthetic construct
  source 1..28: mol_type = other DNA
acgcacgcgcacacacgtgtgcacatgg

SEQ ID NO: 11263 - DNA, 28 bp, synthetic construct
  source 1..28: mol_type = other DNA
cgtgtgtgcgcgtgcgtgcgtgtgtcgg

SEQ ID NO: 11264 - DNA, 28 bp, synthetic construct
  source 1..28: mol_type = other DNA
gtgtgtgcgcgtgcgtgcgtgtgtcggg

SEQ ID NO: 11265 - DNA, 28 bp, synthetic construct
  source 1..28: mol_type = other DNA
tgtgtgcgcgtgcgtgcgtgtgtcgggg

SEQ ID NO: 11266 - DNA, 28 bp, synthetic construct
  source 1..28: mol_type = other DNA
gtgtgcgcgtgcgtgcgtgtgtcggggg

SEQ ID NO: 11267 - DNA, 28 bp, synthetic construct
  source 1..28: mol_type = other DNA
cgtgcgtgtgtcgggggcagcatgcagg

SEQ ID NO: 11268 - DNA, 28 bp, synthetic construct
  source 1..28: mol_type = other DNA
cgggggcagcatgcaggcccgacactgg

SEQ ID NO: 11269 - DNA, 28 bp, synthetic construct
  source 1..28: mol_type = other DNA
gcatgcaggcccgacactggtaatcagg

SEQ ID NO: 11270 - DNA, 28 bp, synthetic construct
  source 1..28: mol_type = other DNA
aaatggcagcctgattaccagtgtcggg

SEQ ID NO: 11271 - DNA, 28 bp, synthetic construct
  source 1..28: mol_type = other DNA
caaatggcagcctgattaccagtgtcgg

SEQ ID NO: 11272 - DNA, 28 bp, synthetic construct
  source 1..28: mol_type = other DNA
cgacactggtaatcaggctgccatttgg

SEQ ID NO: 11273 - DNA, 28 bp, synthetic construct
  source 1..28: mol_type = other DNA
gaagattctgctttcttggaccaaatgg

SEQ ID NO: 11274 - DNA, 28 bp, synthetic construct
  source 1..28: mol_type = other DNA
tctttctgggaagattctgctttcttgg

SEQ ID NO: 11275 - DNA, 28 bp, synthetic construct
  source 1..28: mol_type = other DNA
ggggagctgctggcattgtctttctggg

SEQ ID NO: 11276 - DNA, 28 bp, synthetic construct
  source 1..28: mol_type = other DNA
tggggagctgctggcattgtctttctgg

SEQ ID NO: 11277 - DNA, 28 bp, synthetic construct
  source 1..28: mol_type = other DNA
tgccagcagctccccaattgtcctgtgg

SEQ ID NO: 11278 - DNA, 28 bp, synthetic construct
  source 1..28: mol_type = other DNA
gccagcagctccccaattgtcctgtggg

SEQ ID NO: 11279 - DNA, 28 bp, synthetic construct
  source 1..28: mol_type = other DNA
tcccacaggacaattggggagctgctgg

SEQ ID NO: 11280 - DNA, 28 bp, synthetic construct
  source 1..28: mol_type = other DNA
gctccccaattgtcctgtgggaatctgg

SEQ ID NO: 11281 - DNA, 28 bp, synthetic construct
  source 1..28: mol_type = other DNA
ctccccaattgtcctgtgggaatctggg

SEQ ID NO: 11282 - DNA, 28 bp, synthetic construct
  source 1..28: mol_type = other DNA
tgcccagattcccacaggacaattgggg

SEQ ID NO: 11283 - DNA, 28 bp, synthetic construct
  source 1..28: mol_type = other DNA
atgcccagattcccacaggacaattggg

SEQ ID NO: 11284 - DNA, 28 bp, synthetic construct
  source 1..28: mol_type = other DNA
catgcccagattcccacaggacaattgg

SEQ ID NO: 11285 - DNA, 28 bp, synthetic construct
  source 1..28: mol_type = other DNA
ttgtcctgtgggaatctgggcatgaagg

SEQ ID NO: 11286 - DNA, 28 bp, synthetic construct
  source 1..28: mol_type = other DNA
agagccttcatgcccagattcccacagg

SEQ ID NO: 11287 - DNA, 28 bp, synthetic construct
  source 1..28: mol_type = other DNA
aggctctcctgcctgctcctgtctcagg

SEQ ID NO: 11288 - DNA, 28 bp, synthetic construct
  source 1..28: mol_type = other DNA
tctcctgcctgctcctgtctcaggcagg

SEQ ID NO: 11289 - DNA, 28 bp, synthetic construct
  source 1..28: mol_type = other DNA
cctgcctgctcctgtctcaggcaggcgg

SEQ ID NO: 11290 - DNA, 28 bp, synthetic construct
  source 1..28: mol_type = other DNA
ctgcctgctcctgtctcaggcaggcggg

SEQ ID NO: 11291 - DNA, 28 bp, synthetic construct
  source 1..28: mol_type = other DNA
agtcccgcctgcctgagacaggagcagg

SEQ ID NO: 11292 - DNA, 28 bp, synthetic construct
  source 1..28: mol_type = other DNA
tgttgcagtcccgcctgcctgagacagg

SEQ ID NO: 11293 - DNA, 28 bp, synthetic construct
  source 1..28: mol_type = other DNA
tgtctcaggcaggcgggactgcaacagg

SEQ ID NO: 11294 - DNA, 28 bp, synthetic construct
  source 1..28: mol_type = other DNA
ggcgggactgcaacaggaacacatcagg

SEQ ID NO: 11295 - DNA, 28 bp, synthetic construct
  source 1..28: mol_type = other DNA
actgcaacaggaacacatcaggcgcagg

SEQ ID NO: 11296 - DNA, 28 bp, synthetic construct
  source 1..28: mol_type = other DNA
caggaacacatcaggcgcaggccaaagg

SEQ ID NO: 11297 - DNA, 28 bp, synthetic construct
  source 1..28: mol_type = other DNA
aggaacacatcaggcgcaggccaaaggg

SEQ ID NO: 11298 - DNA, 28 bp, synthetic construct
  source 1..28: mol_type = other DNA
aaacaaactattctcagctgccctttgg

SEQ ID NO: 11299 - DNA, 28 bp, synthetic construct
  source 1..28: mol_type = other DNA
aaagggcagctgagaatagtttgtttgg

SEQ ID NO: 11300 - DNA, 28 bp, synthetic construct
  source 1..28: mol_type = other DNA
gtttgtttggcaaacagagcttaactgg

SEQ ID NO: 11301 - DNA, 28 bp, synthetic construct
  source 1..28: mol_type = other DNA
tggcaaacagagcttaactggaagctgg

SEQ ID NO: 11302 - DNA, 28 bp, synthetic construct
  source 1..28: mol_type = other DNA
ttaactggaagctggatgcccagaaagg

SEQ ID NO: 11303 - DNA, 28 bp, synthetic construct
  source 1..28: mol_type = other DNA
gcccagaaaggatcaagagcagcccagg

SEQ ID NO: 11304 - DNA, 28 bp, synthetic construct
  source 1..28: mol_type = other DNA
tcctgggctgctcttgatcctttctggg

SEQ ID NO: 11305 - DNA, 28 bp, synthetic construct
  source 1..28: mol_type = other DNA
ttcctgggctgctcttgatcctttctgg

SEQ ID NO: 11306 - DNA, 28 bp, synthetic construct
  source 1..28: mol_type = other DNA
cccaggaactcctgagcatcaatgcagg

SEQ ID NO: 11307 - DNA, 28 bp, synthetic construct
  source 1..28: mol_type = other DNA
ccaggaactcctgagcatcaatgcaggg

SEQ ID NO: 11308 - DNA, 28 bp, synthetic construct
  source 1..28: mol_type = other DNA
actcctgagcatcaatgcagggccccgg

SEQ ID NO: 11309 - DNA, 28 bp, synthetic construct
  source 1..28: mol_type = other DNA
ctcctgagcatcaatgcagggccccggg

SEQ ID NO: 11310 - DNA, 28 bp, synthetic construct
  source 1..28: mol_type = other DNA
ctcccggggccctgcattgatgctcagg

SEQ ID NO: 11311 - DNA, 28 bp, synthetic construct
  source 1..28: mol_type = other DNA
ctgagcatcaatgcagggccccgggagg

SEQ ID NO: 11312 - DNA, 28 bp, synthetic construct
  source 1..28: mol_type = other DNA
atcaatgcagggccccgggaggccctgg

SEQ ID NO: 11313 - DNA, 28 bp, synthetic construct
  source 1..28: mol_type = other DNA
tgcagggccccgggaggccctggtgagg

SEQ ID NO: 11314 - DNA, 28 bp, synthetic construct
  source 1..28: mol_type = other DNA
ggccccgggaggccctggtgaggccagg

SEQ ID NO: 11315 - DNA, 28 bp, synthetic construct
  source 1..28: mol_type = other DNA
gccccgggaggccctggtgaggccaggg

SEQ ID NO: 11316 - DNA, 28 bp, synthetic construct
  source 1..28: mol_type = other DNA
gccctggcctcaccagggcctcccgggg

SEQ ID NO: 11317 - DNA, 28 bp, synthetic construct
  source 1..28: mol_type = other DNA
agccctggcctcaccagggcctcccggg

SEQ ID NO: 11318 - DNA, 28 bp, synthetic construct
  source 1..28: mol_type = other DNA
tagccctggcctcaccagggcctcccgg

SEQ ID NO: 11319 - DNA, 28 bp, synthetic construct
  source 1..28: mol_type = other DNA
gcaggggctagccctggcctcaccaggg

SEQ ID NO: 11320 - DNA, 28 bp, synthetic construct
  source 1..28: mol_type = other DNA
agcaggggctagccctggcctcaccagg

SEQ ID NO: 11321 - DNA, 28 bp, synthetic construct
  source 1..28: mol_type = other DNA
ttgctgtggaagcaggggctagccctgg

SEQ ID NO: 11322 - DNA, 28 bp, synthetic construct
  source 1..28: mol_type = other DNA
ctagcccctgcttccacagcaaatctgg

SEQ ID NO: 11323 - DNA, 28 bp, synthetic construct
  source 1..28: mol_type = other DNA
tagcccctgcttccacagcaaatctggg

SEQ ID NO: 11324 - DNA, 28 bp, synthetic construct
  source 1..28: mol_type = other DNA
agcccctgcttccacagcaaatctgggg

SEQ ID NO: 11325 - DNA, 28 bp, synthetic construct
  source 1..28: mol_type = other DNA
tgccccagatttgctgtggaagcagggg

SEQ ID NO: 11326 - DNA, 28 bp, synthetic construct
  source 1..28: mol_type = other DNA
ctgccccagatttgctgtggaagcaggg

SEQ ID NO: 11327 - DNA, 28 bp, synthetic construct
  source 1..28: mol_type = other DNA
actgccccagatttgctgtggaagcagg

SEQ ID NO: 11328 - DNA, 28 bp, synthetic construct
  source 1..28: mol_type = other DNA
agctgcaactgccccagatttgctgtgg

SEQ ID NO: 11329 - DNA, 28 bp, synthetic construct
  source 1..28: mol_type = other DNA
gggcagttgcagctgctcaagcccaagg

SEQ ID NO: 11330 - DNA, 28 bp, synthetic construct
  source 1..28: mol_type = other DNA
gcagctgctcaagcccaaggagctgagg

SEQ ID NO: 11331 - DNA, 28 bp, synthetic construct
  source 1..28: mol_type = other DNA
ctctggcagctctcctcagctccttggg

SEQ ID NO: 11332 - DNA, 28 bp, synthetic construct
  source 1..28: mol_type = other DNA
actctggcagctctcctcagctccttgg

SEQ ID NO: 11333 - DNA, 28 bp, synthetic construct
  source 1..28: mol_type = other DNA
gctgaggagagctgccagagttcccagg

SEQ ID NO: 11334 - DNA, 28 bp, synthetic construct
  source 1..28: mol_type = other DNA
aggagagctgccagagttcccaggcagg

SEQ ID NO: 11335 - DNA, 28 bp, synthetic construct
  source 1..28: mol_type = other DNA
agagctgccagagttcccaggcaggtgg

SEQ ID NO: 11336 - DNA, 28 bp, synthetic construct
  source 1..28: mol_type = other DNA
gagctgccagagttcccaggcaggtggg

SEQ ID NO: 11337 - DNA, 28 bp, synthetic construct
  source 1..28: mol_type = other DNA
agctgccagagttcccaggcaggtgggg

SEQ ID NO: 11338 - DNA, 28 bp, synthetic construct
  source 1..28: mol_type = other DNA
aggctccccacctgcctgggaactctgg

SEQ ID NO: 11339 - DNA, 28 bp, synthetic construct
  source 1..28: mol_type = other DNA
ttgggtgcaggctccccacctgcctggg

SEQ ID NO: 11340 - DNA, 28 bp, synthetic construct
  source 1..28: mol_type = other DNA
cttgggtgcaggctccccacctgcctgg

SEQ ID NO: 11341 - DNA, 28 bp, synthetic construct
  source 1..28: mol_type = other DNA
caggcaggtggggagcctgcacccaagg

SEQ ID NO: 11342 - DNA, 28 bp, synthetic construct
  source 1..28: mol_type = other DNA
aggcaggtggggagcctgcacccaaggg

SEQ ID NO: 11343 - DNA, 28 bp, synthetic construct
  source 1..28: mol_type = other DNA
gagcctgcacccaagggcttgcccatgg

SEQ ID NO: 11344 - DNA, 28 bp, synthetic construct
  source 1..28: mol_type = other DNA
tcaccatgggcaagcccttgggtgcagg

SEQ ID NO: 11345 - DNA, 28 bp, synthetic construct
  source 1..28: mol_type = other DNA
gggctatcaccatgggcaagcccttggg

SEQ ID NO: 11346 - DNA, 28 bp, synthetic construct
  source 1..28: mol_type = other DNA
tgggctatcaccatgggcaagcccttgg

SEQ ID NO: 11347 - DNA, 28 bp, synthetic construct
  source 1..28: mol_type = other DNA
ggaactggaagtgggctatcaccatggg

SEQ ID NO: 11348 - DNA, 28 bp, synthetic construct
  source 1..28: mol_type = other DNA
tggaactggaagtgggctatcaccatgg

SEQ ID NO: 11349 - DNA, 28 bp, synthetic construct
  source 1..28: mol_type = other DNA
atagcccacttccagttccagaagaagg

SEQ ID NO: 11350 - DNA, 28 bp, synthetic construct
  source 1..28: mol_type = other DNA
cccacttccagttccagaagaaggcagg

SEQ ID NO: 11351 - DNA, 28 bp, synthetic construct
  source 1..28: mol_type = other DNA
gcctgccttcttctggaactggaagtgg

SEQ ID NO: 11352 - DNA, 28 bp, synthetic construct
  source 1..28: mol_type = other DNA
ctagaggcctgccttcttctggaactgg

SEQ ID NO: 11353 - DNA, 28 bp, synthetic construct
  source 1..28: mol_type = other DNA
cagttccagaagaaggcaggcctctagg

SEQ ID NO: 11354 - DNA, 28 bp, synthetic construct
  source 1..28: mol_type = other DNA
tgcttcctagaggcctgccttcttctgg

SEQ ID NO: 11355 - DNA, 28 bp, synthetic construct
  source 1..28: mol_type = other DNA
agtgtagattgtgggtgcttcctagagg

SEQ ID NO: 11356 - DNA, 28 bp, synthetic construct
  source 1..28: mol_type = other DNA
gcacccacaatctacactttaaaaaagg

SEQ ID NO: 11357 - DNA, 28 bp, synthetic construct
  source 1..28: mol_type = other DNA
tctccttttttaaagtgtagattgtggg

SEQ ID NO: 11358 - DNA, 28 bp, synthetic construct
  source 1..28: mol_type = other DNA
ttctccttttttaaagtgtagattgtgg

SEQ ID NO: 11359 - DNA, 28 bp, synthetic construct
  source 1..28: mol_type = other DNA
ctgaggaactgcatctgcgtttcagggg

SEQ ID NO: 11360 - DNA, 28 bp, synthetic construct
  source 1..28: mol_type = other DNA
ccctgaaacgcagatgcagttcctcagg

SEQ ID NO: 11361 - DNA, 28 bp, synthetic construct
  source 1..28: mol_type = other DNA
cctgaaacgcagatgcagttcctcaggg

SEQ ID NO: 11362 - DNA, 28 bp, synthetic construct
  source 1..28: mol_type = other DNA
ctgaaacgcagatgcagttcctcagggg

SEQ ID NO: 11363 - DNA, 28 bp, synthetic construct
  source 1..28: mol_type = other DNA
agttcctcaggggacttttcatgtcagg

SEQ ID NO: 11364 - DNA, 28 bp, synthetic construct
  source 1..28: mol_type = other DNA
actgcctgacatgaaaagtcccctgagg

SEQ ID NO: 11365 - DNA, 28 bp, synthetic construct
  source 1..28: mol_type = other DNA
gtcaggcagttttctgctgagatgctgg

SEQ ID NO: 11366 - DNA, 28 bp, synthetic construct
  source 1..28: mol_type = other DNA
gagatgctggatttgtgaccaaaaaagg

SEQ ID NO: 11367 - DNA, 28 bp, synthetic construct
  source 1..28: mol_type = other DNA
agatgctggatttgtgaccaaaaaaggg

SEQ ID NO: 11368 - DNA, 28 bp, synthetic construct
  source 1..28: mol_type = other DNA
gctggatttgtgaccaaaaaagggctgg

SEQ ID NO: 11369 - DNA, 28 bp, synthetic construct
  source 1..28: mol_type = other DNA
ctaaaaataaataccagcccttttttgg

SEQ ID NO: 11370 - DNA, 28 bp, synthetic construct
  source 1..28: mol_type = other DNA
gagcaaaaaagcctatttgtgtctctgg

SEQ ID NO: 11371 - DNA, 28 bp, synthetic construct
  source 1..28: mol_type = other DNA
agcaaaaaagcctatttgtgtctctggg

SEQ ID NO: 11372 - DNA, 28 bp, synthetic construct
  source 1..28: mol_type = other DNA
aaaaaagcctatttgtgtctctgggagg

SEQ ID NO: 11373 - DNA, 28 bp, synthetic construct
  source 1..28: mol_type = other DNA
aaaaagcctatttgtgtctctgggaggg

SEQ ID NO: 11374 - DNA, 28 bp, synthetic construct
  source 1..28: mol_type = other DNA
gcctatttgtgtctctgggagggcttgg

SEQ ID NO: 11375 - DNA, 28 bp, synthetic construct
  source 1..28: mol_type = other DNA
tccaagccctcccagagacacaaatagg

SEQ ID NO: 11376 - DNA, 28 bp, synthetic construct
  source 1..28: mol_type = other DNA
tgtctctgggagggcttggatgatgtgg

SEQ ID NO: 11377 - DNA, 28 bp, synthetic construct
  source 1..28: mol_type = other DNA
ggccacactcgcctgccccaaccccagg

SEQ ID NO: 11378 - DNA, 28 bp, synthetic construct
  source 1..28: mol_type = other DNA
gccacactcgcctgccccaaccccaggg

SEQ ID NO: 11379 - DNA, 28 bp, synthetic construct
  source 1..28: mol_type = other DNA
ccacactcgcctgccccaaccccagggg

SEQ ID NO: 11380 - DNA, 28 bp, synthetic construct
  source 1..28: mol_type = other DNA
tgacgacagcccctggggttggggcagg

SEQ ID NO: 11381 - DNA, 28 bp, synthetic construct
  source 1..28: mol_type = other DNA
agaatgacgacagcccctggggttgggg

SEQ ID NO: 11382 - DNA, 28 bp, synthetic construct
  source 1..28: mol_type = other DNA
tagaatgacgacagcccctggggttggg

SEQ ID NO: 11383 - DNA, 28 bp, synthetic construct
  source 1..28: mol_type = other DNA
ttagaatgacgacagcccctggggttgg

SEQ ID NO: 11384 - DNA, 28 bp, synthetic construct
  source 1..28: mol_type = other DNA
aaccccaggggctgtcgtcattctaagg

SEQ ID NO: 11385 - DNA, 28 bp, synthetic construct
  source 1..28: mol_type = other DNA
accccaggggctgtcgtcattctaaggg

SEQ ID NO: 11386 - DNA, 28 bp, synthetic construct
  source 1..28: mol_type = other DNA
tcccttagaatgacgacagcccctgggg

SEQ ID NO: 11387 - DNA, 28 bp, synthetic construct
  source 1..28: mol_type = other DNA
gtcccttagaatgacgacagcccctggg

SEQ ID NO: 11388 - DNA, 28 bp, synthetic construct
  source 1..28: mol_type = other DNA
agtcccttagaatgacgacagcccctgg

SEQ ID NO: 11389 - DNA, 28 bp, synthetic construct
  source 1..28: mol_type = other DNA
tgtcgtcattctaagggactgaagacgg

SEQ ID NO: 11390 - DNA, 28 bp, synthetic construct
  source 1..28: mol_type = other DNA
gtcgtcattctaagggactgaagacggg

SEQ ID NO: 11391 - DNA, 28 bp, synthetic construct
  source 1..28: mol_type = other DNA
tcgtcattctaagggactgaagacgggg

SEQ ID NO: 11392 - DNA, 28 bp, synthetic construct
  source 1..28: mol_type = other DNA
tgttcacactgttaacaccagtcagagg

SEQ ID NO: 11393 - DNA, 28 bp, synthetic construct
  source 1..28: mol_type = other DNA
tgttaacaccagtcagaggtgtccatgg

SEQ ID NO: 11394 - DNA, 28 bp, synthetic construct
  source 1..28: mol_type = other DNA
gttaacaccagtcagaggtgtccatggg

SEQ ID NO: 11395 - DNA, 28 bp, synthetic construct
  source 1..28: mol_type = other DNA
ttaacaccagtcagaggtgtccatgggg

SEQ ID NO: 11396 - DNA, 28 bp, synthetic construct
  source 1..28: mol_type = other DNA
ggactgccccatggacacctctgactgg

SEQ ID NO: 11397 - DNA, 28 bp, synthetic construct
  source 1..28: mol_type = other DNA
agaggtgtccatggggcagtccctgagg

SEQ ID NO: 11398 - DNA, 28 bp, synthetic construct
  source 1..28: mol_type = other DNA
gaggtgtccatggggcagtccctgaggg

SEQ ID NO: 11399 - DNA, 28 bp, synthetic construct
  source 1..28: mol_type = other DNA
tcacagaccctcagggactgccccatgg

SEQ ID NO: 11400 - DNA, 28 bp, synthetic construct
  source 1..28: mol_type = other DNA
ccctgagggtctgtgacaccctctctgg

SEQ ID NO: 11401 - DNA, 28 bp, synthetic construct
  source 1..28: mol_type = other DNA
accagagagggtgtcacagaccctcagg

SEQ ID NO: 11402 - DNA, 28 bp, synthetic construct
  source 1..28: mol_type = other DNA
tgagtctgggctggtggaccagagaggg

SEQ ID NO: 11403 - DNA, 28 bp, synthetic construct
  source 1..28: mol_type = other DNA
gtgagtctgggctggtggaccagagagg

SEQ ID NO: 11404 - DNA, 28 bp, synthetic construct
  source 1..28: mol_type = other DNA
ctctagtggggtgagtctgggctggtgg

SEQ ID NO: 11405 - DNA, 28 bp, synthetic construct
  source 1..28: mol_type = other DNA
caccagcccagactcaccccactagagg

SEQ ID NO: 11406 - DNA, 28 bp, synthetic construct
  source 1..28: mol_type = other DNA
ctcctctagtggggtgagtctgggctgg

SEQ ID NO: 11407 - DNA, 28 bp, synthetic construct
  source 1..28: mol_type = other DNA
cagcccagactcaccccactagaggagg

SEQ ID NO: 11408 - DNA, 28 bp, synthetic construct
  source 1..28: mol_type = other DNA
cccagactcaccccactagaggaggcgg

SEQ ID NO: 11409 - DNA, 28 bp, synthetic construct
  source 1..28: mol_type = other DNA
ccagactcaccccactagaggaggcggg

SEQ ID NO: 11410 - DNA, 28 bp, synthetic construct
  source 1..28: mol_type = other DNA
gactcaccccactagaggaggcgggtgg

SEQ ID NO: 11411 - DNA, 28 bp, synthetic construct
  source 1..28: mol_type = other DNA
actcaccccactagaggaggcgggtggg

SEQ ID NO: 11412 - DNA, 28 bp, synthetic construct
  source 1..28: mol_type = other DNA
ctcaccccactagaggaggcgggtgggg

SEQ ID NO: 11413 - DNA, 28 bp, synthetic construct
  source 1..28: mol_type = other DNA
ctcaccccacccgcctcctctagtgggg

SEQ ID NO: 11414 - DNA, 28 bp, synthetic construct
  source 1..28: mol_type = other DNA
cccactagaggaggcgggtggggtgagg

SEQ ID NO: 11415 - DNA, 28 bp, synthetic construct
  source 1..28: mol_type = other DNA
acctcaccccacccgcctcctctagtgg

SEQ ID NO: 11416 - DNA, 28 bp, synthetic construct
  source 1..28: mol_type = other DNA
actagaggaggcgggtggggtgaggtgg

SEQ ID NO: 11417 - DNA, 28 bp, synthetic construct
  source 1..28: mol_type = other DNA
ctagaggaggcgggtggggtgaggtggg

SEQ ID NO: 11418 - DNA, 28 bp, synthetic construct
  source 1..28: mol_type = other DNA
tagaggaggcgggtggggtgaggtgggg

SEQ ID NO: 11419 - DNA, 28 bp, synthetic construct
  source 1..28: mol_type = other DNA
ggaggcgggtggggtgaggtggggttgg

SEQ ID NO: 11420 - DNA, 28 bp, synthetic construct
  source 1..28: mol_type = other DNA
gaggcgggtggggtgaggtggggttggg

SEQ ID NO: 11421 - DNA, 28 bp, synthetic construct
  source 1..28: mol_type = other DNA
aggcgggtggggtgaggtggggttgggg

SEQ ID NO: 11422 - DNA, 28 bp, synthetic construct
  source 1..28: mol_type = other DNA
ggcgggtggggtgaggtggggttggggg

SEQ ID NO: 11423 - DNA, 28 bp, synthetic construct
  source 1..28: mol_type = other DNA
gcgggtggggtgaggtggggttgggggg

SEQ ID NO: 11424 - DNA, 28 bp, synthetic construct
  source 1..28: mol_type = other DNA
ggtgaggtggggttggggggatgatagg

SEQ ID NO: 11425 - DNA, 28 bp, synthetic construct
  source 1..28: mol_type = other DNA
tggggttggggggatgataggcccaagg

SEQ ID NO: 11426 - DNA, 28 bp, synthetic construct
  source 1..28: mol_type = other DNA
caggcaggcactggtgaagggccttggg

SEQ ID NO: 11427 - DNA, 28 bp, synthetic construct
  source 1..28: mol_type = other DNA
ccaaggcccttcaccagtgcctgcctgg

SEQ ID NO: 11428 - DNA, 28 bp, synthetic construct
  source 1..28: mol_type = other DNA
ggcccttcaccagtgcctgcctggcagg

SEQ ID NO: 11429 - DNA, 28 bp, synthetic construct
  source 1..28: mol_type = other DNA
gacctgccaggcaggcactggtgaaggg

SEQ ID NO: 11430 - DNA, 28 bp, synthetic construct
  source 1..28: mol_type = other DNA
ggacctgccaggcaggcactggtgaagg

SEQ ID NO: 11431 - DNA, 28 bp, synthetic construct
  source 1..28: mol_type = other DNA
tatgcaggacctgccaggcaggcactgg

SEQ ID NO: 11432 - DNA, 28 bp, synthetic construct
  source 1..28: mol_type = other DNA
ctgcagtatgcaggacctgccaggcagg

SEQ ID NO: 11433 - DNA, 28 bp, synthetic construct
  source 1..28: mol_type = other DNA
caggctgcagtatgcaggacctgccagg

SEQ ID NO: 11434 - DNA, 28 bp, synthetic construct
  source 1..28: mol_type = other DNA
ctggcaggtcctgcatactgcagcctgg

SEQ ID NO: 11435 - DNA, 28 bp, synthetic construct
  source 1..28: mol_type = other DNA
gtcctgcatactgcagcctggttccagg

SEQ ID NO: 11436 - DNA, 28 bp, synthetic construct
  source 1..28: mol_type = other DNA
ctcctggaaccaggctgcagtatgcagg

SEQ ID NO: 11437 - DNA, 28 bp, synthetic construct
  source 1..28: mol_type = other DNA
ctgcatactgcagcctggttccaggagg

SEQ ID NO: 11438 - DNA, 28 bp, synthetic construct
  source 1..28: mol_type = other DNA
catagggaaagtacctcctggaaccagg

SEQ ID NO: 11439 - DNA, 28 bp, synthetic construct
  source 1..28: mol_type = other DNA
caagtcacatagggaaagtacctcctgg

SEQ ID NO: 11440 - DNA, 28 bp, synthetic construct
  source 1..28: mol_type = other DNA
actttccctatgtgacttgagaagacgg

SEQ ID NO: 11441 - DNA, 28 bp, synthetic construct
  source 1..28: mol_type = other DNA
ttccctatgtgacttgagaagacggagg

SEQ ID NO: 11442 - DNA, 28 bp, synthetic construct
  source 1..28: mol_type = other DNA
ggcctccgtcttctcaagtcacataggg

SEQ ID NO: 11443 - DNA, 28 bp, synthetic construct
  source 1..28: mol_type = other DNA
tggcctccgtcttctcaagtcacatagg

SEQ ID NO: 11444 - DNA, 28 bp, synthetic construct
  source 1..28: mol_type = other DNA
ttgagaagacggaggccaaagaaactgg

SEQ ID NO: 11445 - DNA, 28 bp, synthetic construct
  source 1..28: mol_type = other DNA
tgagaagacggaggccaaagaaactggg

SEQ ID NO: 11446 - DNA, 28 bp, synthetic construct
  source 1..28: mol_type = other DNA
gagaagacggaggccaaagaaactgggg

SEQ ID NO: 11447 - DNA, 28 bp, synthetic construct
  source 1..28: mol_type = other DNA
ctggtgggcatttccccagtttctttgg

SEQ ID NO: 11448 - DNA, 28 bp, synthetic construct
  source 1..28: mol_type = other DNA
caaagaaactggggaaatgcccaccagg

SEQ ID NO: 11449 - DNA, 28 bp, synthetic construct
  source 1..28: mol_type = other DNA
atgcccaccaggcaacttaagcttttgg

SEQ ID NO: 11450 - DNA, 28 bp, synthetic construct
  source 1..28: mol_type = other DNA
tttccaaaagcttaagttgcctggtggg

SEQ ID NO: 11451 - DNA, 28 bp, synthetic construct
  source 1..28: mol_type = other DNA
atttccaaaagcttaagttgcctggtgg

SEQ ID NO: 11452 - DNA, 28 bp, synthetic construct
  source 1..28: mol_type = other DNA
tgcatttccaaaagcttaagttgcctgg

SEQ ID NO: 11453 - DNA, 28 bp, synthetic construct
  source 1..28: mol_type = other DNA
ggcaacttaagcttttggaaatgcacgg

SEQ ID NO: 11454 - DNA, 28 bp, synthetic construct
  source 1..28: mol_type = other DNA
gcaacttaagcttttggaaatgcacggg

SEQ ID NO: 11455 - DNA, 28 bp, synthetic construct
  source 1..28: mol_type = other DNA
agcttttggaaatgcacgggaacaatgg

SEQ ID NO: 11456 - DNA, 28 bp, synthetic construct
  source 1..28: mol_type = other DNA
aaatgcacgggaacaatggagacgaagg

SEQ ID NO: 11457 - DNA, 28 bp, synthetic construct
  source 1..28: mol_type = other DNA
tgcacgggaacaatggagacgaaggagg

SEQ ID NO: 11458 - DNA, 28 bp, synthetic construct
  source 1..28: mol_type = other DNA
gagacgaaggaggaaagactccaaaagg

SEQ ID NO: 11459 - DNA, 28 bp, synthetic construct
  source 1..28: mol_type = other DNA
aagactccaaaaggctcagagtcagcgg

SEQ ID NO: 11460 - DNA, 28 bp, synthetic construct
  source 1..28: mol_type = other DNA
actccaaaaggctcagagtcagcggtgg

SEQ ID NO: 11461 - DNA, 28 bp, synthetic construct
  source 1..28: mol_type = other DNA
gagccaccgctgactctgagccttttgg

SEQ ID NO: 11462 - DNA, 28 bp, synthetic construct
  source 1..28: mol_type = other DNA
gagtcagcggtggctcgagccttacagg

SEQ ID NO: 11463 - DNA, 28 bp, synthetic construct
  source 1..28: mol_type = other DNA
agtcagcggtggctcgagccttacaggg

SEQ ID NO: 11464 - DNA, 28 bp, synthetic construct
  source 1..28: mol_type = other DNA
gcatgcttctcactggtgccctgtaagg

SEQ ID NO: 11465 - DNA, 28 bp, synthetic construct
  source 1..28: mol_type = other DNA
cagggcaccagtgagaagcatgctgtgg

SEQ ID NO: 11466 - DNA, 28 bp, synthetic construct
  source 1..28: mol_type = other DNA
agggcaccagtgagaagcatgctgtggg

SEQ ID NO: 11467 - DNA, 28 bp, synthetic construct
  source 1..28: mol_type = other DNA
gctcttcccacagcatgcttctcactgg

SEQ ID NO: 11468 - DNA, 28 bp, synthetic construct
  source 1..28: mol_type = other DNA
tgggaagagcctcactgagccttccagg

SEQ ID NO: 11469 - DNA, 28 bp, synthetic construct
  source 1..28: mol_type = other DNA
gggaagagcctcactgagccttccaggg

SEQ ID NO: 11470 - DNA, 28 bp, synthetic construct
  source 1..28: mol_type = other DNA
cctcactgagccttccagggtctagagg

SEQ ID NO: 11471 - DNA, 28 bp, synthetic construct
  source 1..28: mol_type = other DNA
agaggcaaggcctctagaccctggaagg

SEQ ID NO: 11472 - DNA, 28 bp, synthetic construct
  source 1..28: mol_type = other DNA
ctttagaggcaaggcctctagaccctgg

SEQ ID NO: 11473 - DNA, 28 bp, synthetic construct
  source 1..28: mol_type = other DNA
ataaggagtgggagctttagaggcaagg

SEQ ID NO: 11474 - DNA, 28 bp, synthetic construct
  source 1..28: mol_type = other DNA
cctctaaagctcccactccttatctagg

SEQ ID NO: 11475 - DNA, 28 bp, synthetic construct
  source 1..28: mol_type = other DNA
tctagagctgtcctagataaggagtggg

SEQ ID NO: 11476 - DNA, 28 bp, synthetic construct
  source 1..28: mol_type = other DNA
ctctagagctgtcctagataaggagtgg

SEQ ID NO: 11477 - DNA, 28 bp, synthetic construct
  source 1..28: mol_type = other DNA
cactccttatctaggacagctctagagg

SEQ ID NO: 11478 - DNA, 28 bp, synthetic construct
  source 1..28: mol_type = other DNA
ctgacctctagagctgtcctagataagg

SEQ ID NO: 11479 - DNA, 28 bp, synthetic construct
  source 1..28: mol_type = other DNA
tccgcacactgaacgagagctctcctgg

SEQ ID NO: 11480 - DNA, 28 bp, synthetic construct
  source 1..28: mol_type = other DNA
tccaggagagctctcgttcagtgtgcgg

SEQ ID NO: 11481 - DNA, 28 bp, synthetic construct
  source 1..28: mol_type = other DNA
gctctcctggactgatgtcactgcaagg

SEQ ID NO: 11482 - DNA, 28 bp, synthetic construct
  source 1..28: mol_type = other DNA
ctgaaccttgcagtgacatcagtccagg

SEQ ID NO: 11483 - DNA, 28 bp, synthetic construct
  source 1..28: mol_type = other DNA
ctggactgatgtcactgcaaggttcagg

SEQ ID NO: 11484 - DNA, 28 bp, synthetic construct
  source 1..28: mol_type = other DNA
gactgatgtcactgcaaggttcaggagg

SEQ ID NO: 11485 - DNA, 28 bp, synthetic construct
  source 1..28: mol_type = other DNA
actgatgtcactgcaaggttcaggaggg

SEQ ID NO: 11486 - DNA, 28 bp, synthetic construct
  source 1..28: mol_type = other DNA
tgcaaggttcaggagggaagtagttagg

SEQ ID NO: 11487 - DNA, 28 bp, synthetic construct
  source 1..28: mol_type = other DNA
gcaaggttcaggagggaagtagttaggg

SEQ ID NO: 11488 - DNA, 28 bp, synthetic construct
  source 1..28: mol_type = other DNA
ttagggtccaaagtcccagaaaaagagg

SEQ ID NO: 11489 - DNA, 28 bp, synthetic construct
  source 1..28: mol_type = other DNA
tagggtccaaagtcccagaaaaagaggg

SEQ ID NO: 11490 - DNA, 28 bp, synthetic construct
  source 1..28: mol_type = other DNA
gtccaaagtcccagaaaaagagggatgg

SEQ ID NO: 11491 - DNA, 28 bp, synthetic construct
  source 1..28: mol_type = other DNA
tccaaagtcccagaaaaagagggatggg

SEQ ID NO: 11492 - DNA, 28 bp, synthetic construct
  source 1..28: mol_type = other DNA
tcccatccctctttttctgggactttgg

SEQ ID NO: 11493 - DNA, 28 bp, synthetic construct
  source 1..28: mol_type = other DNA
ctctttgtcccatccctctttttctggg

SEQ ID NO: 11494 - DNA, 28 bp, synthetic construct
  source 1..28: mol_type = other DNA
tctctttgtcccatccctctttttctgg

SEQ ID NO: 11495 - DNA, 28 bp, synthetic construct
  source 1..28: mol_type = other DNA
atgggacaaagagagaaaacatacttgg

SEQ ID NO: 11496 - DNA, 28 bp, synthetic construct
  source 1..28: mol_type = other DNA
tgggacaaagagagaaaacatacttggg

SEQ ID NO: 11497 - DNA, 28 bp, synthetic construct
  source 1..28: mol_type = other DNA
gggacaaagagagaaaacatacttgggg

SEQ ID NO: 11498 - DNA, 28 bp, synthetic construct
  source 1..28: mol_type = other DNA
aaagagagaaaacatacttggggtctgg

SEQ ID NO: 11499 - DNA, 28 bp, synthetic construct
  source 1..28: mol_type = other DNA
agtagcaccacatgaatgcatgtgttgg

SEQ ID NO: 11500 - DNA, 28 bp, synthetic construct
  source 1..28: mol_type = other DNA
gtagcaccacatgaatgcatgtgttggg

SEQ ID NO: 11501 - DNA, 28 bp, synthetic construct
  source 1..28: mol_type = other DNA
tagcaccacatgaatgcatgtgttgggg

SEQ ID NO: 11502 - DNA, 28 bp, synthetic construct
  source 1..28: mol_type = other DNA
acaatccccaacacatgcattcatgtgg

SEQ ID NO: 11503 - DNA, 28 bp, synthetic construct
  source 1..28: mol_type = other DNA
gtgttggggattgtcatcaccctccagg

SEQ ID NO: 11504 - DNA, 28 bp, synthetic construct
  source 1..28: mol_type = other DNA
ctctgggtgggtggcatctcctggaggg

SEQ ID NO: 11505 - DNA, 28 bp, synthetic construct
  source 1..28: mol_type = other DNA
cctccaggagatgccacccacccagagg

SEQ ID NO: 11506 - DNA, 28 bp, synthetic construct
  source 1..28: mol_type = other DNA
ggtcctctgggtgggtggcatctcctgg

SEQ ID NO: 11507 - DNA, 28 bp, synthetic construct
  source 1..28: mol_type = other DNA
ggttctctggggtcctctgggtgggtgg

SEQ ID NO: 11508 - DNA, 28 bp, synthetic construct
  source 1..28: mol_type = other DNA
cccacccagaggaccccagagaaccagg

SEQ ID NO: 11509 - DNA, 28 bp, synthetic construct
  source 1..28: mol_type = other DNA
tcctggttctctggggtcctctgggtgg

SEQ ID NO: 11510 - DNA, 28 bp, synthetic construct
  source 1..28: mol_type = other DNA
cccagaggaccccagagaaccaggaagg

SEQ ID NO: 11511 - DNA, 28 bp, synthetic construct
  source 1..28: mol_type = other DNA
gccttcctggttctctggggtcctctgg

SEQ ID NO: 11512 - DNA, 28 bp, synthetic construct
  source 1..28: mol_type = other DNA
gaggaccccagagaaccaggaaggctgg

SEQ ID NO: 11513 - DNA, 28 bp, synthetic construct
  source 1..28: mol_type = other DNA
aggaccccagagaaccaggaaggctggg

SEQ ID NO: 11514 - DNA, 28 bp, synthetic construct
  source 1..28: mol_type = other DNA
ccccagagaaccaggaaggctgggcagg

SEQ ID NO: 11515 - DNA, 28 bp, synthetic construct
  source 1..28: mol_type = other DNA
tcctgcccagccttcctggttctctggg

SEQ ID NO: 11516 - DNA, 28 bp, synthetic construct
  source 1..28: mol_type = other DNA
gtcctgcccagccttcctggttctctgg

SEQ ID NO: 11517 - DNA, 28 bp, synthetic construct
  source 1..28: mol_type = other DNA
accaggaaggctgggcaggacagccagg

SEQ ID NO: 11518 - DNA, 28 bp, synthetic construct
  source 1..28: mol_type = other DNA
gcctggctgtcctgcccagccttcctgg

SEQ ID NO: 11519 - DNA, 28 bp, synthetic construct
  source 1..28: mol_type = other DNA
acagccaggcagtctttacacagagagg

SEQ ID NO: 11520 - DNA, 28 bp, synthetic construct
  source 1..28: mol_type = other DNA
caggcctctctgtgtaaagactgcctgg

SEQ ID NO: 11521 - DNA, 28 bp, synthetic construct
  source 1..28: mol_type = other DNA
caggcagtctttacacagagaggcctgg

SEQ ID NO: 11522 - DNA, 28 bp, synthetic construct
  source 1..28: mol_type = other DNA
aggcagtctttacacagagaggcctggg

SEQ ID NO: 11523 - DNA, 28 bp, synthetic construct
  source 1..28: mol_type = other DNA
cagtctttacacagagaggcctgggcgg

SEQ ID NO: 11524 - DNA, 28 bp, synthetic construct
  source 1..28: mol_type = other DNA
ctttacacagagaggcctgggcggctgg

SEQ ID NO: 11525 - DNA, 28 bp, synthetic construct
  source 1..28: mol_type = other DNA
cacagagaggcctgggcggctggccagg

SEQ ID NO: 11526 - DNA, 28 bp, synthetic construct
  source 1..28: mol_type = other DNA
gagaggcctgggcggctggccaggcagg

SEQ ID NO: 11527 - DNA, 28 bp, synthetic construct
  source 1..28: mol_type = other DNA
aggctgcctgcctggccagccgcccagg

SEQ ID NO: 11528 - DNA, 28 bp, synthetic construct
  source 1..28: mol_type = other DNA
ctggccaggcaggcagccttcccgaagg

SEQ ID NO: 11529 - DNA, 28 bp, synthetic construct
  source 1..28: mol_type = other DNA
gccaggcaggcagccttcccgaaggcgg

SEQ ID NO: 11530 - DNA, 28 bp, synthetic construct
  source 1..28: mol_type = other DNA
ccaggcaggcagccttcccgaaggcggg

SEQ ID NO: 11531 - DNA, 28 bp, synthetic construct
  source 1..28: mol_type = other DNA
aggcagccttcccgaaggcgggactagg

SEQ ID NO: 11532 - DNA, 28 bp, synthetic construct
  source 1..28: mol_type = other DNA
cacacgcctagtcccgccttcgggaagg

SEQ ID NO: 11533 - DNA, 28 bp, synthetic construct
  source 1..28: mol_type = other DNA
gcagcacacgcctagtcccgccttcggg

SEQ ID NO: 11534 - DNA, 28 bp, synthetic construct
  source 1..28: mol_type = other DNA
agcagcacacgcctagtcccgccttcgg

SEQ ID NO: 11535 - DNA, 28 bp, synthetic construct
  source 1..28: mol_type = other DNA
gaaggcgggactaggcgtgtgctgctgg

SEQ ID NO: 11536 - DNA, 28 bp, synthetic construct
  source 1..28: mol_type = other DNA
gctgctggacatgactaatccaccccgg

SEQ ID NO: 11537 - DNA, 28 bp, synthetic construct
  source 1..28: mol_type = other DNA
ctgctggacatgactaatccaccccggg

SEQ ID NO: 11538 - DNA, 28 bp, synthetic construct
  source 1..28: mol_type = other DNA
tgctggacatgactaatccaccccgggg

SEQ ID NO: 11539 - DNA, 28 bp, synthetic construct
  source 1..28: mol_type = other DNA
gctggacatgactaatccaccccggggg

SEQ ID NO: 11540 - DNA, 28 bp, synthetic construct
  source 1..28: mol_type = other DNA
acatgactaatccaccccgggggacagg

SEQ ID NO: 11541 - DNA, 28 bp, synthetic construct
  source 1..28: mol_type = other DNA
ctaatccaccccgggggacaggcccagg

SEQ ID NO: 11542 - DNA, 28 bp, synthetic construct
  source 1..28: mol_type = other DNA
taatccaccccgggggacaggcccaggg

SEQ ID NO: 11543 - DNA, 28 bp, synthetic construct
  source 1..28: mol_type = other DNA
agagccctgggcctgtcccccggggtgg

SEQ ID NO: 11544 - DNA, 28 bp, synthetic construct
  source 1..28: mol_type = other DNA
ctcagagccctgggcctgtcccccgggg

SEQ ID NO: 11545 - DNA, 28 bp, synthetic construct
  source 1..28: mol_type = other DNA
cccgggggacaggcccagggctctgagg

SEQ ID NO: 11546 - DNA, 28 bp, synthetic construct
  source 1..28: mol_type = other DNA
tcctcagagccctgggcctgtcccccgg

SEQ ID NO: 11547 - DNA, 28 bp, synthetic construct
  source 1..28: mol_type = other DNA
aagttatggaattcctcagagccctggg

SEQ ID NO: 11548 - DNA, 28 bp, synthetic construct
  source 1..28: mol_type = other DNA
caagttatggaattcctcagagccctgg

SEQ ID NO: 11549 - DNA, 28 bp, synthetic construct
  source 1..28: mol_type = other DNA
ggctctgaggaattccataacttgatgg

SEQ ID NO: 11550 - DNA, 28 bp, synthetic construct
  source 1..28: mol_type = other DNA
aaagggacaggactccatcaagttatgg

SEQ ID NO: 11551 - DNA, 28 bp, synthetic construct
  source 1..28: mol_type = other DNA
acttgatggagtcctgtccctttcacgg

SEQ ID NO: 11552 - DNA, 28 bp, synthetic construct
  source 1..28: mol_type = other DNA
gtcctgtccctttcacggaagaaaatgg

SEQ ID NO: 11553 - DNA, 28 bp, synthetic construct
  source 1..28: mol_type = other DNA
gtccattttcttccgtgaaagggacagg

SEQ ID NO: 11554 - DNA, 28 bp, synthetic construct
  source 1..28: mol_type = other DNA
cttaagtccattttcttccgtgaaaggg

SEQ ID NO: 11555 - DNA, 28 bp, synthetic construct
  source 1..28: mol_type = other DNA
gcttaagtccattttcttccgtgaaagg

SEQ ID NO: 11556 - DNA, 28 bp, synthetic construct
  source 1..28: mol_type = other DNA
aaaatggacttaagctatagcttgctgg

SEQ ID NO: 11557 - DNA, 28 bp, synthetic construct
  source 1..28: mol_type = other DNA
aaatggacttaagctatagcttgctggg

SEQ ID NO: 11558 - DNA, 28 bp, synthetic construct
  source 1..28: mol_type = other DNA
ggacttaagctatagcttgctgggaagg

SEQ ID NO: 11559 - DNA, 28 bp, synthetic construct
  source 1..28: mol_type = other DNA
agctatagcttgctgggaaggaatctgg

SEQ ID NO: 11560 - DNA, 28 bp, synthetic construct
  source 1..28: mol_type = other DNA
cattggacacggactcttaataaaacgg

SEQ ID NO: 11561 - DNA, 28 bp, synthetic construct
  source 1..28: mol_type = other DNA
tattaagagtccgtgtccaatgattagg

SEQ ID NO: 11562 - DNA, 28 bp, synthetic construct
  source 1..28: mol_type = other DNA
aagagtccgtgtccaatgattaggcagg

SEQ ID NO: 11563 - DNA, 28 bp, synthetic construct
  source 1..28: mol_type = other DNA
gtaggtcctgcctaatcattggacacgg

SEQ ID NO: 11564 - DNA, 28 bp, synthetic construct
  source 1..28: mol_type = other DNA
ctctacgtaggtcctgcctaatcattgg

SEQ ID NO: 11565 - DNA, 28 bp, synthetic construct
  source 1..28: mol_type = other DNA
caatgattaggcaggacctacgtagagg

SEQ ID NO: 11566 - DNA, 28 bp, synthetic construct
  source 1..28: mol_type = other DNA
aatgattaggcaggacctacgtagaggg

SEQ ID NO: 11567 - DNA, 28 bp, synthetic construct
  source 1..28: mol_type = other DNA
cactggtttctctctccctctacgtagg

SEQ ID NO: 11568 - DNA, 28 bp, synthetic construct
  source 1..28: mol_type = other DNA
agttatttacatgcactgattattgagg

SEQ ID NO: 11569 - DNA, 28 bp, synthetic construct
  source 1..28: mol_type = other DNA
gttatttacatgcactgattattgaggg

SEQ ID NO: 11570 - DNA, 28 bp, synthetic construct
  source 1..28: mol_type = other DNA
ttatttctagttagaataaaatcccagg

SEQ ID NO: 11571 - DNA, 28 bp, synthetic construct
  source 1..28: mol_type = other DNA
tatttctagttagaataaaatcccaggg

SEQ ID NO: 11572 - DNA, 28 bp, synthetic construct
  source 1..28: mol_type = other DNA
tctagttagaataaaatcccagggatgg

SEQ ID NO: 11573 - DNA, 28 bp, synthetic construct
  source 1..28: mol_type = other DNA
ctagttagaataaaatcccagggatggg

SEQ ID NO: 11574 - DNA, 28 bp, synthetic construct
  source 1..28: mol_type = other DNA
tagaataaaatcccagggatgggacagg

SEQ ID NO: 11575 - DNA, 28 bp, synthetic construct
  source 1..28: mol_type = other DNA
aaatcccagggatgggacaggcccgtgg

SEQ ID NO: 11576 - DNA, 28 bp, synthetic construct
  source 1..28: mol_type = other DNA
aatcccagggatgggacaggcccgtggg

SEQ ID NO: 11577 - DNA, 28 bp, synthetic construct
  source 1..28: mol_type = other DNA
tctcccacgggcctgtcccatccctggg

SEQ ID NO: 11578 - DNA, 28 bp, synthetic construct
  source 1..28: mol_type = other DNA
ttctcccacgggcctgtcccatccctgg

SEQ ID NO: 11579 - DNA, 28 bp, synthetic construct
  source 1..28: mol_type = other DNA
gggacaggcccgtgggagaacatgcagg

SEQ ID NO: 11580 - DNA, 28 bp, synthetic construct
  source 1..28: mol_type = other DNA
agtagactcctgcatgttctcccacggg

SEQ ID NO: 11581 - DNA, 28 bp, synthetic construct
  source 1..28: mol_type = other DNA
cagtagactcctgcatgttctcccacgg

SEQ ID NO: 11582 - DNA, 28 bp, synthetic construct
  source 1..28: mol_type = other DNA
atgcaggagtctactgccaaaacacagg

SEQ ID NO: 11583 - DNA, 28 bp, synthetic construct
  source 1..28: mol_type = other DNA
ctgccaaaacacaggtttcccactgtgg

SEQ ID NO: 11584 - DNA, 28 bp, synthetic construct
  source 1..28: mol_type = other DNA
gatccacagtgggaaacctgtgttttgg

SEQ ID NO: 11585 - DNA, 28 bp, synthetic construct
  source 1..28: mol_type = other DNA
agactggggagtggggatccacagtggg

SEQ ID NO: 11586 - DNA, 28 bp, synthetic construct
  source 1..28: mol_type = other DNA
cagactggggagtggggatccacagtgg

SEQ ID NO: 11587 - DNA, 28 bp, synthetic construct
  source 1..28: mol_type = other DNA
agggtctcaggcagactggggagtgggg

SEQ ID NO: 11588 - DNA, 28 bp, synthetic construct
  source 1..28: mol_type = other DNA
tagggtctcaggcagactggggagtggg

SEQ ID NO: 11589 - DNA, 28 bp, synthetic construct
  source 1..28: mol_type = other DNA
ctagggtctcaggcagactggggagtgg

SEQ ID NO: 11590 - DNA, 28 bp, synthetic construct
  source 1..28: mol_type = other DNA
cactccccagtctgcctgagaccctagg

SEQ ID NO: 11591 - DNA, 28 bp, synthetic construct
  source 1..28: mol_type = other DNA
actccccagtctgcctgagaccctaggg

SEQ ID NO: 11592 - DNA, 28 bp, synthetic construct
  source 1..28: mol_type = other DNA
tggccctagggtctcaggcagactgggg

SEQ ID NO: 11593 - DNA, 28 bp, synthetic construct
  source 1..28: mol_type = other DNA
ctggccctagggtctcaggcagactggg

SEQ ID NO: 11594 - DNA, 28 bp, synthetic construct
  source 1..28: mol_type = other DNA
gctggccctagggtctcaggcagactgg

SEQ ID NO: 11595 - DNA, 28 bp, synthetic construct
  source 1..28: mol_type = other DNA
gcctgagaccctagggccagctctcagg

SEQ ID NO: 11596 - DNA, 28 bp, synthetic construct
  source 1..28: mol_type = other DNA
acctgagagctggccctagggtctcagg

SEQ ID NO: 11597 - DNA, 28 bp, synthetic construct
  source 1..28: mol_type = other DNA
tgagaccctagggccagctctcaggtgg

SEQ ID NO: 11598 - DNA, 28 bp, synthetic construct
  source 1..28: mol_type = other DNA
gcagaccacctgagagctggccctaggg

SEQ ID NO: 11599 - DNA, 28 bp, synthetic construct
  source 1..28: mol_type = other DNA
tgcagaccacctgagagctggccctagg

SEQ ID NO: 11600 - DNA, 28 bp, synthetic construct
  source 1..28: mol_type = other DNA
ggcgtgctgcagaccacctgagagctgg

SEQ ID NO: 11601 - DNA, 28 bp, synthetic construct
  source 1..28: mol_type = other DNA
taggctggtgcagctgtcagtgagctgg

SEQ ID NO: 11602 - DNA, 28 bp, synthetic construct
  source 1..28: mol_type = other DNA
ctcactgacagctgcaccagcctagcgg

SEQ ID NO: 11603 - DNA, 28 bp, synthetic construct
  source 1..28: mol_type = other DNA
tgcaccagcctagcggcaaccccgttgg

SEQ ID NO: 11604 - DNA, 28 bp, synthetic construct
  source 1..28: mol_type = other DNA
acggccaacggggttgccgctaggctgg

SEQ ID NO: 11605 - DNA, 28 bp, synthetic construct
  source 1..28: mol_type = other DNA
gtttacggccaacggggttgccgctagg

SEQ ID NO: 11606 - DNA, 28 bp, synthetic construct
  source 1..28: mol_type = other DNA
cggcaaccccgttggccgtaaacacagg

SEQ ID NO: 11607 - DNA, 28 bp, synthetic construct
  source 1..28: mol_type = other DNA
taacatcctgtgtttacggccaacgggg

SEQ ID NO: 11608 - DNA, 28 bp, synthetic construct
  source 1..28: mol_type = other DNA
ctaacatcctgtgtttacggccaacggg

SEQ ID NO: 11609 - DNA, 28 bp, synthetic construct
  source 1..28: mol_type = other DNA
gctaacatcctgtgtttacggccaacgg

SEQ ID NO: 11610 - DNA, 28 bp, synthetic construct
  source 1..28: mol_type = other DNA
agatggagctaacatcctgtgtttacgg

SEQ ID NO: 11611 - DNA, 28 bp, synthetic construct
  source 1..28: mol_type = other DNA
caggatgttagctccatctctcagcagg

SEQ ID NO: 11612 - DNA, 28 bp, synthetic construct
  source 1..28: mol_type = other DNA
aggatgttagctccatctctcagcaggg

SEQ ID NO: 11613 - DNA, 28 bp, synthetic construct
  source 1..28: mol_type = other DNA
ggatgttagctccatctctcagcagggg

SEQ ID NO: 11614 - DNA, 28 bp, synthetic construct
  source 1..28: mol_type = other DNA
gttagctccatctctcagcaggggctgg

SEQ ID NO: 11615 - DNA, 28 bp, synthetic construct
  source 1..28: mol_type = other DNA
ctggcgaccagcccctgctgagagatgg

SEQ ID NO: 11616 - DNA, 28 bp, synthetic construct
  source 1..28: mol_type = other DNA
catctctcagcaggggctggtcgccagg

SEQ ID NO: 11617 - DNA, 28 bp, synthetic construct
  source 1..28: mol_type = other DNA
agcaggggctggtcgccaggccttctgg

SEQ ID NO: 11618 - DNA, 28 bp, synthetic construct
  source 1..28: mol_type = other DNA
gcaggggctggtcgccaggccttctggg

SEQ ID NO: 11619 - DNA, 28 bp, synthetic construct
  source 1..28: mol_type = other DNA
tggtcgccaggccttctgggcaccatgg

SEQ ID NO: 11620 - DNA, 28 bp, synthetic construct
  source 1..28: mol_type = other DNA
agggagccatggtgcccagaaggcctgg

SEQ ID NO: 11621 - DNA, 28 bp, synthetic construct
  source 1..28: mol_type = other DNA
tagggagggagccatggtgcccagaagg

SEQ ID NO: 11622 - DNA, 28 bp, synthetic construct
  source 1..28: mol_type = other DNA
aggggagaggctagggagggagccatgg

SEQ ID NO: 11623 - DNA, 28 bp, synthetic construct
  source 1..28: mol_type = other DNA
gctggcgcaggggagaggctagggaggg

SEQ ID NO: 11624 - DNA, 28 bp, synthetic construct
  source 1..28: mol_type = other DNA
ggctggcgcaggggagaggctagggagg

SEQ ID NO: 11625 - DNA, 28 bp, synthetic construct
  source 1..28: mol_type = other DNA
tcaggctggcgcaggggagaggctaggg

SEQ ID NO: 11626 - DNA, 28 bp, synthetic construct
  source 1..28: mol_type = other DNA
ctcaggctggcgcaggggagaggctagg

SEQ ID NO: 11627 - DNA, 28 bp, synthetic construct
  source 1..28: mol_type = other DNA
agatgctcaggctggcgcaggggagagg

SEQ ID NO: 11628 - DNA, 28 bp, synthetic construct
  source 1..28: mol_type = other DNA
ggcgcagatgctcaggctggcgcagggg

SEQ ID NO: 11629 - DNA, 28 bp, synthetic construct
  source 1..28: mol_type = other DNA
gggcgcagatgctcaggctggcgcaggg

SEQ ID NO: 11630 - DNA, 28 bp, synthetic construct
  source 1..28: mol_type = other DNA
ggggcgcagatgctcaggctggcgcagg

SEQ ID NO: 11631 - DNA, 28 bp, synthetic construct
  source 1..28: mol_type = other DNA
ttctcaggggcgcagatgctcaggctgg

SEQ ID NO: 11632 - DNA, 28 bp, synthetic construct
  source 1..28: mol_type = other DNA
attattctcaggggcgcagatgctcagg

SEQ ID NO: 11633 - DNA, 28 bp, synthetic construct
  source 1..28: mol_type = other DNA
agcatctgcgcccctgagaataatgagg

SEQ ID NO: 11634 - DNA, 28 bp, synthetic construct
  source 1..28: mol_type = other DNA
tgtgcactttcctcattattctcagggg

SEQ ID NO: 11635 - DNA, 28 bp, synthetic construct
  source 1..28: mol_type = other DNA
gtgtgcactttcctcattattctcaggg

SEQ ID NO: 11636 - DNA, 28 bp, synthetic construct
  source 1..28: mol_type = other DNA
agtgtgcactttcctcattattctcagg

SEQ ID NO: 11637 - DNA, 28 bp, synthetic construct
  source 1..28: mol_type = other DNA
gagaataatgaggaaagtgcacacttgg

SEQ ID NO: 11638 - DNA, 28 bp, synthetic construct
  source 1..28: mol_type = other DNA
aataatgaggaaagtgcacacttggagg

SEQ ID NO: 11639 - DNA, 28 bp, synthetic construct
  source 1..28: mol_type = other DNA
gagcagtcccctctccactcccacctgg

SEQ ID NO: 11640 - DNA, 28 bp, synthetic construct
  source 1..28: mol_type = other DNA
ctgggtgccaggtgggagtggagagggg

SEQ ID NO: 11641 - DNA, 28 bp, synthetic construct
  source 1..28: mol_type = other DNA
gctgggtgccaggtgggagtggagaggg

SEQ ID NO: 11642 - DNA, 28 bp, synthetic construct
  source 1..28: mol_type = other DNA
tgctgggtgccaggtgggagtggagagg

SEQ ID NO: 11643 - DNA, 28 bp, synthetic construct
  source 1..28: mol_type = other DNA
agtgatgctgggtgccaggtgggagtgg

SEQ ID NO: 11644 - DNA, 28 bp, synthetic construct
  source 1..28: mol_type = other DNA
caggtagtgatgctgggtgccaggtggg

SEQ ID NO: 11645 - DNA, 28 bp, synthetic construct
  source 1..28: mol_type = other DNA
gcaggtagtgatgctgggtgccaggtgg

SEQ ID NO: 11646 - DNA, 28 bp, synthetic construct
  source 1..28: mol_type = other DNA
gaggcaggtagtgatgctgggtgccagg

SEQ ID NO: 11647 - DNA, 28 bp, synthetic construct
  source 1..28: mol_type = other DNA
ggaggtggaggcaggtagtgatgctggg

SEQ ID NO: 11648 - DNA, 28 bp, synthetic construct
  source 1..28: mol_type = other DNA
gggaggtggaggcaggtagtgatgctgg

SEQ ID NO: 11649 - DNA, 28 bp, synthetic construct
  source 1..28: mol_type = other DNA
cactacctgcctccacctcccactgagg

SEQ ID NO: 11650 - DNA, 28 bp, synthetic construct
  source 1..28: mol_type = other DNA
agcagcctcagtgggaggtggaggcagg

SEQ ID NO: 11651 - DNA, 28 bp, synthetic construct
  source 1..28: mol_type = other DNA
gagcagcagcctcagtgggaggtggagg

SEQ ID NO: 11652 - DNA, 28 bp, synthetic construct
  source 1..28: mol_type = other DNA
tctgagcagcagcctcagtgggaggtgg

SEQ ID NO: 11653 - DNA, 28 bp, synthetic construct
  source 1..28: mol_type = other DNA
cctcccactgaggctgctgctcagaagg

SEQ ID NO: 11654 - DNA, 28 bp, synthetic construct
  source 1..28: mol_type = other DNA
cccactgaggctgctgctcagaaggtgg

SEQ ID NO: 11655 - DNA, 28 bp, synthetic construct
  source 1..28: mol_type = other DNA
ccactgaggctgctgctcagaaggtggg

SEQ ID NO: 11656 - DNA, 28 bp, synthetic construct
  source 1..28: mol_type = other DNA
ctgctgctcagaaggtgggctctaatgg

SEQ ID NO: 11657 - DNA, 28 bp, synthetic construct
  source 1..28: mol_type = other DNA
tgctgctcagaaggtgggctctaatggg

SEQ ID NO: 11658 - DNA, 28 bp, synthetic construct
  source 1..28: mol_type = other DNA
gctgctcagaaggtgggctctaatgggg

SEQ ID NO: 11659 - DNA, 28 bp, synthetic construct
  source 1..28: mol_type = other DNA
gaaggtgggctctaatggggaacccagg

SEQ ID NO: 11660 - DNA, 28 bp, synthetic construct
  source 1..28: mol_type = other DNA
aaggtgggctctaatggggaacccaggg

SEQ ID NO: 11661 - DNA, 28 bp, synthetic construct
  source 1..28: mol_type = other DNA
acccagggtccaacgtgcagacccacgg

SEQ ID NO: 11662 - DNA, 28 bp, synthetic construct
  source 1..28: mol_type = other DNA
cccagggtccaacgtgcagacccacggg

SEQ ID NO: 11663 - DNA, 28 bp, synthetic construct
  source 1..28: mol_type = other DNA
ccagggtccaacgtgcagacccacgggg

SEQ ID NO: 11664 - DNA, 28 bp, synthetic construct
  source 1..28: mol_type = other DNA
tttcaagccccgtgggtctgcacgttgg

SEQ ID NO: 11665 - DNA, 28 bp, synthetic construct
  source 1..28: mol_type = other DNA
tgcagacccacggggcttgaaaagaagg

SEQ ID NO: 11666 - DNA, 28 bp, synthetic construct
  source 1..28: mol_type = other DNA
gcagacccacggggcttgaaaagaaggg

SEQ ID NO: 11667 - DNA, 28 bp, synthetic construct
  source 1..28: mol_type = other DNA
acagtcccttcttttcaagccccgtggg

SEQ ID NO: 11668 - DNA, 28 bp, synthetic construct
  source 1..28: mol_type = other DNA
aacagtcccttcttttcaagccccgtgg

SEQ ID NO: 11669 - DNA, 28 bp, synthetic construct
  source 1..28: mol_type = other DNA
agaagggactgttagttagaactgcagg

SEQ ID NO: 11670 - DNA, 28 bp, synthetic construct
  source 1..28: mol_type = other DNA
agggactgttagttagaactgcaggagg

SEQ ID NO: 11671 - DNA, 28 bp, synthetic construct
  source 1..28: mol_type = other DNA
gggactgttagttagaactgcaggaggg

SEQ ID NO: 11672 - DNA, 28 bp, synthetic construct
  source 1..28: mol_type = other DNA
aactgcaggagggacacgcaagtccagg

SEQ ID NO: 11673 - DNA, 28 bp, synthetic construct
  source 1..28: mol_type = other DNA
agggacacgcaagtccaggtgcgtgtgg

SEQ ID NO: 11674 - DNA, 28 bp, synthetic construct
  source 1..28: mol_type = other DNA
cgcaagtccaggtgcgtgtggagttagg

SEQ ID NO: 11675 - DNA, 28 bp, synthetic construct
  source 1..28: mol_type = other DNA
gcaagtccaggtgcgtgtggagttaggg

SEQ ID NO: 11676 - DNA, 28 bp, synthetic construct
  source 1..28: mol_type = other DNA
aatctgccctaactccacacgcacctgg

SEQ ID NO: 11677 - DNA, 28 bp, synthetic construct
  source 1..28: mol_type = other DNA
gtgcgtgtggagttagggcagattcagg

SEQ ID NO: 11678 - DNA, 28 bp, synthetic construct
  source 1..28: mol_type = other DNA
agccaacacagcaacgagcacactctgg

SEQ ID NO: 11679 - DNA, 28 bp, synthetic construct
  source 1..28: mol_type = other DNA
gccaacacagcaacgagcacactctggg

SEQ ID NO: 11680 - DNA, 28 bp, synthetic construct
  source 1..28: mol_type = other DNA
ccaacacagcaacgagcacactctgggg

SEQ ID NO: 11681 - DNA, 28 bp, synthetic construct
  source 1..28: mol_type = other DNA
acacagcaacgagcacactctggggagg

SEQ ID NO: 11682 - DNA, 28 bp, synthetic construct
  source 1..28: mol_type = other DNA
cacagcaacgagcacactctggggaggg

SEQ ID NO: 11683 - DNA, 28 bp, synthetic construct
  source 1..28: mol_type = other DNA
acagcaacgagcacactctggggagggg

SEQ ID NO: 11684 - DNA, 28 bp, synthetic construct
  source 1..28: mol_type = other DNA
caacgagcacactctggggaggggtagg

SEQ ID NO: 11685 - DNA, 28 bp, synthetic construct
  source 1..28: mol_type = other DNA
gcacactctggggaggggtaggcaatgg

SEQ ID NO: 11686 - DNA, 28 bp, synthetic construct
  source 1..28: mol_type = other DNA
actctggggaggggtaggcaatggctgg

SEQ ID NO: 11687 - DNA, 28 bp, synthetic construct
  source 1..28: mol_type = other DNA
ctctggggaggggtaggcaatggctggg

SEQ ID NO: 11688 - DNA, 28 bp, synthetic construct
  source 1..28: mol_type = other DNA
tctggggaggggtaggcaatggctgggg

SEQ ID NO: 11689 - DNA, 28 bp, synthetic construct
  source 1..28: mol_type = other DNA
gaggggtaggcaatggctggggcccagg

SEQ ID NO: 11690 - DNA, 28 bp, synthetic construct
  source 1..28: mol_type = other DNA
taggcaatggctggggcccaggtgatgg

SEQ ID NO: 11691 - DNA, 28 bp, synthetic construct
  source 1..28: mol_type = other DNA
caatggctggggcccaggtgatggcagg

SEQ ID NO: 11692 - DNA, 28 bp, synthetic construct
  source 1..28: mol_type = other DNA
aatggctggggcccaggtgatggcaggg

SEQ ID NO: 11693 - DNA, 28 bp, synthetic construct
  source 1..28: mol_type = other DNA
tctgctgctggccctgccatcacctggg

SEQ ID NO: 11694 - DNA, 28 bp, synthetic construct
  source 1..28: mol_type = other DNA
gtctgctgctggccctgccatcacctgg

SEQ ID NO: 11695 - DNA, 28 bp, synthetic construct
  source 1..28: mol_type = other DNA
ggtgatggcagggccagcagcagactgg

SEQ ID NO: 11696 - DNA, 28 bp, synthetic construct
  source 1..28: mol_type = other DNA
cagggccagcagcagactggcgatgcgg

SEQ ID NO: 11697 - DNA, 28 bp, synthetic construct
  source 1..28: mol_type = other DNA
gccagcagcagactggcgatgcggctgg

SEQ ID NO: 11698 - DNA, 28 bp, synthetic construct
  source 1..28: mol_type = other DNA
gccagccgcatcgccagtctgctgctgg

SEQ ID NO: 11699 - DNA, 28 bp, synthetic construct
  source 1..28: mol_type = other DNA
tggtggatgtggagcagactgcagctgg

SEQ ID NO: 11700 - DNA, 28 bp, synthetic construct
  source 1..28: mol_type = other DNA
atgcttcgctggtttctggtggatgtgg

SEQ ID NO: 11701 - DNA, 28 bp, synthetic construct
  source 1..28: mol_type = other DNA
agggagatgcttcgctggtttctggtgg

SEQ ID NO: 11702 - DNA, 28 bp, synthetic construct
  source 1..28: mol_type = other DNA
ttcagggagatgcttcgctggtttctgg

SEQ ID NO: 11703 - DNA, 28 bp, synthetic construct
  source 1..28: mol_type = other DNA
aaaccagcgaagcatctccctgaagcgg

SEQ ID NO: 11704 - DNA, 28 bp, synthetic construct
  source 1..28: mol_type = other DNA
cggccgcttcagggagatgcttcgctgg

SEQ ID NO: 11705 - DNA, 28 bp, synthetic construct
  source 1..28: mol_type = other DNA
agtcacgtgcagtgcggccgcttcaggg

SEQ ID NO: 11706 - DNA, 28 bp, synthetic construct
  source 1..28: mol_type = other DNA
cagtcacgtgcagtgcggccgcttcagg

SEQ ID NO: 11707 - DNA, 28 bp, synthetic construct
  source 1..28: mol_type = other DNA
ggccgcactgcacgtgactgtgatacgg

SEQ ID NO: 11708 - DNA, 28 bp, synthetic construct
  source 1..28: mol_type = other DNA
gccgcactgcacgtgactgtgatacggg

SEQ ID NO: 11709 - DNA, 28 bp, synthetic construct
  source 1..28: mol_type = other DNA
ccgcactgcacgtgactgtgatacgggg

SEQ ID NO: 11710 - DNA, 28 bp, synthetic construct
  source 1..28: mol_type = other DNA
actgcacgtgactgtgatacggggaagg

SEQ ID NO: 11711 - DNA, 28 bp, synthetic construct
  source 1..28: mol_type = other DNA
cgtgactgtgatacggggaaggccctgg

SEQ ID NO: 11712 - DNA, 28 bp, synthetic construct
  source 1..28: mol_type = other DNA
gtgactgtgatacggggaaggccctggg

SEQ ID NO: 11713 - DNA, 28 bp, synthetic construct
  source 1..28: mol_type = other DNA
tgactgtgatacggggaaggccctgggg

SEQ ID NO: 11714 - DNA, 28 bp, synthetic construct
  source 1..28: mol_type = other DNA
ggccctggggacacgaagtctccactgg

SEQ ID NO: 11715 - DNA, 28 bp, synthetic construct
  source 1..28: mol_type = other DNA
caccagtggagacttcgtgtccccaggg

SEQ ID NO: 11716 - DNA, 28 bp, synthetic construct
  source 1..28: mol_type = other DNA
gcaccagtggagacttcgtgtccccagg

SEQ ID NO: 11717 - DNA, 28 bp, synthetic construct
  source 1..28: mol_type = other DNA
cgaagtctccactggtgcagaaagctgg

SEQ ID NO: 11718 - DNA, 28 bp, synthetic construct
  source 1..28: mol_type = other DNA
gaagtctccactggtgcagaaagctggg

SEQ ID NO: 11719 - DNA, 28 bp, synthetic construct
  source 1..28: mol_type = other DNA
ctccactggtgcagaaagctgggtgtgg

SEQ ID NO: 11720 - DNA, 28 bp, synthetic construct
  source 1..28: mol_type = other DNA
gaccacacccagctttctgcaccagtgg

SEQ ID NO: 11721 - DNA, 28 bp, synthetic construct
  source 1..28: mol_type = other DNA
cagaaagctgggtgtggtcacatcaagg

SEQ ID NO: 11722 - DNA, 28 bp, synthetic construct
  source 1..28: mol_type = other DNA
agaacacaagtcacctaacctgtttcgg

SEQ ID NO: 11723 - DNA, 28 bp, synthetic construct
  source 1..28: mol_type = other DNA
gacagcgaagactccgaaacaggttagg

SEQ ID NO: 11724 - DNA, 28 bp, synthetic construct
  source 1..28: mol_type = other DNA
cctgtttcggagtcttcgctgtcagagg

SEQ ID NO: 11725 - DNA, 28 bp, synthetic construct
  source 1..28: mol_type = other DNA
tcggagtcttcgctgtcagaggagctgg

SEQ ID NO: 11726 - DNA, 28 bp, synthetic construct
  source 1..28: mol_type = other DNA
tcgctgtcagaggagctggactcactgg

SEQ ID NO: 11727 - DNA, 28 bp, synthetic construct
  source 1..28: mol_type = other DNA
gactcactggagctctccgactctgagg

SEQ ID NO: 11728 - DNA, 28 bp, synthetic construct
  source 1..28: mol_type = other DNA
atgaagggcttctcgtcctcagagtcgg

SEQ ID NO: 11729 - DNA, 28 bp, synthetic construct
  source 1..28: mol_type = other DNA
tctgaggacgagaagcccttcatcttgg

SEQ ID NO: 11730 - DNA, 28 bp, synthetic construct
  source 1..28: mol_type = other DNA
gaggacgagaagcccttcatcttggagg

SEQ ID NO: 11731 - DNA, 28 bp, synthetic construct
  source 1..28: mol_type = other DNA
gagaagcccttcatcttggaggagccgg

SEQ ID NO: 11732 - DNA, 28 bp, synthetic construct
  source 1..28: mol_type = other DNA
tgattgccggctcctccaagatgaaggg

SEQ ID NO: 11733 - DNA, 28 bp, synthetic construct
  source 1..28: mol_type = other DNA
gtgattgccggctcctccaagatgaagg

SEQ ID NO: 11734 - DNA, 28 bp, synthetic construct
  source 1..28: mol_type = other DNA
cagctgagaaagttgatgtgattgccgg

SEQ ID NO: 11735 - DNA, 28 bp, synthetic construct
  source 1..28: mol_type = other DNA
actttctcagctgcaatccaagcaatgg

SEQ ID NO: 11736 - DNA, 28 bp, synthetic construct
  source 1..28: mol_type = other DNA
ctttctcagctgcaatccaagcaatggg

SEQ ID NO: 11737 - DNA, 28 bp, synthetic construct
  source 1..28: mol_type = other DNA
cagctgcaatccaagcaatgggagctgg

SEQ ID NO: 11738 - DNA, 28 bp, synthetic construct
  source 1..28: mol_type = other DNA
ggtgtgcttgggccccctgggcatgggg

SEQ ID NO: 11739 - DNA, 28 bp, synthetic construct
  source 1..28: mol_type = other DNA
aggtgtgcttgggccccctgggcatggg

SEQ ID NO: 11740 - DNA, 28 bp, synthetic construct
  source 1..28: mol_type = other DNA
aaggtgtgcttgggccccctgggcatgg

SEQ ID NO: 11741 - DNA, 28 bp, synthetic construct
  source 1..28: mol_type = other DNA
gcccagggggcccaagcacaccttgagg

SEQ ID NO: 11742 - DNA, 28 bp, synthetic construct
  source 1..28: mol_type = other DNA
acctcaaggtgtgcttgggccccctggg

SEQ ID NO: 11743 - DNA, 28 bp, synthetic construct
  source 1..28: mol_type = other DNA
aacctcaaggtgtgcttgggccccctgg

SEQ ID NO: 11744 - DNA, 28 bp, synthetic construct
  source 1..28: mol_type = other DNA
gaaaaggaaacctcaaggtgtgcttggg

SEQ ID NO: 11745 - DNA, 28 bp, synthetic construct
  source 1..28: mol_type = other DNA
agaaaaggaaacctcaaggtgtgcttgg

SEQ ID NO: 11746 - DNA, 28 bp, synthetic construct
  source 1..28: mol_type = other DNA
gtttgcggaagaaaaggaaacctcaagg

SEQ ID NO: 11747 - DNA, 28 bp, synthetic construct
  source 1..28: mol_type = other DNA
tgaggtttccttttcttccgcaaacagg

SEQ ID NO: 11748 - DNA, 28 bp, synthetic construct
  source 1..28: mol_type = other DNA
ggtttccttttcttccgcaaacaggagg

SEQ ID NO: 11749 - DNA, 28 bp, synthetic construct
  source 1..28: mol_type = other DNA
tgtcacctcctgtttgcggaagaaaagg

SEQ ID NO: 11750 - DNA, 28 bp, synthetic construct
  source 1..28: mol_type = other DNA
ggagcgctatgtcacctcctgtttgcgg

SEQ ID NO: 11751 - DNA, 28 bp, synthetic construct
  source 1..28: mol_type = other DNA
acatagcgctccagctcacgcagtgtgg

SEQ ID NO: 11752 - DNA, 28 bp, synthetic construct
  source 1..28: mol_type = other DNA
agcgctccagctcacgcagtgtggacgg

SEQ ID NO: 11753 - DNA, 28 bp, synthetic construct
  source 1..28: mol_type = other DNA
ctgaagccgtccacactgcgtgagctgg

SEQ ID NO: 11754 - DNA, 28 bp, synthetic construct
  source 1..28: mol_type = other DNA
cagctcacgcagtgtggacggcttcagg

SEQ ID NO: 11755 - DNA, 28 bp, synthetic construct
  source 1..28: mol_type = other DNA
agctcacgcagtgtggacggcttcaggg

SEQ ID NO: 11756 - DNA, 28 bp, synthetic construct
  source 1..28: mol_type = other DNA
gtctcaaagtcgatttcaatctcgtcgg

SEQ ID NO: 11757 - DNA, 28 bp, synthetic construct
  source 1..28: mol_type = other DNA
tctcaaagtcgatttcaatctcgtcggg

SEQ ID NO: 11758 - DNA, 28 bp, synthetic construct
  source 1..28: mol_type = other DNA
ctcaaagtcgatttcaatctcgtcgggg

SEQ ID NO: 11759 - DNA, 28 bp, synthetic construct
  source 1..28: mol_type = other DNA
aagtcgatttcaatctcgtcggggttgg

SEQ ID NO: 11760 - DNA, 28 bp, synthetic construct
  source 1..28: mol_type = other DNA
aatctcgtcggggttggaattcttcagg

SEQ ID NO: 11761 - DNA, 28 bp, synthetic construct
  source 1..28: mol_type = other DNA
atctcgtcggggttggaattcttcaggg

SEQ ID NO: 11762 - DNA, 28 bp, synthetic construct
  source 1..28: mol_type = other DNA
tcgtcggggttggaattcttcagggagg

SEQ ID NO: 11763 - DNA, 28 bp, synthetic construct
  source 1..28: mol_type = other DNA
cgtcggggttggaattcttcagggaggg

SEQ ID NO: 11764 - DNA, 28 bp, synthetic construct
  source 1..28: mol_type = other DNA
attcttcagggagggctcccgtgactgg

SEQ ID NO: 11765 - DNA, 28 bp, synthetic construct
  source 1..28: mol_type = other DNA
cgcgtggtgcacatcatccagtcacggg

SEQ ID NO: 11766 - DNA, 28 bp, synthetic construct
  source 1..28: mol_type = other DNA
ccgtgactggatgatgtgcaccacgcgg

SEQ ID NO: 11767 - DNA, 28 bp, synthetic construct
  source 1..28: mol_type = other DNA
tgcaccacgcggcccagcttctcgccgg

SEQ ID NO: 11768 - DNA, 28 bp, synthetic construct
  source 1..28: mol_type = other DNA
gcaccacgcggcccagcttctcgccggg

SEQ ID NO: 11769 - DNA, 28 bp, synthetic construct
  source 1..28: mol_type = other DNA
caccacgcggcccagcttctcgccgggg

SEQ ID NO: 11770 - DNA, 28 bp, synthetic construct
  source 1..28: mol_type = other DNA
ctccccggcgagaagctgggccgcgtgg

SEQ ID NO: 11771 - DNA, 28 bp, synthetic construct
  source 1..28: mol_type = other DNA
tcaacaagctccccggcgagaagctggg

SEQ ID NO: 11772 - DNA, 28 bp, synthetic construct
  source 1..28: mol_type = other DNA
atcaacaagctccccggcgagaagctgg

SEQ ID NO: 11773 - DNA, 28 bp, synthetic construct
  source 1..28: mol_type = other DNA
tcagcttggacatcaacaagctccccgg

SEQ ID NO: 11774 - DNA, 28 bp, synthetic construct
  source 1..28: mol_type = other DNA
tatgaggagaagcggcagctcagcttgg

SEQ ID NO: 11775 - DNA, 28 bp, synthetic construct
  source 1..28: mol_type = other DNA
aagctgagctgccgcttctcctcatagg

SEQ ID NO: 11776 - DNA, 28 bp, synthetic construct
  source 1..28: mol_type = other DNA
gctgccgcttctcctcataggacatagg

SEQ ID NO: 11777 - DNA, 28 bp, synthetic construct
  source 1..28: mol_type = other DNA
caagcctatgtcctatgaggagaagcgg

SEQ ID NO: 11778 - DNA, 28 bp, synthetic construct
  source 1..28: mol_type = other DNA
gacaagtgcaagcctatgtcctatgagg

SEQ ID NO: 11779 - DNA, 28 bp, synthetic construct
  source 1..28: mol_type = other DNA
ttgtcctcttcctccgactcatacgtgg

SEQ ID NO: 11780 - DNA, 28 bp, synthetic construct
  source 1..28: mol_type = other DNA
tgtcctcttcctccgactcatacgtggg

SEQ ID NO: 11781 - DNA, 28 bp, synthetic construct
  source 1..28: mol_type = other DNA
cctcttcctccgactcatacgtgggagg

SEQ ID NO: 11782 - DNA, 28 bp, synthetic construct
  source 1..28: mol_type = other DNA
ctcttcctccgactcatacgtgggaggg

SEQ ID NO: 11783 - DNA, 28 bp, synthetic construct
  source 1..28: mol_type = other DNA
tcttcctccgactcatacgtgggagggg

SEQ ID NO: 11784 - DNA, 28 bp, synthetic construct
  source 1..28: mol_type = other DNA
cttcctccgactcatacgtgggaggggg

SEQ ID NO: 11785 - DNA, 28 bp, synthetic construct
  source 1..28: mol_type = other DNA
aagccccctcccacgtatgagtcggagg

SEQ ID NO: 11786 - DNA, 28 bp, synthetic construct
  source 1..28: mol_type = other DNA
agcaagccccctcccacgtatgagtcgg

SEQ ID NO: 11787 - DNA, 28 bp, synthetic construct
  source 1..28: mol_type = other DNA
tacgtgggagggggcttgctcttcatgg

SEQ ID NO: 11788 - DNA, 28 bp, synthetic construct
  source 1..28: mol_type = other DNA
acgtgggagggggcttgctcttcatggg

SEQ ID NO: 11789 - DNA, 28 bp, synthetic construct
  source 1..28: mol_type = other DNA
gagggggcttgctcttcatgggcgctgg

SEQ ID NO: 11790 - DNA, 28 bp, synthetic construct
  source 1..28: mol_type = other DNA
gggcgctggctccttcttgctacgaagg

SEQ ID NO: 11791 - DNA, 28 bp, synthetic construct
  source 1..28: mol_type = other DNA
ggcgctggctccttcttgctacgaaggg

SEQ ID NO: 11792 - DNA, 28 bp, synthetic construct
  source 1..28: mol_type = other DNA
tctgcatcgtcccttcgtagcaagaagg

SEQ ID NO: 11793 - DNA, 28 bp, synthetic construct
  source 1..28: mol_type = other DNA
ggtctgtgtcccctgaatttgtcctggg

SEQ ID NO: 11794 - DNA, 28 bp, synthetic construct
  source 1..28: mol_type = other DNA
aggtctgtgtcccctgaatttgtcctgg

SEQ ID NO: 11795 - DNA, 28 bp, synthetic construct
  source 1..28: mol_type = other DNA
aaataatagcagcaacagcaatgtgagg

SEQ ID NO: 11796 - DNA, 28 bp, synthetic construct
  source 1..28: mol_type = other DNA
tgctattatttttcttcgtctttttagg

SEQ ID NO: 11797 - DNA, 28 bp, synthetic construct
  source 1..28: mol_type = other DNA
tattatttttcttcgtctttttaggagg

SEQ ID NO: 11798 - DNA, 28 bp, synthetic construct
  source 1..28: mol_type = other DNA
tatttttcttcgtctttttaggaggagg

SEQ ID NO: 11799 - DNA, 28 bp, synthetic construct
  source 1..28: mol_type = other DNA
ttcgtctttttaggaggaggttccttgg

SEQ ID NO: 11800 - DNA, 28 bp, synthetic construct
  source 1..28: mol_type = other DNA
gaagagaataaaaaaagcaaagccaagg

SEQ ID NO: 11801 - DNA, 28 bp, synthetic construct
  source 1..28: mol_type = other DNA
gaaaagcacaaaaggaaagaggaagtgg

SEQ ID NO: 11802 - DNA, 28 bp, synthetic construct
  source 1..28: mol_type = other DNA
aaaaaagaaaagcacaaaaggaaagagg

SEQ ID NO: 11803 - DNA, 28 bp, synthetic construct
  source 1..28: mol_type = other DNA
ggaaaagaaaaaagaaaagcacaaaagg

SEQ ID NO: 11804 - DNA, 28 bp, synthetic construct
  source 1..28: mol_type = other DNA
ccttcttgtctttctcctttttctttgg

SEQ ID NO: 11805 - DNA, 28 bp, synthetic construct
  source 1..28: mol_type = other DNA
ctcctttttctttggtttgttctgctgg

SEQ ID NO: 11806 - DNA, 28 bp, synthetic construct
  source 1..28: mol_type = other DNA
tcctttttctttggtttgttctgctggg

SEQ ID NO: 11807 - DNA, 28 bp, synthetic construct
  source 1..28: mol_type = other DNA
cctttttctttggtttgttctgctgggg

SEQ ID NO: 11808 - DNA, 28 bp, synthetic construct
  source 1..28: mol_type = other DNA
tggtttgttctgctggggctgagagagg

SEQ ID NO: 11809 - DNA, 28 bp, synthetic construct
  source 1..28: mol_type = other DNA
ggtttgttctgctggggctgagagaggg

SEQ ID NO: 11810 - DNA, 28 bp, synthetic construct
  source 1..28: mol_type = other DNA
gagagggctgcaagctgctcgtgcacgg

SEQ ID NO: 11811 - DNA, 28 bp, synthetic construct
  source 1..28: mol_type = other DNA
cacggctttgagctgtagaccagacagg

SEQ ID NO: 11812 - DNA, 28 bp, synthetic construct
  source 1..28: mol_type = other DNA
agccaccaatgccctcacctgctcctgg

SEQ ID NO: 11813 - DNA, 28 bp, synthetic construct
  source 1..28: mol_type = other DNA
ctccaggagcaggtgagggcattggtgg

SEQ ID NO: 11814 - DNA, 28 bp, synthetic construct
  source 1..28: mol_type = other DNA
gagctccaggagcaggtgagggcattgg

SEQ ID NO: 11815 - DNA, 28 bp, synthetic construct
  source 1..28: mol_type = other DNA
ctggctgagctccaggagcaggtgaggg

SEQ ID NO: 11816 - DNA, 28 bp, synthetic construct
  source 1..28: mol_type = other DNA
gctggctgagctccaggagcaggtgagg

SEQ ID NO: 11817 - DNA, 28 bp, synthetic construct
  source 1..28: mol_type = other DNA
cagcggctggctgagctccaggagcagg

SEQ ID NO: 11818 - DNA, 28 bp, synthetic construct
  source 1..28: mol_type = other DNA
ctgctcctggagctcagccagccgctgg

SEQ ID NO: 11819 - DNA, 28 bp, synthetic construct
  source 1..28: mol_type = other DNA
tgctcctggagctcagccagccgctggg

SEQ ID NO: 11820 - DNA, 28 bp, synthetic construct
  source 1..28: mol_type = other DNA
cgagcccagcggctggctgagctccagg

SEQ ID NO: 11821 - DNA, 28 bp, synthetic construct
  source 1..28: mol_type = other DNA
tctgaggaggagcgagcccagcggctgg

SEQ ID NO: 11822 - DNA, 28 bp, synthetic construct
  source 1..28: mol_type = other DNA
tgactctgaggaggagcgagcccagcgg

SEQ ID NO: 11823 - DNA, 28 bp, synthetic construct
  source 1..28: mol_type = other DNA
gacagttcgactgatgactctgaggagg

SEQ ID NO: 11824 - DNA, 28 bp, synthetic construct
  source 1..28: mol_type = other DNA
agtgacagttcgactgatgactctgagg

SEQ ID NO: 11825 - DNA, 28 bp, synthetic construct
  source 1..28: mol_type = other DNA
tcatcagtcgaactgtcactgtccgagg

SEQ ID NO: 11826 - DNA, 28 bp, synthetic construct
  source 1..28: mol_type = other DNA
agcgacagcagcagcgatagctcctcgg

SEQ ID NO: 11827 - DNA, 28 bp, synthetic construct
  source 1..28: mol_type = other DNA
gaggagctatcgctgctgctgtcgctgg

SEQ ID NO: 11828 - DNA, 28 bp, synthetic construct
  source 1..28: mol_type = other DNA
ctatcgctgctgctgtcgctggatgagg

SEQ ID NO: 11829 - DNA, 28 bp, synthetic construct
  source 1..28: mol_type = other DNA
tatcgctgctgctgtcgctggatgaggg

SEQ ID NO: 11830 - DNA, 28 bp, synthetic construct
  source 1..28: mol_type = other DNA
cgctgctgctgtcgctggatgagggcgg

SEQ ID NO: 11831 - DNA, 28 bp, synthetic construct
  source 1..28: mol_type = other DNA
gctgctgctgtcgctggatgagggcggg

SEQ ID NO: 11832 - DNA, 28 bp, synthetic construct
  source 1..28: mol_type = other DNA
ctgctgctgtcgctggatgagggcgggg

SEQ ID NO: 11833 - DNA, 28 bp, synthetic construct
  source 1..28: mol_type = other DNA
ctggatgagggcggggccacaaccttgg

SEQ ID NO: 11834 - DNA, 28 bp, synthetic construct
  source 1..28: mol_type = other DNA
gatgagggcggggccacaaccttggtgg

SEQ ID NO: 11835 - DNA, 28 bp, synthetic construct
  source 1..28: mol_type = other DNA
atgagggcggggccacaaccttggtggg

SEQ ID NO: 11836 - DNA, 28 bp, synthetic construct
  source 1..28: mol_type = other DNA
agggcggggccacaaccttggtgggagg

SEQ ID NO: 11837 - DNA, 28 bp, synthetic construct
  source 1..28: mol_type = other DNA
gggcggggccacaaccttggtgggaggg

SEQ ID NO: 11838 - DNA, 28 bp, synthetic construct
  source 1..28: mol_type = other DNA
ggcggggccacaaccttggtgggagggg

SEQ ID NO: 11839 - DNA, 28 bp, synthetic construct
  source 1..28: mol_type = other DNA
gcggggccacaaccttggtgggaggggg

SEQ ID NO: 11840 - DNA, 28 bp, synthetic construct
  source 1..28: mol_type = other DNA
gcagtgccccctcccaccaaggttgtgg

SEQ ID NO: 11841 - DNA, 28 bp, synthetic construct
  source 1..28: mol_type = other DNA
caaccttggtgggagggggcactgccgg

SEQ ID NO: 11842 - DNA, 28 bp, synthetic construct
  source 1..28: mol_type = other DNA
aaccttggtgggagggggcactgccggg

SEQ ID NO: 11843 - DNA, 28 bp, synthetic construct
  source 1..28: mol_type = other DNA
accttggtgggagggggcactgccgggg

SEQ ID NO: 11844 - DNA, 28 bp, synthetic construct
  source 1..28: mol_type = other DNA
tccccggcagtgccccctcccaccaagg

SEQ ID NO: 11845 - DNA, 28 bp, synthetic construct
  source 1..28: mol_type = other DNA
ttggtgggagggggcactgccggggagg

SEQ ID NO: 11846 - DNA, 28 bp, synthetic construct
  source 1..28: mol_type = other DNA
ggagggggcactgccggggaggacacgg

SEQ ID NO: 11847 - DNA, 28 bp, synthetic construct
  source 1..28: mol_type = other DNA
ctgccggggaggacacggccaccactgg

SEQ ID NO: 11848 - DNA, 28 bp, synthetic construct
  source 1..28: mol_type = other DNA
gagccagtggtggccgtgtcctccccgg

SEQ ID NO: 11849 - DNA, 28 bp, synthetic construct
  source 1..28: mol_type = other DNA
aggacacggccaccactggctcctcagg

SEQ ID NO: 11850 - DNA, 28 bp, synthetic construct
  source 1..28: mol_type = other DNA
ccaccactggctcctcaggctcgtccgg

SEQ ID NO: 11851 - DNA, 28 bp, synthetic construct
  source 1..28: mol_type = other DNA
atgccggacgagcctgaggagccagtgg

SEQ ID NO: 11852 - DNA, 28 bp, synthetic construct
  source 1..28: mol_type = other DNA
ggctcctcaggctcgtccggcatcttgg

SEQ ID NO: 11853 - DNA, 28 bp, synthetic construct
  source 1..28: mol_type = other DNA
tttgccaagatgccggacgagcctgagg

SEQ ID NO: 11854 - DNA, 28 bp, synthetic construct
  source 1..28: mol_type = other DNA
ttcgaaatgcgctttgccaagatgccgg

SEQ ID NO: 11855 - DNA, 28 bp, synthetic construct
  source 1..28: mol_type = other DNA
ggcaaagcgcatttcgaacacatcctgg

SEQ ID NO: 11856 - DNA, 28 bp, synthetic construct
  source 1..28: mol_type = other DNA
agcgcatttcgaacacatcctggtgagg

SEQ ID NO: 11857 - DNA, 28 bp, synthetic construct
  source 1..28: mol_type = other DNA
gcgcatttcgaacacatcctggtgaggg

SEQ ID NO: 11858 - DNA, 28 bp, synthetic construct
  source 1..28: mol_type = other DNA
cgtcacagcatgtctttccctcaccagg

SEQ ID NO: 11859 - DNA, 28 bp, synthetic construct
  source 1..28: mol_type = other DNA
tggctgcgccctcccaagcctcacctgg

SEQ ID NO: 11860 - DNA, 28 bp, synthetic construct
  source 1..28: mol_type = other DNA
cgcaagctccaggtgaggcttgggaggg

SEQ ID NO: 11861 - DNA, 28 bp, synthetic construct
  source 1..28: mol_type = other DNA
cctcccaagcctcacctggagcttgcgg

SEQ ID NO: 11862 - DNA, 28 bp, synthetic construct
  source 1..28: mol_type = other DNA
ctcccaagcctcacctggagcttgcggg

SEQ ID NO: 11863 - DNA, 28 bp, synthetic construct
  source 1..28: mol_type = other DNA
ggcccgcaagctccaggtgaggcttggg

SEQ ID NO: 11864 - DNA, 28 bp, synthetic construct
  source 1..28: mol_type = other DNA
tggcccgcaagctccaggtgaggcttgg

SEQ ID NO: 11865 - DNA, 28 bp, synthetic construct
  source 1..28: mol_type = other DNA
agcctcacctggagcttgcgggccatgg

SEQ ID NO: 11866 - DNA, 28 bp, synthetic construct
  source 1..28: mol_type = other DNA
ggccatggcccgcaagctccaggtgagg

SEQ ID NO: 11867 - DNA, 28 bp, synthetic construct
  source 1..28: mol_type = other DNA
gtggtggccatggcccgcaagctccagg

SEQ ID NO: 11868 - DNA, 28 bp, synthetic construct
  source 1..28: mol_type = other DNA
cttgcgggccatggccaccacctcatgg

SEQ ID NO: 11869 - DNA, 28 bp, synthetic construct
  source 1..28: mol_type = other DNA
gggccatggccaccacctcatggtcagg

SEQ ID NO: 11870 - DNA, 28 bp, synthetic construct
  source 1..28: mol_type = other DNA
ccatggccaccacctcatggtcaggagg

SEQ ID NO: 11871 - DNA, 28 bp, synthetic construct
  source 1..28: mol_type = other DNA
catggccaccacctcatggtcaggaggg

SEQ ID NO: 11872 - DNA, 28 bp, synthetic construct
  source 1..28: mol_type = other DNA
tacaaccctcctgaccatgaggtggtgg

SEQ ID NO: 11873 - DNA, 28 bp, synthetic construct
  source 1..28: mol_type = other DNA
aagtacaaccctcctgaccatgaggtgg

SEQ ID NO: 11874 - DNA, 28 bp, synthetic construct
  source 1..28: mol_type = other DNA
tataagtacaaccctcctgaccatgagg

SEQ ID NO: 11875 - DNA, 28 bp, synthetic construct
  source 1..28: mol_type = other DNA
tcaggagggttgtacttatagcagttgg

SEQ ID NO: 11876 - DNA, 28 bp, synthetic construct
  source 1..28: mol_type = other DNA
cttatagcagttggagaacatcaatcgg

SEQ ID NO: 11877 - DNA, 28 bp, synthetic construct
  source 1..28: mol_type = other DNA
gtcagcaccaaactcctgagcatcacgg

SEQ ID NO: 11878 - DNA, 28 bp, synthetic construct
  source 1..28: mol_type = other DNA
gtgagtaccgtgatgctcaggagtttgg

SEQ ID NO: 11879 - DNA, 28 bp, synthetic construct
  source 1..28: mol_type = other DNA
aaactcctgagcatcacggtactcacgg

SEQ ID NO: 11880 - DNA, 28 bp, synthetic construct
  source 1..28: mol_type = other DNA
aactcctgagcatcacggtactcacggg

SEQ ID NO: 11881 - DNA, 28 bp, synthetic construct
  source 1..28: mol_type = other DNA
gaggcccgtgagtaccgtgatgctcagg

SEQ ID NO: 11882 - DNA, 28 bp, synthetic construct
  source 1..28: mol_type = other DNA
gtactcacgggcctccagtttagactgg

SEQ ID NO: 11883 - DNA, 28 bp, synthetic construct
  source 1..28: mol_type = other DNA
tgtcttgttttccagtctaaactggagg

SEQ ID NO: 11884 - DNA, 28 bp, synthetic construct
  source 1..28: mol_type = other DNA
acttgtcttgttttccagtctaaactgg

SEQ ID NO: 11885 - DNA, 28 bp, synthetic construct
  source 1..28: mol_type = other DNA
ggttagcgggatgtgcctgagggaaggg

SEQ ID NO: 11886 - DNA, 28 bp, synthetic construct
  source 1..28: mol_type = other DNA
aggttagcgggatgtgcctgagggaagg

SEQ ID NO: 11887 - DNA, 28 bp, synthetic construct
  source 1..28: mol_type = other DNA
atcaaggttagcgggatgtgcctgaggg

SEQ ID NO: 11888 - DNA, 28 bp, synthetic construct
  source 1..28: mol_type = other DNA
aatcaaggttagcgggatgtgcctgagg

SEQ ID NO: 11889 - DNA, 28 bp, synthetic construct
  source 1..28: mol_type = other DNA
ggacatgagcacaatcaaggttagcggg

SEQ ID NO: 11890 - DNA, 28 bp, synthetic construct
  source 1..28: mol_type = other DNA
tggacatgagcacaatcaaggttagcgg

SEQ ID NO: 11891 - DNA, 28 bp, synthetic construct
  source 1..28: mol_type = other DNA
ctaaccttgattgtgctcatgtccatgg

SEQ ID NO: 11892 - DNA, 28 bp, synthetic construct
  source 1..28: mol_type = other DNA
taaccttgattgtgctcatgtccatggg

SEQ ID NO: 11893 - DNA, 28 bp, synthetic construct
  source 1..28: mol_type = other DNA
aaccttgattgtgctcatgtccatgggg

SEQ ID NO: 11894 - DNA, 28 bp, synthetic construct
  source 1..28: mol_type = other DNA
caccccatggacatgagcacaatcaagg

SEQ ID NO: 11895 - DNA, 28 bp, synthetic construct
  source 1..28: mol_type = other DNA
tactgtgacatcatcaagcaccccatgg

SEQ ID NO: 11896 - DNA, 28 bp, synthetic construct
  source 1..28: mol_type = other DNA
cttgatgatgtcacagtagtcgtgtagg

SEQ ID NO: 11897 - DNA, 28 bp, synthetic construct
  source 1..28: mol_type = other DNA
gtaggcccagtgcctccacgtccacagg

SEQ ID NO: 11898 - DNA, 28 bp, synthetic construct
  source 1..28: mol_type = other DNA
acaagcctgtggacgtggaggcactggg

SEQ ID NO: 11899 - DNA, 28 bp, synthetic construct
  source 1..28: mol_type = other DNA
tacaagcctgtggacgtggaggcactgg

SEQ ID NO: 11900 - DNA, 28 bp, synthetic construct
  source 1..28: mol_type = other DNA
gcctccacgtccacaggcttgtagaagg

SEQ ID NO: 11901 - DNA, 28 bp, synthetic construct
  source 1..28: mol_type = other DNA
cctccacgtccacaggcttgtagaaggg

SEQ ID NO: 11902 - DNA, 28 bp, synthetic construct
  source 1..28: mol_type = other DNA
tggcccttctacaagcctgtggacgtgg

SEQ ID NO: 11903 - DNA, 28 bp, synthetic construct
  source 1..28: mol_type = other DNA
acgtccacaggcttgtagaagggccagg

SEQ ID NO: 11904 - DNA, 28 bp, synthetic construct
  source 1..28: mol_type = other DNA
tacgcctggcccttctacaagcctgtgg

SEQ ID NO: 11905 - DNA, 28 bp, synthetic construct
  source 1..28: mol_type = other DNA
acaggcttgtagaagggccaggcgtagg

SEQ ID NO: 11906 - DNA, 28 bp, synthetic construct
  source 1..28: mol_type = other DNA
ggcttgtagaagggccaggcgtaggcgg

SEQ ID NO: 11907 - DNA, 28 bp, synthetic construct
  source 1..28: mol_type = other DNA
ggccaggcgtaggcggcgtgcttcttgg

SEQ ID NO: 11908 - DNA, 28 bp, synthetic construct
  source 1..28: mol_type = other DNA
tgccaagaagcacgccgcctacgcctgg

SEQ ID NO: 11909 - DNA, 28 bp, synthetic construct
  source 1..28: mol_type = other DNA
gtgcttcttggcaaacatctccttgagg

SEQ ID NO: 11910 - DNA, 28 bp, synthetic construct
  source 1..28: mol_type = other DNA
ctcaagtgctgcagcggcatcctcaagg

SEQ ID NO: 11911 - DNA, 28 bp, synthetic construct
  source 1..28: mol_type = other DNA
tctcggagcagctcaagtgctgcagcgg

SEQ ID NO: 11912 - DNA, 28 bp, synthetic construct
  source 1..28: mol_type = other DNA
gctccgagaccttgctgctcttctctgg

SEQ ID NO: 11913 - DNA, 28 bp, synthetic construct
  source 1..28: mol_type = other DNA
gcaccagagaagagcagcaaggtctcgg

SEQ ID NO: 11914 - DNA, 28 bp, synthetic construct
  source 1..28: mol_type = other DNA
agaccttgctgctcttctctggtgctgg

SEQ ID NO: 11915 - DNA, 28 bp, synthetic construct
  source 1..28: mol_type = other DNA
gaccttgctgctcttctctggtgctggg

SEQ ID NO: 11916 - DNA, 28 bp, synthetic construct
  source 1..28: mol_type = other DNA
cacccagcaccagagaagagcagcaagg

SEQ ID NO: 11917 - DNA, 28 bp, synthetic construct
  source 1..28: mol_type = other DNA
tctggtgctgggtgctgctgagagtcgg

SEQ ID NO: 11918 - DNA, 28 bp, synthetic construct
  source 1..28: mol_type = other DNA
ctggtgctgggtgctgctgagagtcggg

SEQ ID NO: 11919 - DNA, 28 bp, synthetic construct
  source 1..28: mol_type = other DNA
gctgagagtcgggcacgtccttctttgg

SEQ ID NO: 11920 - DNA, 28 bp, synthetic construct
  source 1..28: mol_type = other DNA
gagagtcgggcacgtccttctttggagg

SEQ ID NO: 11921 - DNA, 28 bp, synthetic construct
  source 1..28: mol_type = other DNA
gcacgtccttctttggaggtttcacagg

SEQ ID NO: 11922 - DNA, 28 bp, synthetic construct
  source 1..28: mol_type = other DNA
gtccttctttggaggtttcacaggccgg

SEQ ID NO: 11923 - DNA, 28 bp, synthetic construct
  source 1..28: mol_type = other DNA
agccggcctgtgaaacctccaaagaagg

SEQ ID NO: 11924 - DNA, 28 bp, synthetic construct
  source 1..28: mol_type = other DNA
cacaggccggctgctctcccgccgctgg

SEQ ID NO: 11925 - DNA, 28 bp, synthetic construct
  source 1..28: mol_type = other DNA
gctgggccagcggcgggagagcagccgg

SEQ ID NO: 11926 - DNA, 28 bp, synthetic construct
  source 1..28: mol_type = other DNA
ctgctctcccgccgctggcccagcttgg

SEQ ID NO: 11927 - DNA, 28 bp, synthetic construct
  source 1..28: mol_type = other DNA
ctctcccgccgctggcccagcttggtgg

SEQ ID NO: 11928 - DNA, 28 bp, synthetic construct
  source 1..28: mol_type = other DNA
aagaccaccaagctgggccagcggcggg

SEQ ID NO: 11929 - DNA, 28 bp, synthetic construct
  source 1..28: mol_type = other DNA
caagaccaccaagctgggccagcggcgg

SEQ ID NO: 11930 - DNA, 28 bp, synthetic construct
  source 1..28: mol_type = other DNA
cgccgctggcccagcttggtggtcttgg

SEQ ID NO: 11931 - DNA, 28 bp, synthetic construct
  source 1..28: mol_type = other DNA
gccgctggcccagcttggtggtcttggg

SEQ ID NO: 11932 - DNA, 28 bp, synthetic construct
  source 1..28: mol_type = other DNA
gcccaagaccaccaagctgggccagcgg

SEQ ID NO: 11933 - DNA, 28 bp, synthetic construct
  source 1..28: mol_type = other DNA
ggcccagcttggtggtcttgggctccgg

SEQ ID NO: 11934 - DNA, 28 bp, synthetic construct
  source 1..28: mol_type = other DNA
gcccagcttggtggtcttgggctccggg

SEQ ID NO: 11935 - DNA, 28 bp, synthetic construct
  source 1..28: mol_type = other DNA
cccagcttggtggtcttgggctccgggg

SEQ ID NO: 11936 - DNA, 28 bp, synthetic construct
  source 1..28: mol_type = other DNA
ccagcttggtggtcttgggctccggggg

SEQ ID NO: 11937 - DNA, 28 bp, synthetic construct
  source 1..28: mol_type = other DNA
gtggtcttgggctccgggggcagcgagg

SEQ ID NO: 11938 - DNA, 28 bp, synthetic construct
  source 1..28: mol_type = other DNA
tggtcttgggctccgggggcagcgaggg

SEQ ID NO: 11939 - DNA, 28 bp, synthetic construct
  source 1..28: mol_type = other DNA
tcttgggctccgggggcagcgagggtgg

SEQ ID NO: 11940 - DNA, 28 bp, synthetic construct
  source 1..28: mol_type = other DNA
attcacgagccaccctcgctgcccccgg

SEQ ID NO: 11941 - DNA, 28 bp, synthetic construct
  source 1..28: mol_type = other DNA
gggggcagcgagggtggctcgtgaatgg

SEQ ID NO: 11942 - DNA, 28 bp, synthetic construct
  source 1..28: mol_type = other DNA
ggggcagcgagggtggctcgtgaatggg

SEQ ID NO: 11943 - DNA, 28 bp, synthetic construct
  source 1..28: mol_type = other DNA
gggcagcgagggtggctcgtgaatgggg

SEQ ID NO: 11944 - DNA, 28 bp, synthetic construct
  source 1..28: mol_type = other DNA
gagggtggctcgtgaatggggtcaatgg

SEQ ID NO: 11945 - DNA, 28 bp, synthetic construct
  source 1..28: mol_type = other DNA
ggtggctcgtgaatggggtcaatggtgg

SEQ ID NO: 11946 - DNA, 28 bp, synthetic construct
  source 1..28: mol_type = other DNA
ggctcgtgaatggggtcaatggtggtgg

SEQ ID NO: 11947 - DNA, 28 bp, synthetic construct
  source 1..28: mol_type = other DNA
gctcgtgaatggggtcaatggtggtggg

SEQ ID NO: 11948 - DNA, 28 bp, synthetic construct
  source 1..28: mol_type = other DNA
ctcgtgaatggggtcaatggtggtgggg

SEQ ID NO: 11949 - DNA, 28 bp, synthetic construct
  source 1..28: mol_type = other DNA
tcgtgaatggggtcaatggtggtggggg

SEQ ID NO: 11950 - DNA, 28 bp, synthetic construct
  source 1..28: mol_type = other DNA
tgaatggggtcaatggtggtgggggtgg

SEQ ID NO: 11951 - DNA, 28 bp, synthetic construct
  source 1..28: mol_type = other DNA
atggggtcaatggtggtgggggtggtgg

SEQ ID NO: 11952 - DNA, 28 bp, synthetic construct
  source 1..28: mol_type = other DNA
ttggcagacaaagaagggagtgaagagg

SEQ ID NO: 11953 - DNA, 28 bp, synthetic construct
  source 1..28: mol_type = other DNA
ctcccttctttgtctgccaagaacacgg

SEQ ID NO: 11954 - DNA, 28 bp, synthetic construct
  source 1..28: mol_type = other DNA
gtccgtgttcttggcagacaaagaaggg

SEQ ID NO: 11955 - DNA, 28 bp, synthetic construct
  source 1..28: mol_type = other DNA
cgtccgtgttcttggcagacaaagaagg

SEQ ID NO: 11956 - DNA, 28 bp, synthetic construct
  source 1..28: mol_type = other DNA
gtctgccaagaacacggacgccaacagg

SEQ ID NO: 11957 - DNA, 28 bp, synthetic construct
  source 1..28: mol_type = other DNA
gaaggtgagtctcctggactctggaggg

SEQ ID NO: 11958 - DNA, 28 bp, synthetic construct
  source 1..28: mol_type = other DNA
tgaaggtgagtctcctggactctggagg

SEQ ID NO: 11959 - DNA, 28 bp, synthetic construct
  source 1..28: mol_type = other DNA
ctgtgaaggtgagtctcctggactctgg

SEQ ID NO: 11960 - DNA, 28 bp, synthetic construct
  source 1..28: mol_type = other DNA
cagagtccaggagactcaccttcacagg

SEQ ID NO: 11961 - DNA, 28 bp, synthetic construct
  source 1..28: mol_type = other DNA
ccaggagactcaccttcacaggctgtgg

SEQ ID NO: 11962 - DNA, 28 bp, synthetic construct
  source 1..28: mol_type = other DNA
caggagactcaccttcacaggctgtggg

SEQ ID NO: 11963 - DNA, 28 bp, synthetic construct
  source 1..28: mol_type = other DNA
aggagactcaccttcacaggctgtgggg

SEQ ID NO: 11964 - DNA, 28 bp, synthetic construct
  source 1..28: mol_type = other DNA
agactcaccttcacaggctgtggggtgg

SEQ ID NO: 11965 - DNA, 28 bp, synthetic construct
  source 1..28: mol_type = other DNA
atcgcggccaccccacagcctgtgaagg

SEQ ID NO: 11966 - DNA, 28 bp, synthetic construct
  source 1..28: mol_type = other DNA
acaggctgtggggtggccgcgatgatgg

SEQ ID NO: 11967 - DNA, 28 bp, synthetic construct
  source 1..28: mol_type = other DNA
caggctgtggggtggccgcgatgatggg

SEQ ID NO: 11968 - DNA, 28 bp, synthetic construct
  source 1..28: mol_type = other DNA
gctgtggggtggccgcgatgatgggtgg

SEQ ID NO: 11969 - DNA, 28 bp, synthetic construct
  source 1..28: mol_type = other DNA
ctgtggggtggccgcgatgatgggtggg

SEQ ID NO: 11970 - DNA, 28 bp, synthetic construct
  source 1..28: mol_type = other DNA
tggggtggccgcgatgatgggtgggtgg

SEQ ID NO: 11971 - DNA, 28 bp, synthetic construct
  source 1..28: mol_type = other DNA
gtacagagccacccacccatcatcgcgg

SEQ ID NO: 11972 - DNA, 28 bp, synthetic construct
  source 1..28: mol_type = other DNA
gcgatgatgggtgggtggctctgtacgg

SEQ ID NO: 11973 - DNA, 28 bp, synthetic construct
  source 1..28: mol_type = other DNA
cgatgatgggtgggtggctctgtacggg

SEQ ID NO: 11974 - DNA, 28 bp, synthetic construct
  source 1..28: mol_type = other DNA
gatgggtgggtggctctgtacgggctgg

SEQ ID NO: 11975 - DNA, 28 bp, synthetic construct
  source 1..28: mol_type = other DNA
atgggtgggtggctctgtacgggctggg

SEQ ID NO: 11976 - DNA, 28 bp, synthetic construct
  source 1..28: mol_type = other DNA
tgggtgggtggctctgtacgggctgggg

SEQ ID NO: 11977 - DNA, 28 bp, synthetic construct
  source 1..28: mol_type = other DNA
ggtggctctgtacgggctggggagctgg

SEQ ID NO: 11978 - DNA, 28 bp, synthetic construct
  source 1..28: mol_type = other DNA
ctctgtacgggctggggagctggagcgg

SEQ ID NO: 11979 - DNA, 28 bp, synthetic construct
  source 1..28: mol_type = other DNA
tctgtacgggctggggagctggagcggg

SEQ ID NO: 11980 - DNA, 28 bp, synthetic construct
  source 1..28: mol_type = other DNA
gtacgggctggggagctggagcgggtgg

SEQ ID NO: 11981 - DNA, 28 bp, synthetic construct
  source 1..28: mol_type = other DNA
tacgggctggggagctggagcgggtggg

SEQ ID NO: 11982 - DNA, 28 bp, synthetic construct
  source 1..28: mol_type = other DNA
acgggctggggagctggagcgggtgggg

SEQ ID NO: 11983 - DNA, 28 bp, synthetic construct
  source 1..28: mol_type = other DNA
cgggctggggagctggagcgggtggggg

SEQ ID NO: 11984 - DNA, 28 bp, synthetic construct
  source 1..28: mol_type = other DNA
ggggagctggagcgggtgggggttgtgg

SEQ ID NO: 11985 - DNA, 28 bp, synthetic construct
  source 1..28: mol_type = other DNA
agctggagcgggtgggggttgtggctgg

SEQ ID NO: 11986 - DNA, 28 bp, synthetic construct
  source 1..28: mol_type = other DNA
gctggagcgggtgggggttgtggctggg

SEQ ID NO: 11987 - DNA, 28 bp, synthetic construct
  source 1..28: mol_type = other DNA
ctggagcgggtgggggttgtggctgggg

SEQ ID NO: 11988 - DNA, 28 bp, synthetic construct
  source 1..28: mol_type = other DNA
tggagcgggtgggggttgtggctggggg

SEQ ID NO: 11989 - DNA, 28 bp, synthetic construct
  source 1..28: mol_type = other DNA
ggagcgggtgggggttgtggctgggggg

SEQ ID NO: 11990 - DNA, 28 bp, synthetic construct
  source 1..28: mol_type = other DNA
gagcgggtgggggttgtggctggggggg

SEQ ID NO: 11991 - DNA, 28 bp, synthetic construct
  source 1..28: mol_type = other DNA
gtgggggttgtggctgggggggcactgg

SEQ ID NO: 11992 - DNA, 28 bp, synthetic construct
  source 1..28: mol_type = other DNA
ggggttgtggctgggggggcactggcgg

SEQ ID NO: 11993 - DNA, 28 bp, synthetic construct
  source 1..28: mol_type = other DNA
gggttgtggctgggggggcactggcggg

SEQ ID NO: 11994 - DNA, 28 bp, synthetic construct
  source 1..28: mol_type = other DNA
ggttgtggctgggggggcactggcgggg

SEQ ID NO: 11995 - DNA, 28 bp, synthetic construct
  source 1..28: mol_type = other DNA
gttgtggctgggggggcactggcggggg

SEQ ID NO: 11996 - DNA, 28 bp, synthetic construct
  source 1..28: mol_type = other DNA
ggggcactggcgggggcgtctgcagtgg

SEQ ID NO: 11997 - DNA, 28 bp, synthetic construct
  source 1..28: mol_type = other DNA
cactggcgggggcgtctgcagtggctgg

SEQ ID NO: 11998 - DNA, 28 bp, synthetic construct
  source 1..28: mol_type = other DNA
actggcgggggcgtctgcagtggctggg

SEQ ID NO: 11999 - DNA, 28 bp, synthetic construct
  source 1..28: mol_type = other DNA
ctggcgggggcgtctgcagtggctgggg

SEQ ID NO: 12000 - DNA, 28 bp, synthetic construct
  source 1..28: mol_type = other DNA
gcgggggcgtctgcagtggctggggagg

SEQ ID NO: 12001 - DNA, 28 bp, synthetic construct
  source 1..28: mol_type = other DNA
gctggggaggcaccactgtcatgacagg

SEQ ID NO: 12002 - DNA, 28 bp, synthetic construct
  source 1..28: mol_type = other DNA
ctggggaggcaccactgtcatgacaggg

SEQ ID NO: 12003 - DNA, 28 bp, synthetic construct
  source 1..28: mol_type = other DNA
tggggaggcaccactgtcatgacagggg

SEQ ID NO: 12004 - DNA, 28 bp, synthetic construct
  source 1..28: mol_type = other DNA
aggcaccactgtcatgacaggggtctgg

SEQ ID NO: 12005 - DNA, 28 bp, synthetic construct
  source 1..28: mol_type = other DNA
atcgtccagacccctgtcatgacagtgg

SEQ ID NO: 12006 - DNA, 28 bp, synthetic construct
  source 1..28: mol_type = other DNA
tgtcatgacaggggtctggacgatgagg

SEQ ID NO: 12007 - DNA, 28 bp, synthetic construct
  source 1..28: mol_type = other DNA
tgacaggggtctggacgatgaggtccgg

SEQ ID NO: 12008 - DNA, 28 bp, synthetic construct
  source 1..28: mol_type = other DNA
gacaggggtctggacgatgaggtccggg

SEQ ID NO: 12009 - DNA, 28 bp, synthetic construct
  source 1..28: mol_type = other DNA
acaggggtctggacgatgaggtccgggg

SEQ ID NO: 12010 - DNA, 28 bp, synthetic construct
  source 1..28: mol_type = other DNA
gtctggacgatgaggtccggggtgacgg

SEQ ID NO: 12011 - DNA, 28 bp, synthetic construct
  source 1..28: mol_type = other DNA
ggacgatgaggtccggggtgacggcagg

SEQ ID NO: 12012 - DNA, 28 bp, synthetic construct
  source 1..28: mol_type = other DNA
gacgatgaggtccggggtgacggcaggg

SEQ ID NO: 12013 - DNA, 28 bp, synthetic construct
  source 1..28: mol_type = other DNA
atgaggtccggggtgacggcagggaagg

SEQ ID NO: 12014 - DNA, 28 bp, synthetic construct
  source 1..28: mol_type = other DNA
tgaggtccggggtgacggcagggaaggg

SEQ ID NO: 12015 - DNA, 28 bp, synthetic construct
  source 1..28: mol_type = other DNA
gaggtccggggtgacggcagggaagggg

SEQ ID NO: 12016 - DNA, 28 bp, synthetic construct
  source 1..28: mol_type = other DNA
ccggggtgacggcagggaaggggtgagg

SEQ ID NO: 12017 - DNA, 28 bp, synthetic construct
  source 1..28: mol_type = other DNA
gtgacggcagggaaggggtgaggcgtgg

SEQ ID NO: 12018 - DNA, 28 bp, synthetic construct
  source 1..28: mol_type = other DNA
ggaaggggtgaggcgtggcctgcacagg

SEQ ID NO: 12019 - DNA, 28 bp, synthetic construct
  source 1..28: mol_type = other DNA
aggggtgaggcgtggcctgcacaggagg

SEQ ID NO: 12020 - DNA, 28 bp, synthetic construct
  source 1..28: mol_type = other DNA
ggtgaggcgtggcctgcacaggaggagg

SEQ ID NO: 12021 - DNA, 28 bp, synthetic construct
  source 1..28: mol_type = other DNA
gcgtggcctgcacaggaggaggattcgg

SEQ ID NO: 12022 - DNA, 28 bp, synthetic construct
  source 1..28: mol_type = other DNA
cctgcacaggaggaggattcggctgagg

SEQ ID NO: 12023 - DNA, 28 bp, synthetic construct
  source 1..28: mol_type = other DNA
ctgcacaggaggaggattcggctgaggg

SEQ ID NO: 12024 - DNA, 28 bp, synthetic construct
  source 1..28: mol_type = other DNA
tgcacaggaggaggattcggctgagggg

SEQ ID NO: 12025 - DNA, 28 bp, synthetic construct
  source 1..28: mol_type = other DNA
aggaggaggattcggctgaggggtctgg

SEQ ID NO: 12026 - DNA, 28 bp, synthetic construct
  source 1..28: mol_type = other DNA
ggaggaggattcggctgaggggtctggg

SEQ ID NO: 12027 - DNA, 28 bp, synthetic construct
  source 1..28: mol_type = other DNA
gattcggctgaggggtctgggtctgcgg

SEQ ID NO: 12028 - DNA, 28 bp, synthetic construct
  source 1..28: mol_type = other DNA
tcggctgaggggtctgggtctgcggagg

SEQ ID NO: 12029 - DNA, 28 bp, synthetic construct
  source 1..28: mol_type = other DNA
gaggagtcgatgcttgagttgtgtttgg

SEQ ID NO: 12030 - DNA, 28 bp, synthetic construct
  source 1..28: mol_type = other DNA
gatgcttgagttgtgtttggtaccgtgg

SEQ ID NO: 12031 - DNA, 28 bp, synthetic construct
  source 1..28: mol_type = other DNA
ttgtgtttggtaccgtggaaacgccagg

SEQ ID NO: 12032 - DNA, 28 bp, synthetic construct
  source 1..28: mol_type = other DNA
gggacagcaaaacctggcgtttccacgg

SEQ ID NO: 12033 - DNA, 28 bp, synthetic construct
  source 1..28: mol_type = other DNA
tatgatttgtagggacagcaaaacctgg

SEQ ID NO: 12034 - DNA, 28 bp, synthetic construct
  source 1..28: mol_type = other DNA
gctgtccctacaaatcataataagacgg

SEQ ID NO: 12035 - DNA, 28 bp, synthetic construct
  source 1..28: mol_type = other DNA
actcgccgtcttattatgatttgtaggg

SEQ ID NO: 12036 - DNA, 28 bp, synthetic construct
  source 1..28: mol_type = other DNA
aactcgccgtcttattatgatttgtagg

SEQ ID NO: 12037 - DNA, 28 bp, synthetic construct
  source 1..28: mol_type = other DNA
gaagaggacgtgggaggaaagaaacagg

SEQ ID NO: 12038 - DNA, 28 bp, synthetic construct
  source 1..28: mol_type = other DNA
cctcccacgtcctcttccttttgcctgg

SEQ ID NO: 12039 - DNA, 28 bp, synthetic construct
  source 1..28: mol_type = other DNA
agtccaggcaaaaggaagaggacgtggg

SEQ ID NO: 12040 - DNA, 28 bp, synthetic construct
  source 1..28: mol_type = other DNA
tagtccaggcaaaaggaagaggacgtgg

SEQ ID NO: 12041 - DNA, 28 bp, synthetic construct
  source 1..28: mol_type = other DNA
tcatgatagtccaggcaaaaggaagagg

SEQ ID NO: 12042 - DNA, 28 bp, synthetic construct
  source 1..28: mol_type = other DNA
ccttttgcctggactatcatgatctcgg

SEQ ID NO: 12043 - DNA, 28 bp, synthetic construct
  source 1..28: mol_type = other DNA
gaagaaaccgagatcatgatagtccagg

SEQ ID NO: 12044 - DNA, 28 bp, synthetic construct
  source 1..28: mol_type = other DNA
actatcatgatctcggtttcttctgtgg

SEQ ID NO: 12045 - DNA, 28 bp, synthetic construct
  source 1..28: mol_type = other DNA
ctatcatgatctcggtttcttctgtggg

SEQ ID NO: 12046 - DNA, 28 bp, synthetic construct
  source 1..28: mol_type = other DNA
gacatagtcttaatggcagaagctctgg

SEQ ID NO: 12047 - DNA, 28 bp, synthetic construct
  source 1..28: mol_type = other DNA
ctgccattaagactatgtcatctccagg

SEQ ID NO: 12048 - DNA, 28 bp, synthetic construct
  source 1..28: mol_type = other DNA
cagcctggagatgacatagtcttaatgg

SEQ ID NO: 12049 - DNA, 28 bp, synthetic construct
  source 1..28: mol_type = other DNA
cattaagactatgtcatctccaggctgg

SEQ ID NO: 12050 - DNA, 28 bp, synthetic construct
  source 1..28: mol_type = other DNA
gactatgtcatctccaggctggataagg

SEQ ID NO: 12051 - DNA, 28 bp, synthetic construct
  source 1..28: mol_type = other DNA
atctccaggctggataaggagacacagg

SEQ ID NO: 12052 - DNA, 28 bp, synthetic construct
  source 1..28: mol_type = other DNA
tctccaggctggataaggagacacaggg

SEQ ID NO: 12053 - DNA, 28 bp, synthetic construct
  source 1..28: mol_type = other DNA
ctccaggctggataaggagacacagggg

SEQ ID NO: 12054 - DNA, 28 bp, synthetic construct
  source 1..28: mol_type = other DNA
tacccctgtgtctccttatccagcctgg

SEQ ID NO: 12055 - DNA, 28 bp, synthetic construct
  source 1..28: mol_type = other DNA
aagaaactcacctacccatctcttctgg

SEQ ID NO: 12056 - DNA, 28 bp, synthetic construct
  source 1..28: mol_type = other DNA
agaaactcacctacccatctcttctggg

SEQ ID NO: 12057 - DNA, 28 bp, synthetic construct
  source 1..28: mol_type = other DNA
gtaaaaatgcccagaagagatgggtagg

SEQ ID NO: 12058 - DNA, 28 bp, synthetic construct
  source 1..28: mol_type = other DNA
gtgggtaaaaatgcccagaagagatggg

SEQ ID NO: 12059 - DNA, 28 bp, synthetic construct
  source 1..28: mol_type = other DNA
agtgggtaaaaatgcccagaagagatgg

SEQ ID NO: 12060 - DNA, 28 bp, synthetic construct
  source 1..28: mol_type = other DNA
gcatttttacccactacaccagcagagg

SEQ ID NO: 12061 - DNA, 28 bp, synthetic construct
  source 1..28: mol_type = other DNA
agcttttgacctctgctggtgtagtggg

SEQ ID NO: 12062 - DNA, 28 bp, synthetic construct
  source 1..28: mol_type = other DNA
cagcttttgacctctgctggtgtagtgg

SEQ ID NO: 12063 - DNA, 28 bp, synthetic construct
  source 1..28: mol_type = other DNA
acagaactcagcttttgacctctgctgg

SEQ ID NO: 12064 - DNA, 28 bp, synthetic construct
  source 1..28: mol_type = other DNA
tccctccagagtcgttctatttgaaagg

SEQ ID NO: 12065 - DNA, 28 bp, synthetic construct
  source 1..28: mol_type = other DNA
ccctccagagtcgttctatttgaaaggg

SEQ ID NO: 12066 - DNA, 28 bp, synthetic construct
  source 1..28: mol_type = other DNA
accctttcaaatagaacgactctggagg

SEQ ID NO: 12067 - DNA, 28 bp, synthetic construct
  source 1..28: mol_type = other DNA
tcaaccctttcaaatagaacgactctgg

SEQ ID NO: 12068 - DNA, 28 bp, synthetic construct
  source 1..28: mol_type = other DNA
ctacaacaaggtgagatgtaggggtggg

SEQ ID NO: 12069 - DNA, 28 bp, synthetic construct
  source 1..28: mol_type = other DNA
tctacaacaaggtgagatgtaggggtgg

SEQ ID NO: 12070 - DNA, 28 bp, synthetic construct
  source 1..28: mol_type = other DNA
acatctacaacaaggtgagatgtagggg

SEQ ID NO: 12071 - DNA, 28 bp, synthetic construct
  source 1..28: mol_type = other DNA
tacatctacaacaaggtgagatgtaggg

SEQ ID NO: 12072 - DNA, 28 bp, synthetic construct
  source 1..28: mol_type = other DNA
ttacatctacaacaaggtgagatgtagg

SEQ ID NO: 12073 - DNA, 28 bp, synthetic construct
  source 1..28: mol_type = other DNA
tttacaaattgttacatctacaacaagg

SEQ ID NO: 12074 - DNA, 28 bp, synthetic construct
  source 1..28: mol_type = other DNA
atttgtaaacatagtgttgaagtcctgg

SEQ ID NO: 12075 - DNA, 28 bp, synthetic construct
  source 1..28: mol_type = other DNA
tactggaatgctcaggaatgtatccagg

SEQ ID NO: 12076 - DNA, 28 bp, synthetic construct
  source 1..28: mol_type = other DNA
gaaaacaactattactggaatgctcagg

SEQ ID NO: 12077 - DNA, 28 bp, synthetic construct
  source 1..28: mol_type = other DNA
gaagcgcttggaaaacaactattactgg

SEQ ID NO: 12078 - DNA, 28 bp, synthetic construct
  source 1..28: mol_type = other DNA
gatatgggaacaataaagaagcgcttgg

SEQ ID NO: 12079 - DNA, 28 bp, synthetic construct
  source 1..28: mol_type = other DNA
gcttctttattgttcccatatccatagg

SEQ ID NO: 12080 - DNA, 28 bp, synthetic construct
  source 1..28: mol_type = other DNA
agatcattaaaacgcctatggatatggg

SEQ ID NO: 12081 - DNA, 28 bp, synthetic construct
  source 1..28: mol_type = other DNA
aagatcattaaaacgcctatggatatgg

SEQ ID NO: 12082 - DNA, 28 bp, synthetic construct
  source 1..28: mol_type = other DNA
tactataagatcattaaaacgcctatgg

SEQ ID NO: 12083 - DNA, 28 bp, synthetic construct
  source 1..28: mol_type = other DNA
cgttttaatgatcttatagtaatcctgg

SEQ ID NO: 12084 - DNA, 28 bp, synthetic construct
  source 1..28: mol_type = other DNA
actggacttttgctctctgctctccagg

SEQ ID NO: 12085 - DNA, 28 bp, synthetic construct
  source 1..28: mol_type = other DNA
ctgtgagtagtgtgggcagggcccaggg

SEQ ID NO: 12086 - DNA, 28 bp, synthetic construct
  source 1..28: mol_type = other DNA
cctgggccctgcccacactactcacagg

SEQ ID NO: 12087 - DNA, 28 bp, synthetic construct
  source 1..28: mol_type = other DNA
ctgggccctgcccacactactcacaggg

SEQ ID NO: 12088 - DNA, 28 bp, synthetic construct
  source 1..28: mol_type = other DNA
ggccctgcccacactactcacagggagg

SEQ ID NO: 12089 - DNA, 28 bp, synthetic construct
  source 1..28: mol_type = other DNA
aacctccctgtgagtagtgtgggcaggg

SEQ ID NO: 12090 - DNA, 28 bp, synthetic construct
  source 1..28: mol_type = other DNA
gaacctccctgtgagtagtgtgggcagg

SEQ ID NO: 12091 - DNA, 28 bp, synthetic construct
  source 1..28: mol_type = other DNA
agctgaacctccctgtgagtagtgtggg

SEQ ID NO: 12092 - DNA, 28 bp, synthetic construct
  source 1..28: mol_type = other DNA
aagctgaacctccctgtgagtagtgtgg

SEQ ID NO: 12093 - DNA, 28 bp, synthetic construct
  source 1..28: mol_type = other DNA
ctactcacagggaggttcagcttgacgg

SEQ ID NO: 12094 - DNA, 28 bp, synthetic construct
  source 1..28: mol_type = other DNA
ggaggttcagcttgacggcatccacagg

SEQ ID NO: 12095 - DNA, 28 bp, synthetic construct
  source 1..28: mol_type = other DNA
cagcttgacggcatccacaggctgctgg

SEQ ID NO: 12096 - DNA, 28 bp, synthetic construct
  source 1..28: mol_type = other DNA
tgacggcatccacaggctgctggaaagg

SEQ ID NO: 12097 - DNA, 28 bp, synthetic construct
  source 1..28: mol_type = other DNA
tttgcatggcctttccagcagcctgtgg

SEQ ID NO: 12098 - DNA, 28 bp, synthetic construct
  source 1..28: mol_type = other DNA
aggctgctggaaaggccatgcaaactgg

SEQ ID NO: 12099 - DNA, 28 bp, synthetic construct
  source 1..28: mol_type = other DNA
gacactatggaaacaccagtttgcatgg

SEQ ID NO: 12100 - DNA, 28 bp, synthetic construct
  source 1..28: mol_type = other DNA
gctcagagtggtgctcaagacactatgg

SEQ ID NO: 12101 - DNA, 28 bp, synthetic construct
  source 1..28: mol_type = other DNA
tagtgtcttgagcaccactctgagcagg

SEQ ID NO: 12102 - DNA, 28 bp, synthetic construct
  source 1..28: mol_type = other DNA
caccactctgagcaggtattgcagttgg

SEQ ID NO: 12103 - DNA, 28 bp, synthetic construct
  source 1..28: mol_type = other DNA
aaccaactgcaatacctgctcagagtgg

SEQ ID NO: 12104 - DNA, 28 bp, synthetic construct
  source 1..28: mol_type = other DNA
actctgagcaggtattgcagttggttgg

SEQ ID NO: 12105 - DNA, 28 bp, synthetic construct
  source 1..28: mol_type = other DNA
tattgcagttggttggtctgcctcttgg

SEQ ID NO: 12106 - DNA, 28 bp, synthetic construct
  source 1..28: mol_type = other DNA
attgcagttggttggtctgcctcttggg

SEQ ID NO: 12107 - DNA, 28 bp, synthetic construct
  source 1..28: mol_type = other DNA
ggttggtctgcctcttgggcttgttagg

SEQ ID NO: 12108 - DNA, 28 bp, synthetic construct
  source 1..28: mol_type = other DNA
gttggtctgcctcttgggcttgttaggg

SEQ ID NO: 12109 - DNA, 28 bp, synthetic construct
  source 1..28: mol_type = other DNA
gtctgcctcttgggcttgttagggttgg

SEQ ID NO: 12110 - DNA, 28 bp, synthetic construct
  source 1..28: mol_type = other DNA
tgcctcttgggcttgttagggttggagg

SEQ ID NO: 12111 - DNA, 28 bp, synthetic construct
  source 1..28: mol_type = other DNA
gacctccaaccctaacaagcccaagagg

SEQ ID NO: 12112 - DNA, 28 bp, synthetic construct
  source 1..28: mol_type = other DNA
tgggcttgttagggttggaggtctctgg

SEQ ID NO: 12113 - DNA, 28 bp, synthetic construct
  source 1..28: mol_type = other DNA
gggcttgttagggttggaggtctctggg

SEQ ID NO: 12114 - DNA, 28 bp, synthetic construct
  source 1..28: mol_type = other DNA
ggcttgttagggttggaggtctctgggg

SEQ ID NO: 12115 - DNA, 28 bp, synthetic construct
  source 1..28: mol_type = other DNA
gcttgttagggttggaggtctctggggg

SEQ ID NO: 12116 - DNA, 28 bp, synthetic construct
  source 1..28: mol_type = other DNA
tgttagggttggaggtctctgggggcgg

SEQ ID NO: 12117 - DNA, 28 bp, synthetic construct
  source 1..28: mol_type = other DNA
gttagggttggaggtctctgggggcggg

SEQ ID NO: 12118 - DNA, 28 bp, synthetic construct
  source 1..28: mol_type = other DNA
ttagggttggaggtctctgggggcgggg

SEQ ID NO: 12119 - DNA, 28 bp, synthetic construct
  source 1..28: mol_type = other DNA
tagggttggaggtctctgggggcggggg

SEQ ID NO: 12120 - DNA, 28 bp, synthetic construct
  source 1..28: mol_type = other DNA
agggttggaggtctctgggggcgggggg

SEQ ID NO: 12121 - DNA, 28 bp, synthetic construct
  source 1..28: mol_type = other DNA
ttggaggtctctgggggcggggggttgg

SEQ ID NO: 12122 - DNA, 28 bp, synthetic construct
  source 1..28: mol_type = other DNA
gtctctgggggcggggggttggtgctgg

SEQ ID NO: 12123 - DNA, 28 bp, synthetic construct
  source 1..28: mol_type = other DNA
ggcggggggttggtgctggctgcgttgg

SEQ ID NO: 12124 - DNA, 28 bp, synthetic construct
  source 1..28: mol_type = other DNA
gggggttggtgctggctgcgttggctgg

SEQ ID NO: 12125 - DNA, 28 bp, synthetic construct
  source 1..28: mol_type = other DNA
gttggtgctggctgcgttggctggctgg

SEQ ID NO: 12126 - DNA, 28 bp, synthetic construct
  source 1..28: mol_type = other DNA
ttggtgctggctgcgttggctggctggg

SEQ ID NO: 12127 - DNA, 28 bp, synthetic construct
  source 1..28: mol_type = other DNA
tggtgctggctgcgttggctggctgggg

SEQ ID NO: 12128 - DNA, 28 bp, synthetic construct
  source 1..28: mol_type = other DNA
gctggctgcgttggctggctggggttgg

SEQ ID NO: 12129 - DNA, 28 bp, synthetic construct
  source 1..28: mol_type = other DNA
ctggctgcgttggctggctggggttggg

SEQ ID NO: 12130 - DNA, 28 bp, synthetic construct
  source 1..28: mol_type = other DNA
tgcgttggctggctggggttgggcctgg

SEQ ID NO: 12131 - DNA, 28 bp, synthetic construct
  source 1..28: mol_type = other DNA
gcgttggctggctggggttgggcctggg

SEQ ID NO: 12132 - DNA, 28 bp, synthetic construct
  source 1..28: mol_type = other DNA
ggcctgggcctgtgttgtagacatttgg

SEQ ID NO: 12133 - DNA, 28 bp, synthetic construct
  source 1..28: mol_type = other DNA
gcctgggcctgtgttgtagacatttggg

SEQ ID NO: 12134 - DNA, 28 bp, synthetic construct
  source 1..28: mol_type = other DNA
tcccaaatgtctacaacacaggcccagg

SEQ ID NO: 12135 - DNA, 28 bp, synthetic construct
  source 1..28: mol_type = other DNA
gaaacttcccaaatgtctacaacacagg

SEQ ID NO: 12136 - DNA, 28 bp, synthetic construct
  source 1..28: mol_type = other DNA
aagtttctagtccatcccccattactgg

SEQ ID NO: 12137 - DNA, 28 bp, synthetic construct
  source 1..28: mol_type = other DNA
tgagaaatctgccagtaatgggggatgg

SEQ ID NO: 12138 - DNA, 28 bp, synthetic construct
  source 1..28: mol_type = other DNA
agattgagaaatctgccagtaatggggg

SEQ ID NO: 12139 - DNA, 28 bp, synthetic construct
  source 1..28: mol_type = other DNA
gagattgagaaatctgccagtaatgggg

SEQ ID NO: 12140 - DNA, 28 bp, synthetic construct
  source 1..28: mol_type = other DNA
cgagattgagaaatctgccagtaatggg

SEQ ID NO: 12141 - DNA, 28 bp, synthetic construct
  source 1..28: mol_type = other DNA
acgagattgagaaatctgccagtaatgg

SEQ ID NO: 12142 - DNA, 28 bp, synthetic construct
  source 1..28: mol_type = other DNA
ctggcagatttctcaatctcgtcccagg

SEQ ID NO: 12143 - DNA, 28 bp, synthetic construct
  source 1..28: mol_type = other DNA
tggcagatttctcaatctcgtcccaggg

SEQ ID NO: 12144 - DNA, 28 bp, synthetic construct
  source 1..28: mol_type = other DNA
tagcatgtctgcggagagcggccctggg

SEQ ID NO: 12145 - DNA, 28 bp, synthetic construct
  source 1..28: mol_type = other DNA
ctagcatgtctgcggagagcggccctgg

SEQ ID NO: 12146 - DNA, 28 bp, synthetic construct
  source 1..28: mol_type = other DNA
ggatcactagcatgtctgcggagagcgg

SEQ ID NO: 12147 - DNA, 28 bp, synthetic construct
  source 1..28: mol_type = other DNA
tgtgatgggatcactagcatgtctgcgg

SEQ ID NO: 12148 - DNA, 28 bp, synthetic construct
  source 1..28: mol_type = other DNA
tagtgatcccatcacattcttcaccagg

SEQ ID NO: 12149 - DNA, 28 bp, synthetic construct
  source 1..28: mol_type = other DNA
tagagtgcctggtgaagaatgtgatggg

SEQ ID NO: 12150 - DNA, 28 bp, synthetic construct
  source 1..28: mol_type = other DNA
gtagagtgcctggtgaagaatgtgatgg

SEQ ID NO: 12151 - DNA, 28 bp, synthetic construct
  source 1..28: mol_type = other DNA
acattcttcaccaggcactctacaaagg

SEQ ID NO: 12152 - DNA, 28 bp, synthetic construct
  source 1..28: mol_type = other DNA
ctcttctcttcctttgtagagtgcctgg

SEQ ID NO: 12153 - DNA, 28 bp, synthetic construct
  source 1..28: mol_type = other DNA
acatgttcgacacataagacaaacctgg

SEQ ID NO: 12154 - DNA, 28 bp, synthetic construct
  source 1..28: mol_type = other DNA
aaactttggggtactggtagctaccagg

SEQ ID NO: 12155 - DNA, 28 bp, synthetic construct
  source 1..28: mol_type = other DNA
ctaccagtaccccaaagtttctttaagg

SEQ ID NO: 12156 - DNA, 28 bp, synthetic construct
  source 1..28: mol_type = other DNA
ccagtaccccaaagtttctttaaggagg

SEQ ID NO: 12157 - DNA, 28 bp, synthetic construct
  source 1..28: mol_type = other DNA
tcagagcctccttaaagaaactttgggg

SEQ ID NO: 12158 - DNA, 28 bp, synthetic construct
  source 1..28: mol_type = other DNA
ttcagagcctccttaaagaaactttggg

SEQ ID NO: 12159 - DNA, 28 bp, synthetic construct
  source 1..28: mol_type = other DNA
cttcagagcctccttaaagaaactttgg

SEQ ID NO: 12160 - DNA, 28 bp, synthetic construct
  source 1..28: mol_type = other DNA
gaagataaccaatgaaagtgacatctgg

SEQ ID NO: 12161 - DNA, 28 bp, synthetic construct
  source 1..28: mol_type = other DNA
ataaccaatgaaagtgacatctggccgg

SEQ ID NO: 12162 - DNA, 28 bp, synthetic construct
  source 1..28: mol_type = other DNA
taaccaatgaaagtgacatctggccggg

SEQ ID NO: 12163 - DNA, 28 bp, synthetic construct
  source 1..28: mol_type = other DNA
gtgcccggccagatgtcactttcattgg

SEQ ID NO: 12164 - DNA, 28 bp, synthetic construct
  source 1..28: mol_type = other DNA
aatgaaagtgacatctggccgggcacgg

SEQ ID NO: 12165 - DNA, 28 bp, synthetic construct
  source 1..28: mol_type = other DNA
gaaagtgacatctggccgggcacggtgg

SEQ ID NO: 12166 - DNA, 28 bp, synthetic construct
  source 1..28: mol_type = other DNA
gattacagacgtgagccaccgtgcccgg

SEQ ID NO: 12167 - DNA, 28 bp, synthetic construct
  source 1..28: mol_type = other DNA
gctcacgtctgtaatcccagcacttcgg

SEQ ID NO: 12168 - DNA, 28 bp, synthetic construct
  source 1..28: mol_type = other DNA
ctcacgtctgtaatcccagcacttcggg

SEQ ID NO: 12169 - DNA, 28 bp, synthetic construct
  source 1..28: mol_type = other DNA
acgtctgtaatcccagcacttcgggagg

SEQ ID NO: 12170 - DNA, 28 bp, synthetic construct
  source 1..28: mol_type = other DNA
atcccagcacttcgggaggccaagaagg

SEQ ID NO: 12171 - DNA, 28 bp, synthetic construct
  source 1..28: mol_type = other DNA
tcccagcacttcgggaggccaagaaggg

SEQ ID NO: 12172 - DNA, 28 bp, synthetic construct
  source 1..28: mol_type = other DNA
acccttcttggcctcccgaagtgctggg

SEQ ID NO: 12173 - DNA, 28 bp, synthetic construct
  source 1..28: mol_type = other DNA
cacccttcttggcctcccgaagtgctgg

SEQ ID NO: 12174 - DNA, 28 bp, synthetic construct
  source 1..28: mol_type = other DNA
cagcacttcgggaggccaagaagggtgg

SEQ ID NO: 12175 - DNA, 28 bp, synthetic construct
  source 1..28: mol_type = other DNA
agcacttcgggaggccaagaagggtggg

SEQ ID NO: 12176 - DNA, 28 bp, synthetic construct
  source 1..28: mol_type = other DNA
gaggccaagaagggtgggtcacttgagg

SEQ ID NO: 12177 - DNA, 28 bp, synthetic construct
  source 1..28: mol_type = other DNA
ctgacctcaagtgacccacccttcttgg

SEQ ID NO: 12178 - DNA, 28 bp, synthetic construct
  source 1..28: mol_type = other DNA
caagaagggtgggtcacttgaggtcagg

SEQ ID NO: 12179 - DNA, 28 bp, synthetic construct
  source 1..28: mol_type = other DNA
gggtgggtcacttgaggtcaggaattgg

SEQ ID NO: 12180 - DNA, 28 bp, synthetic construct
  source 1..28: mol_type = other DNA
tgaggtcaggaattggagatgagcctgg

SEQ ID NO: 12181 - DNA, 28 bp, synthetic construct
  source 1..28: mol_type = other DNA
ttggagatgagcctggacaacatgatgg

SEQ ID NO: 12182 - DNA, 28 bp, synthetic construct
  source 1..28: mol_type = other DNA
gagatggggttccatcatgttgtccagg

SEQ ID NO: 12183 - DNA, 28 bp, synthetic construct
  source 1..28: mol_type = other DNA
attttttgtctttttagtagagatgggg

SEQ ID NO: 12184 - DNA, 28 bp, synthetic construct
  source 1..28: mol_type = other DNA
aattttttgtctttttagtagagatggg

SEQ ID NO: 12185 - DNA, 28 bp, synthetic construct
  source 1..28: mol_type = other DNA
taattttttgtctttttagtagagatgg

SEQ ID NO: 12186 - DNA, 28 bp, synthetic construct
  source 1..28: mol_type = other DNA
tctactaaaaagacaaaaaattagccgg

SEQ ID NO: 12187 - DNA, 28 bp, synthetic construct
  source 1..28: mol_type = other DNA
ctactaaaaagacaaaaaattagccggg

SEQ ID NO: 12188 - DNA, 28 bp, synthetic construct
  source 1..28: mol_type = other DNA
aaaaagacaaaaaattagccgggcatgg

SEQ ID NO: 12189 - DNA, 28 bp, synthetic construct
  source 1..28: mol_type = other DNA
aagacaaaaaattagccgggcatggtgg

SEQ ID NO: 12190 - DNA, 28 bp, synthetic construct
  source 1..28: mol_type = other DNA
tagccgggcatggtggccagctactcgg

SEQ ID NO: 12191 - DNA, 28 bp, synthetic construct
  source 1..28: mol_type = other DNA
agccgggcatggtggccagctactcggg

SEQ ID NO: 12192 - DNA, 28 bp, synthetic construct
  source 1..28: mol_type = other DNA
ctcccgagtagctggccaccatgcccgg

SEQ ID NO: 12193 - DNA, 28 bp, synthetic construct
  source 1..28: mol_type = other DNA
cgggcatggtggccagctactcgggagg

SEQ ID NO: 12194 - DNA, 28 bp, synthetic construct
  source 1..28: mol_type = other DNA
tggtggccagctactcgggaggccgagg

SEQ ID NO: 12195 - DNA, 28 bp, synthetic construct
  source 1..28: mol_type = other DNA
ggccagctactcgggaggccgaggccgg

SEQ ID NO: 12196 - DNA, 28 bp, synthetic construct
  source 1..28: mol_type = other DNA
ctccggcctcggcctcccgagtagctgg

SEQ ID NO: 12197 - DNA, 28 bp, synthetic construct
  source 1..28: mol_type = other DNA
caggttcaaggcagttctccggcctcgg

SEQ ID NO: 12198 - DNA, 28 bp, synthetic construct
  source 1..28: mol_type = other DNA
cgaggccggagaactgccttgaacctgg

SEQ ID NO: 12199 - DNA, 28 bp, synthetic construct
  source 1..28: mol_type = other DNA
gaggccggagaactgccttgaacctggg

SEQ ID NO: 12200 - DNA, 28 bp, synthetic construct
  source 1..28: mol_type = other DNA
gccggagaactgccttgaacctgggagg

SEQ ID NO: 12201 - DNA, 28 bp, synthetic construct
  source 1..28: mol_type = other DNA
gcctcccaggttcaaggcagttctccgg

SEQ ID NO: 12202 - DNA, 28 bp, synthetic construct
  source 1..28: mol_type = other DNA
ggagaactgccttgaacctgggaggcgg

SEQ ID NO: 12203 - DNA, 28 bp, synthetic construct
  source 1..28: mol_type = other DNA
ctgcagtttccgcctcccaggttcaagg

SEQ ID NO: 12204 - DNA, 28 bp, synthetic construct
  source 1..28: mol_type = other DNA
tggctcactgcagtttccgcctcccagg

SEQ ID NO: 12205 - DNA, 28 bp, synthetic construct
  source 1..28: mol_type = other DNA
aggctggagtacagtggcacaatcatgg

SEQ ID NO: 12206 - DNA, 28 bp, synthetic construct
  source 1..28: mol_type = other DNA
atgattgtgccactgtactccagcctgg

SEQ ID NO: 12207 - DNA, 28 bp, synthetic construct
  source 1..28: mol_type = other DNA
tgattgtgccactgtactccagcctggg

SEQ ID NO: 12208 - DNA, 28 bp, synthetic construct
  source 1..28: mol_type = other DNA
tcttgttgcccaggctggagtacagtgg

SEQ ID NO: 12209 - DNA, 28 bp, synthetic construct
  source 1..28: mol_type = other DNA
ggagttttactcttgttgcccaggctgg

SEQ ID NO: 12210 - DNA, 28 bp, synthetic construct
  source 1..28: mol_type = other DNA
agatggagttttactcttgttgcccagg

SEQ ID NO: 12211 - DNA, 28 bp, synthetic construct
  source 1..28: mol_type = other DNA
ttcttttctttttctttttttgagatgg

SEQ ID NO: 12212 - DNA, 28 bp, synthetic construct
  source 1..28: mol_type = other DNA
agaaaagaaaagaaagtgatatccatgg

SEQ ID NO: 12213 - DNA, 28 bp, synthetic construct
  source 1..28: mol_type = other DNA
agaaagtgatatccatggccccacaagg

SEQ ID NO: 12214 - DNA, 28 bp, synthetic construct
  source 1..28: mol_type = other DNA
gaaagtgatatccatggccccacaaggg

SEQ ID NO: 12215 - DNA, 28 bp, synthetic construct
  source 1..28: mol_type = other DNA
tatggtgatctcccttgtggggccatgg

SEQ ID NO: 12216 - DNA, 28 bp, synthetic construct
  source 1..28: mol_type = other DNA
gtatcttatggtgatctcccttgtgggg

SEQ ID NO: 12217 - DNA, 28 bp, synthetic construct
  source 1..28: mol_type = other DNA
ggtatcttatggtgatctcccttgtggg

SEQ ID NO: 12218 - DNA, 28 bp, synthetic construct
  source 1..28: mol_type = other DNA
aggtatcttatggtgatctcccttgtgg

SEQ ID NO: 12219 - DNA, 28 bp, synthetic construct
  source 1..28: mol_type = other DNA
acaagggagatcaccataagatacctgg

SEQ ID NO: 12220 - DNA, 28 bp, synthetic construct
  source 1..28: mol_type = other DNA
caagggagatcaccataagatacctggg

SEQ ID NO: 12221 - DNA, 28 bp, synthetic construct
  source 1..28: mol_type = other DNA
gggtgcaggagtcccaggtatcttatgg

SEQ ID NO: 12222 - DNA, 28 bp, synthetic construct
  source 1..28: mol_type = other DNA
atacctgggactcctgcacccactctgg

SEQ ID NO: 12223 - DNA, 28 bp, synthetic construct
  source 1..28: mol_type = other DNA
tacctgggactcctgcacccactctggg

SEQ ID NO: 12224 - DNA, 28 bp, synthetic construct
  source 1..28: mol_type = other DNA
ggcccagagtgggtgcaggagtcccagg

SEQ ID NO: 12225 - DNA, 28 bp, synthetic construct
  source 1..28: mol_type = other DNA
tgctgcacaggcccagagtgggtgcagg

SEQ ID NO: 12226 - DNA, 28 bp, synthetic construct
  source 1..28: mol_type = other DNA
tgcaggtgctgcacaggcccagagtggg

SEQ ID NO: 12227 - DNA, 28 bp, synthetic construct
  source 1..28: mol_type = other DNA
gtgcaggtgctgcacaggcccagagtgg

SEQ ID NO: 12228 - DNA, 28 bp, synthetic construct
  source 1..28: mol_type = other DNA
gggcctgtgcagcacctgcacctcaagg

SEQ ID NO: 12229 - DNA, 28 bp, synthetic construct
  source 1..28: mol_type = other DNA
ggcctgtgcagcacctgcacctcaaggg

SEQ ID NO: 12230 - DNA, 28 bp, synthetic construct
  source 1..28: mol_type = other DNA
gtcccttgaggtgcaggtgctgcacagg

SEQ ID NO: 12231 - DNA, 28 bp, synthetic construct
  source 1..28: mol_type = other DNA
aggtcagtgtggtcccttgaggtgcagg

SEQ ID NO: 12232 - DNA, 28 bp, synthetic construct
  source 1..28: mol_type = other DNA
agcagtaggtcagtgtggtcccttgagg

SEQ ID NO: 12233 - DNA, 28 bp, synthetic construct
  source 1..28: mol_type = other DNA
ctgtgggcatagcagtaggtcagtgtgg

SEQ ID NO: 12234 - DNA, 28 bp, synthetic construct
  source 1..28: mol_type = other DNA
atgggaaggctgtgggcatagcagtagg

SEQ ID NO: 12235 - DNA, 28 bp, synthetic construct
  source 1..28: mol_type = other DNA
atgcccacagccttcccatgactacagg

SEQ ID NO: 12236 - DNA, 28 bp, synthetic construct
  source 1..28: mol_type = other DNA
tttcctgtagtcatgggaaggctgtggg

SEQ ID NO: 12237 - DNA, 28 bp, synthetic construct
  source 1..28: mol_type = other DNA
ctttcctgtagtcatgggaaggctgtgg

SEQ ID NO: 12238 - DNA, 28 bp, synthetic construct
  source 1..28: mol_type = other DNA
gtcttactttcctgtagtcatgggaagg

SEQ ID NO: 12239 - DNA, 28 bp, synthetic construct
  source 1..28: mol_type = other DNA
aagggtcttactttcctgtagtcatggg

SEQ ID NO: 12240 - DNA, 28 bp, synthetic construct
  source 1..28: mol_type = other DNA
caagggtcttactttcctgtagtcatgg

SEQ ID NO: 12241 - DNA, 28 bp, synthetic construct
  source 1..28: mol_type = other DNA
catgactacaggaaagtaagacccttgg

SEQ ID NO: 12242 - DNA, 28 bp, synthetic construct
  source 1..28: mol_type = other DNA
atgactacaggaaagtaagacccttggg

SEQ ID NO: 12243 - DNA, 28 bp, synthetic construct
  source 1..28: mol_type = other DNA
agagtgggctcttgaagtttcccaaggg

SEQ ID NO: 12244 - DNA, 28 bp, synthetic construct
  source 1..28: mol_type = other DNA
aagagtgggctcttgaagtttcccaagg

SEQ ID NO: 12245 - DNA, 28 bp, synthetic construct
  source 1..28: mol_type = other DNA
tgtttcttgtcattgcagtaagagtggg

SEQ ID NO: 12246 - DNA, 28 bp, synthetic construct
  source 1..28: mol_type = other DNA
atgtttcttgtcattgcagtaagagtgg

SEQ ID NO: 12247 - DNA, 28 bp, synthetic construct
  source 1..28: mol_type = other DNA
tcttactgcaatgacaagaaacatgagg

SEQ ID NO: 12248 - DNA, 28 bp, synthetic construct
  source 1..28: mol_type = other DNA
aaaaccaaccacttctagtctgttatgg

SEQ ID NO: 12249 - DNA, 28 bp, synthetic construct
  source 1..28: mol_type = other DNA
aaaccaaccacttctagtctgttatggg

SEQ ID NO: 12250 - DNA, 28 bp, synthetic construct
  source 1..28: mol_type = other DNA
aaccaaccacttctagtctgttatgggg

SEQ ID NO: 12251 - DNA, 28 bp, synthetic construct
  source 1..28: mol_type = other DNA
tgccccataacagactagaagtggttgg

SEQ ID NO: 12252 - DNA, 28 bp, synthetic construct
  source 1..28: mol_type = other DNA
ttcttgccccataacagactagaagtgg

SEQ ID NO: 12253 - DNA, 28 bp, synthetic construct
  source 1..28: mol_type = other DNA
tagtctgttatggggcaagaaagagagg

SEQ ID NO: 12254 - DNA, 28 bp, synthetic construct
  source 1..28: mol_type = other DNA
tagaaaagtcatctgggtctcacatagg

SEQ ID NO: 12255 - DNA, 28 bp, synthetic construct
  source 1..28: mol_type = other DNA
atgtgagacccagatgacttttctaagg

SEQ ID NO: 12256 - DNA, 28 bp, synthetic construct
  source 1..28: mol_type = other DNA
aatctgggccttagaaaagtcatctggg

SEQ ID NO: 12257 - DNA, 28 bp, synthetic construct
  source 1..28: mol_type = other DNA
aaatctgggccttagaaaagtcatctgg

SEQ ID NO: 12258 - DNA, 28 bp, synthetic construct
  source 1..28: mol_type = other DNA
ttttctaaggcccagatttgatatgagg

SEQ ID NO: 12259 - DNA, 28 bp, synthetic construct
  source 1..28: mol_type = other DNA
aggaggctgacctcatatcaaatctggg

SEQ ID NO: 12260 - DNA, 28 bp, synthetic construct
  source 1..28: mol_type = other DNA
aaggaggctgacctcatatcaaatctgg

SEQ ID NO: 12261 - DNA, 28 bp, synthetic construct
  source 1..28: mol_type = other DNA
agatttgatatgaggtcagcctccttgg

SEQ ID NO: 12262 - DNA, 28 bp, synthetic construct
  source 1..28: mol_type = other DNA
gatttgatatgaggtcagcctccttggg

SEQ ID NO: 12263 - DNA, 28 bp, synthetic construct
  source 1..28: mol_type = other DNA
cgctgtgggaagaattcgcccaaggagg

SEQ ID NO: 12264 - DNA, 28 bp, synthetic construct
  source 1..28: mol_type = other DNA
ctccttgggcgaattcttcccacagcgg

SEQ ID NO: 12265 - DNA, 28 bp, synthetic construct
  source 1..28: mol_type = other DNA
aaccgctgtgggaagaattcgcccaagg

SEQ ID NO: 12266 - DNA, 28 bp, synthetic construct
  source 1..28: mol_type = other DNA
gtgtggggttggggggaaccgctgtggg

SEQ ID NO: 12267 - DNA, 28 bp, synthetic construct
  source 1..28: mol_type = other DNA
agtgtggggttggggggaaccgctgtgg

SEQ ID NO: 12268 - DNA, 28 bp, synthetic construct
  source 1..28: mol_type = other DNA
gttccccccaaccccacactgccccagg

SEQ ID NO: 12269 - DNA, 28 bp, synthetic construct
  source 1..28: mol_type = other DNA
gggcctggggcagtgtggggttgggggg

SEQ ID NO: 12270 - DNA, 28 bp, synthetic construct
  source 1..28: mol_type = other DNA
ggggcctggggcagtgtggggttggggg

SEQ ID NO: 12271 - DNA, 28 bp, synthetic construct
  source 1..28: mol_type = other DNA
aggggcctggggcagtgtggggttgggg

SEQ ID NO: 12272 - DNA, 28 bp, synthetic construct
  source 1..28: mol_type = other DNA
taggggcctggggcagtgtggggttggg

SEQ ID NO: 12273 - DNA, 28 bp, synthetic construct
  source 1..28: mol_type = other DNA
ctaggggcctggggcagtgtggggttgg

SEQ ID NO: 12274 - DNA, 28 bp, synthetic construct
  source 1..28: mol_type = other DNA
gatgctaggggcctggggcagtgtgggg

SEQ ID NO: 12275 - DNA, 28 bp, synthetic construct
  source 1..28: mol_type = other DNA
agatgctaggggcctggggcagtgtggg

SEQ ID NO: 12276 - DNA, 28 bp, synthetic construct
  source 1..28: mol_type = other DNA
tagatgctaggggcctggggcagtgtgg

SEQ ID NO: 12277 - DNA, 28 bp, synthetic construct
  source 1..28: mol_type = other DNA
acactgccccaggcccctagcatctagg

SEQ ID NO: 12278 - DNA, 28 bp, synthetic construct
  source 1..28: mol_type = other DNA
ttagagcctagatgctaggggcctgggg

SEQ ID NO: 12279 - DNA, 28 bp, synthetic construct
  source 1..28: mol_type = other DNA
gttagagcctagatgctaggggcctggg

SEQ ID NO: 12280 - DNA, 28 bp, synthetic construct
  source 1..28: mol_type = other DNA
tgttagagcctagatgctaggggcctgg

SEQ ID NO: 12281 - DNA, 28 bp, synthetic construct
  source 1..28: mol_type = other DNA
cttgttgttagagcctagatgctagggg

SEQ ID NO: 12282 - DNA, 28 bp, synthetic construct
  source 1..28: mol_type = other DNA
acttgttgttagagcctagatgctaggg

SEQ ID NO: 12283 - DNA, 28 bp, synthetic construct
  source 1..28: mol_type = other DNA
gacttgttgttagagcctagatgctagg

SEQ ID NO: 12284 - DNA, 28 bp, synthetic construct
  source 1..28: mol_type = other DNA
gatcaaaggctgaaggtgacagggttgg

SEQ ID NO: 12285 - DNA, 28 bp, synthetic construct
  source 1..28: mol_type = other DNA
agcagatcaaaggctgaaggtgacaggg

SEQ ID NO: 12286 - DNA, 28 bp, synthetic construct
  source 1..28: mol_type = other DNA
tagcagatcaaaggctgaaggtgacagg

SEQ ID NO: 12287 - DNA, 28 bp, synthetic construct
  source 1..28: mol_type = other DNA
gtagggctagcagatcaaaggctgaagg

SEQ ID NO: 12288 - DNA, 28 bp, synthetic construct
  source 1..28: mol_type = other DNA
tctggcagtagggctagcagatcaaagg

SEQ ID NO: 12289 - DNA, 28 bp, synthetic construct
  source 1..28: mol_type = other DNA
tctgctagccctactgccagacagatgg

SEQ ID NO: 12290 - DNA, 28 bp, synthetic construct
  source 1..28: mol_type = other DNA
ctagccctactgccagacagatggatgg

SEQ ID NO: 12291 - DNA, 28 bp, synthetic construct
  source 1..28: mol_type = other DNA
gcatccatccatctgtctggcagtaggg

SEQ ID NO: 12292 - DNA, 28 bp, synthetic construct
  source 1..28: mol_type = other DNA
tgcatccatccatctgtctggcagtagg

SEQ ID NO: 12293 - DNA, 28 bp, synthetic construct
  source 1..28: mol_type = other DNA
ctatgtctgcatccatccatctgtctgg

SEQ ID NO: 12294 - DNA, 28 bp, synthetic construct
  source 1..28: mol_type = other DNA
cagacagatggatggatgcagacatagg

SEQ ID NO: 12295 - DNA, 28 bp, synthetic construct
  source 1..28: mol_type = other DNA
cacagactctctctctctctctctctgg

SEQ ID NO: 12296 - DNA, 28 bp, synthetic construct
  source 1..28: mol_type = other DNA
ctctctctctctggcccatagcatctgg

SEQ ID NO: 12297 - DNA, 28 bp, synthetic construct
  source 1..28: mol_type = other DNA
agatgagggaagcaccagatgctatggg

SEQ ID NO: 12298 - DNA, 28 bp, synthetic construct
  source 1..28: mol_type = other DNA
gagatgagggaagcaccagatgctatgg

SEQ ID NO: 12299 - DNA, 28 bp, synthetic construct
  source 1..28: mol_type = other DNA
catggaactcagtagatggagatgaggg

SEQ ID NO: 12300 - DNA, 28 bp, synthetic construct
  source 1..28: mol_type = other DNA
cctcatctccatctactgagttccatgg

SEQ ID NO: 12301 - DNA, 28 bp, synthetic construct
  source 1..28: mol_type = other DNA
ggggctgaccatggaactcagtagatgg

SEQ ID NO: 12302 - DNA, 28 bp, synthetic construct
  source 1..28: mol_type = other DNA
tactgagttccatggtcagccccctagg

SEQ ID NO: 12303 - DNA, 28 bp, synthetic construct
  source 1..28: mol_type = other DNA
cttcaggttcctagggggctgaccatgg

SEQ ID NO: 12304 - DNA, 28 bp, synthetic construct
  source 1..28: mol_type = other DNA
catggtcagccccctaggaacctgaagg

SEQ ID NO: 12305 - DNA, 28 bp, synthetic construct
  source 1..28: mol_type = other DNA
gtcagccccctaggaacctgaaggcagg

SEQ ID NO: 12306 - DNA, 28 bp, synthetic construct
  source 1..28: mol_type = other DNA
atgagcctgccttcaggttcctaggggg

SEQ ID NO: 12307 - DNA, 28 bp, synthetic construct
  source 1..28: mol_type = other DNA
gatgagcctgccttcaggttcctagggg

SEQ ID NO: 12308 - DNA, 28 bp, synthetic construct
  source 1..28: mol_type = other DNA
agatgagcctgccttcaggttcctaggg

SEQ ID NO: 12309 - DNA, 28 bp, synthetic construct
  source 1..28: mol_type = other DNA
aagatgagcctgccttcaggttcctagg

SEQ ID NO: 12310 - DNA, 28 bp, synthetic construct
  source 1..28: mol_type = other DNA
gtgaaataaagatgagcctgccttcagg

SEQ ID NO: 12311 - DNA, 28 bp, synthetic construct
  source 1..28: mol_type = other DNA
tttcacttttatcttcccagcacacagg

SEQ ID NO: 12312 - DNA, 28 bp, synthetic construct
  source 1..28: mol_type = other DNA
cacttttatcttcccagcacacaggagg

SEQ ID NO: 12313 - DNA, 28 bp, synthetic construct
  source 1..28: mol_type = other DNA
actaagggttcacctcctgtgtgctggg

SEQ ID NO: 12314 - DNA, 28 bp, synthetic construct
  source 1..28: mol_type = other DNA
cactaagggttcacctcctgtgtgctgg

SEQ ID NO: 12315 - DNA, 28 bp, synthetic construct
  source 1..28: mol_type = other DNA
atgacaatgtgggtatggtcactaaggg

SEQ ID NO: 12316 - DNA, 28 bp, synthetic construct
  source 1..28: mol_type = other DNA
gatgacaatgtgggtatggtcactaagg

SEQ ID NO: 12317 - DNA, 28 bp, synthetic construct
  source 1..28: mol_type = other DNA
agtgaccatacccacattgtcatcctgg

SEQ ID NO: 12318 - DNA, 28 bp, synthetic construct
  source 1..28: mol_type = other DNA
gtgaccatacccacattgtcatcctggg

SEQ ID NO: 12319 - DNA, 28 bp, synthetic construct
  source 1..28: mol_type = other DNA
tgaccatacccacattgtcatcctgggg

SEQ ID NO: 12320 - DNA, 28 bp, synthetic construct
  source 1..28: mol_type = other DNA
aagccccaggatgacaatgtgggtatgg

SEQ ID NO: 12321 - DNA, 28 bp, synthetic construct
  source 1..28: mol_type = other DNA
gctggaagccccaggatgacaatgtggg

SEQ ID NO: 12322 - DNA, 28 bp, synthetic construct
  source 1..28: mol_type = other DNA
agctggaagccccaggatgacaatgtgg

SEQ ID NO: 12323 - DNA, 28 bp, synthetic construct
  source 1..28: mol_type = other DNA
gctttgagattgagctggaagccccagg

SEQ ID NO: 12324 - DNA, 28 bp, synthetic construct
  source 1..28: mol_type = other DNA
ggcttccagctcaatctcaaagctctgg

SEQ ID NO: 12325 - DNA, 28 bp, synthetic construct
  source 1..28: mol_type = other DNA
cttttccagagctttgagattgagctgg

SEQ ID NO: 12326 - DNA, 28 bp, synthetic construct
  source 1..28: mol_type = other DNA
aagcaaaacagttcacactctcacatgg

SEQ ID NO: 12327 - DNA, 28 bp, synthetic construct
  source 1..28: mol_type = other DNA
agttcacactctcacatggataatgtgg

SEQ ID NO: 12328 - DNA, 28 bp, synthetic construct
  source 1..28: mol_type = other DNA
gaccaccagactcagtcactcgctcagg

SEQ ID NO: 12329 - DNA, 28 bp, synthetic construct
  source 1..28: mol_type = other DNA
tgcctgagcgagtgactgagtctggtgg

SEQ ID NO: 12330 - DNA, 28 bp, synthetic construct
  source 1..28: mol_type = other DNA
tgttgcctgagcgagtgactgagtctgg

SEQ ID NO: 12331 - DNA, 28 bp, synthetic construct
  source 1..28: mol_type = other DNA
agactcagtcactcgctcaggcaacagg

SEQ ID NO: 12332 - DNA, 28 bp, synthetic construct
  source 1..28: mol_type = other DNA
aacaggtcctaacatgccttgccctagg

SEQ ID NO: 12333 - DNA, 28 bp, synthetic construct
  source 1..28: mol_type = other DNA
gctgagtcctagggcaaggcatgttagg

SEQ ID NO: 12334 - DNA, 28 bp, synthetic construct
  source 1..28: mol_type = other DNA
taacatgccttgccctaggactcagcgg

SEQ ID NO: 12335 - DNA, 28 bp, synthetic construct
  source 1..28: mol_type = other DNA
atgtcaaccgctgagtcctagggcaagg

SEQ ID NO: 12336 - DNA, 28 bp, synthetic construct
  source 1..28: mol_type = other DNA
ttgccctaggactcagcggttgacatgg

SEQ ID NO: 12337 - DNA, 28 bp, synthetic construct
  source 1..28: mol_type = other DNA
atgccatgtcaaccgctgagtcctaggg

SEQ ID NO: 12338 - DNA, 28 bp, synthetic construct
  source 1..28: mol_type = other DNA
aatgccatgtcaaccgctgagtcctagg

SEQ ID NO: 12339 - DNA, 28 bp, synthetic construct
  source 1..28: mol_type = other DNA
tgacatggcattctcccgagtgattagg

SEQ ID NO: 12340 - DNA, 28 bp, synthetic construct
  source 1..28: mol_type = other DNA
ttctcccgagtgattaggcaatacatgg

SEQ ID NO: 12341 - DNA, 28 bp, synthetic construct
  source 1..28: mol_type = other DNA
tctcccgagtgattaggcaatacatggg

SEQ ID NO: 12342 - DNA, 28 bp, synthetic construct
  source 1..28: mol_type = other DNA
ctcccgagtgattaggcaatacatgggg

SEQ ID NO: 12343 - DNA, 28 bp, synthetic construct
  source 1..28: mol_type = other DNA
caccccatgtattgcctaatcactcggg

SEQ ID NO: 12344 - DNA, 28 bp, synthetic construct
  source 1..28: mol_type = other DNA
tcaccccatgtattgcctaatcactcgg

SEQ ID NO: 12345 - DNA, 28 bp, synthetic construct
  source 1..28: mol_type = other DNA
taggcaatacatggggtgaatactgtgg

SEQ ID NO: 12346 - DNA, 28 bp, synthetic construct
  source 1..28: mol_type = other DNA
gcaatacatggggtgaatactgtggagg

SEQ ID NO: 12347 - DNA, 28 bp, synthetic construct
  source 1..28: mol_type = other DNA
catggggtgaatactgtggaggagaagg

SEQ ID NO: 12348 - DNA, 28 bp, synthetic construct
  source 1..28: mol_type = other DNA
atggggtgaatactgtggaggagaaggg

SEQ ID NO: 12349 - DNA, 28 bp, synthetic construct
  source 1..28: mol_type = other DNA
ggtgaatactgtggaggagaagggcagg

SEQ ID NO: 12350 - DNA, 28 bp, synthetic construct
  source 1..28: mol_type = other DNA
gtgaatactgtggaggagaagggcaggg

SEQ ID NO: 12351 - DNA, 28 bp, synthetic construct
  source 1..28: mol_type = other DNA
gtggaggagaagggcagggctgctctgg

SEQ ID NO: 12352 - DNA, 28 bp, synthetic construct
  source 1..28: mol_type = other DNA
gagaagggcagggctgctctggccatgg

SEQ ID NO: 12353 - DNA, 28 bp, synthetic construct
  source 1..28: mol_type = other DNA
agggcagggctgctctggccatggacgg

SEQ ID NO: 12354 - DNA, 28 bp, synthetic construct
  source 1..28: mol_type = other DNA
gggcagggctgctctggccatggacggg

SEQ ID NO: 12355 - DNA, 28 bp, synthetic construct
  source 1..28: mol_type = other DNA
ggcagggctgctctggccatggacgggg

SEQ ID NO: 12356 - DNA, 28 bp, synthetic construct
  source 1..28: mol_type = other DNA
ggctgctctggccatggacggggagagg

SEQ ID NO: 12357 - DNA, 28 bp, synthetic construct
  source 1..28: mol_type = other DNA
gctgctctggccatggacggggagaggg

SEQ ID NO: 12358 - DNA, 28 bp, synthetic construct
  source 1..28: mol_type = other DNA
cagtgcagatccctctccccgtccatgg

SEQ ID NO: 12359 - DNA, 28 bp, synthetic construct
  source 1..28: mol_type = other DNA
ggggagagggatctgcactgacccgagg

SEQ ID NO: 12360 - DNA, 28 bp, synthetic construct
  source 1..28: mol_type = other DNA
gggagagggatctgcactgacccgaggg

SEQ ID NO: 12361 - DNA, 28 bp, synthetic construct
  source 1..28: mol_type = other DNA
agggatctgcactgacccgagggacagg

SEQ ID NO: 12362 - DNA, 28 bp, synthetic construct
  source 1..28: mol_type = other DNA
gatctgcactgacccgagggacaggcgg

SEQ ID NO: 12363 - DNA, 28 bp, synthetic construct
  source 1..28: mol_type = other DNA
tcttcagagatgccgcctgtccctcggg

SEQ ID NO: 12364 - DNA, 28 bp, synthetic construct
  source 1..28: mol_type = other DNA
ttcttcagagatgccgcctgtccctcgg

SEQ ID NO: 12365 - DNA, 28 bp, synthetic construct
  source 1..28: mol_type = other DNA
gagggacaggcggcatctctgaagaagg

SEQ ID NO: 12366 - DNA, 28 bp, synthetic construct
  source 1..28: mol_type = other DNA
agggacaggcggcatctctgaagaaggg

SEQ ID NO: 12367 - DNA, 28 bp, synthetic construct
  source 1..28: mol_type = other DNA
aagaagggacagagaatgagaccagagg

SEQ ID NO: 12368 - DNA, 28 bp, synthetic construct
  source 1..28: mol_type = other DNA
aagggacagagaatgagaccagaggcgg

SEQ ID NO: 12369 - DNA, 28 bp, synthetic construct
  source 1..28: mol_type = other DNA
agggacagagaatgagaccagaggcggg

SEQ ID NO: 12370 - DNA, 28 bp, synthetic construct
  source 1..28: mol_type = other DNA
gggacagagaatgagaccagaggcgggg

SEQ ID NO: 12371 - DNA, 28 bp, synthetic construct
  source 1..28: mol_type = other DNA
ggacagagaatgagaccagaggcggggg

SEQ ID NO: 12372 - DNA, 28 bp, synthetic construct
  source 1..28: mol_type = other DNA
agcgcacacactcttcccccgcctctgg

SEQ ID NO: 12373 - DNA, 28 bp, synthetic construct
  source 1..28: mol_type = other DNA
cgggggaagagtgtgtgcgcttctgtgg

SEQ ID NO: 12374 - DNA, 28 bp, synthetic construct
  source 1..28: mol_type = other DNA
gggaagagtgtgtgcgcttctgtggtgg

SEQ ID NO: 12375 - DNA, 28 bp, synthetic construct
  source 1..28: mol_type = other DNA
ggaagagtgtgtgcgcttctgtggtggg

SEQ ID NO: 12376 - DNA, 28 bp, synthetic construct
  source 1..28: mol_type = other DNA
gaagagtgtgtgcgcttctgtggtgggg

SEQ ID NO: 12377 - DNA, 28 bp, synthetic construct
  source 1..28: mol_type = other DNA
aagagtgtgtgcgcttctgtggtggggg

SEQ ID NO: 12378 - DNA, 28 bp, synthetic construct
  source 1..28: mol_type = other DNA
tgtgtgcgcttctgtggtgggggtcagg

SEQ ID NO: 12379 - DNA, 28 bp, synthetic construct
  source 1..28: mol_type = other DNA
tgcgcttctgtggtgggggtcaggcagg

SEQ ID NO: 12380 - DNA, 28 bp, synthetic construct
  source 1..28: mol_type = other DNA
tctgtggtgggggtcaggcaggcagtgg

SEQ ID NO: 12381 - DNA, 28 bp, synthetic construct
  source 1..28: mol_type = other DNA
gggtcaggcaggcagtggcaagagaagg

SEQ ID NO: 12382 - DNA, 28 bp, synthetic construct
  source 1..28: mol_type = other DNA
aggcagtggcaagagaaggcatgcctgg

SEQ ID NO: 12383 - DNA, 28 bp, synthetic construct
  source 1..28: mol_type = other DNA
agaaggcatgcctggcatagataacagg

SEQ ID NO: 12384 - DNA, 28 bp, synthetic construct
  source 1..28: mol_type = other DNA
gatgttgtctcctgttatctatgccagg

SEQ ID NO: 12385 - DNA, 28 bp, synthetic construct
  source 1..28: mol_type = other DNA
gagcagcagtttttaatcttttcaacgg

SEQ ID NO: 12386 - DNA, 28 bp, synthetic construct
  source 1..28: mol_type = other DNA
ccctctccattttcatactgacctgtgg

SEQ ID NO: 12387 - DNA, 28 bp, synthetic construct
  source 1..28: mol_type = other DNA
gccacaggtcagtatgaaaatggagagg

SEQ ID NO: 12388 - DNA, 28 bp, synthetic construct
  source 1..28: mol_type = other DNA
ttttggccacaggtcagtatgaaaatgg

SEQ ID NO: 12389 - DNA, 28 bp, synthetic construct
  source 1..28: mol_type = other DNA
tcatactgacctgtggccaaaaagcagg

SEQ ID NO: 12390 - DNA, 28 bp, synthetic construct
  source 1..28: mol_type = other DNA
atggtggctcctgctttttggccacagg

SEQ ID NO: 12391 - DNA, 28 bp, synthetic construct
  source 1..28: mol_type = other DNA
gtggtgaatggtggctcctgctttttgg

SEQ ID NO: 12392 - DNA, 28 bp, synthetic construct
  source 1..28: mol_type = other DNA
agctaactcttaacgtggtgaatggtgg

SEQ ID NO: 12393 - DNA, 28 bp, synthetic construct
  source 1..28: mol_type = other DNA
ttcagctaactcttaacgtggtgaatgg

SEQ ID NO: 12394 - DNA, 28 bp, synthetic construct
  source 1..28: mol_type = other DNA
attcaccacgttaagagttagctgaagg

SEQ ID NO: 12395 - DNA, 28 bp, synthetic construct
  source 1..28: mol_type = other DNA
cttgaccttcagctaactcttaacgtgg

SEQ ID NO: 12396 - DNA, 28 bp, synthetic construct
  source 1..28: mol_type = other DNA
cacgttaagagttagctgaaggtcaagg

SEQ ID NO: 12397 - DNA, 28 bp, synthetic construct
  source 1..28: mol_type = other DNA
aagagttagctgaaggtcaaggaaaagg

SEQ ID NO: 12398 - DNA, 28 bp, synthetic construct
  source 1..28: mol_type = other DNA
atttcgcttattgtttccaatccaaagg

SEQ ID NO: 12399 - DNA, 28 bp, synthetic construct
  source 1..28: mol_type = other DNA
tcgcttattgtttccaatccaaaggcgg

SEQ ID NO: 12400 - DNA, 28 bp, synthetic construct
  source 1..28: mol_type = other DNA
ttcgattatgtagccgcctttggattgg

SEQ ID NO: 12401 - DNA, 28 bp, synthetic construct
  source 1..28: mol_type = other DNA
tcaagttcgattatgtagccgcctttgg

SEQ ID NO: 12402 - DNA, 28 bp, synthetic construct
  source 1..28: mol_type = other DNA
ttctgttggaagtagatacaaaagtagg

SEQ ID NO: 12403 - DNA, 28 bp, synthetic construct
  source 1..28: mol_type = other DNA
tgggaacatgatatagggtttctgttgg

SEQ ID NO: 12404 - DNA, 28 bp, synthetic construct
  source 1..28: mol_type = other DNA
tcttctacactgggaacatgatataggg

SEQ ID NO: 12405 - DNA, 28 bp, synthetic construct
  source 1..28: mol_type = other DNA
ttcttctacactgggaacatgatatagg

SEQ ID NO: 12406 - DNA, 28 bp, synthetic construct
  source 1..28: mol_type = other DNA
tatcatgttcccagtgtagaagaaaagg

SEQ ID NO: 12407 - DNA, 28 bp, synthetic construct
  source 1..28: mol_type = other DNA
ttgcttcatccttttcttctacactggg

SEQ ID NO: 12408 - DNA, 28 bp, synthetic construct
  source 1..28: mol_type = other DNA
cttgcttcatccttttcttctacactgg

SEQ ID NO: 12409 - DNA, 28 bp, synthetic construct
  source 1..28: mol_type = other DNA
cagtgtagaagaaaaggatgaagcaagg

SEQ ID NO: 12410 - DNA, 28 bp, synthetic construct
  source 1..28: mol_type = other DNA
gctgtagttcccaaactgagtgcccagg

SEQ ID NO: 12411 - DNA, 28 bp, synthetic construct
  source 1..28: mol_type = other DNA
tcccaaactgagtgcccaggtgccttgg

SEQ ID NO: 12412 - DNA, 28 bp, synthetic construct
  source 1..28: mol_type = other DNA
cccaaactgagtgcccaggtgccttggg

SEQ ID NO: 12413 - DNA, 28 bp, synthetic construct
  source 1..28: mol_type = other DNA
ccaaactgagtgcccaggtgccttgggg

SEQ ID NO: 12414 - DNA, 28 bp, synthetic construct
  source 1..28: mol_type = other DNA
gtgcccaggtgccttggggatgtcatgg

SEQ ID NO: 12415 - DNA, 28 bp, synthetic construct
  source 1..28: mol_type = other DNA
ttaccatgacatccccaaggcacctggg

SEQ ID NO: 12416 - DNA, 28 bp, synthetic construct
  source 1..28: mol_type = other DNA
tttaccatgacatccccaaggcacctgg

SEQ ID NO: 12417 - DNA, 28 bp, synthetic construct
  source 1..28: mol_type = other DNA
atctgagtttaccatgacatccccaagg

SEQ ID NO: 12418 - DNA, 28 bp, synthetic construct
  source 1..28: mol_type = other DNA
ttggggatgtcatggtaaactcagatgg

SEQ ID NO: 12419 - DNA, 28 bp, synthetic construct
  source 1..28: mol_type = other DNA
tcatggtaaactcagatggcattgcagg

SEQ ID NO: 12420 - DNA, 28 bp, synthetic construct
  source 1..28: mol_type = other DNA
tggcattgcaggaactatcagcacaagg

SEQ ID NO: 12421 - DNA, 28 bp, synthetic construct
  source 1..28: mol_type = other DNA
tgacactgttgaatatagtgcaatctgg

SEQ ID NO: 12422 - DNA, 28 bp, synthetic construct
  source 1..28: mol_type = other DNA
cagcaacttgctgatcaagtgttgcagg

SEQ ID NO: 12423 - DNA, 28 bp, synthetic construct
  source 1..28: mol_type = other DNA
tgctgtaataaaacaaagattgtccagg

SEQ ID NO: 12424 - DNA, 28 bp, synthetic construct
  source 1..28: mol_type = other DNA
tgtgcttggtgagtggagacagctgtgg

SEQ ID NO: 12425 - DNA, 28 bp, synthetic construct
  source 1..28: mol_type = other DNA
agctgtctccactcaccaagcacagtgg

SEQ ID NO: 12426 - DNA, 28 bp, synthetic construct
  source 1..28: mol_type = other DNA
gggtgttgccactgtgcttggtgagtgg

SEQ ID NO: 12427 - DNA, 28 bp, synthetic construct
  source 1..28: mol_type = other DNA
accaagcacagtggcaacacccacaagg

SEQ ID NO: 12428 - DNA, 28 bp, synthetic construct
  source 1..28: mol_type = other DNA
ccaagcacagtggcaacacccacaaggg

SEQ ID NO: 12429 - DNA, 28 bp, synthetic construct
  source 1..28: mol_type = other DNA
caagcacagtggcaacacccacaagggg

SEQ ID NO: 12430 - DNA, 28 bp, synthetic construct
  source 1..28: mol_type = other DNA
cagtggcaacacccacaaggggcagagg

SEQ ID NO: 12431 - DNA, 28 bp, synthetic construct
  source 1..28: mol_type = other DNA
ggatgactgggcctctgccccttgtggg

SEQ ID NO: 12432 - DNA, 28 bp, synthetic construct
  source 1..28: mol_type = other DNA
aggatgactgggcctctgccccttgtgg

SEQ ID NO: 12433 - DNA, 28 bp, synthetic construct
  source 1..28: mol_type = other DNA
ggggcagaggcccagtcatcctacacgg

SEQ ID NO: 12434 - DNA, 28 bp, synthetic construct
  source 1..28: mol_type = other DNA
gggcagaggcccagtcatcctacacggg

SEQ ID NO: 12435 - DNA, 28 bp, synthetic construct
  source 1..28: mol_type = other DNA
ggcccagtcatcctacacgggtctttgg

SEQ ID NO: 12436 - DNA, 28 bp, synthetic construct
  source 1..28: mol_type = other DNA
agccaaagacccgtgtaggatgactggg

SEQ ID NO: 12437 - DNA, 28 bp, synthetic construct
  source 1..28: mol_type = other DNA
aagccaaagacccgtgtaggatgactgg

SEQ ID NO: 12438 - DNA, 28 bp, synthetic construct
  source 1..28: mol_type = other DNA
agtcatcctacacgggtctttggcttgg

SEQ ID NO: 12439 - DNA, 28 bp, synthetic construct
  source 1..28: mol_type = other DNA
tgctggccaagccaaagacccgtgtagg

SEQ ID NO: 12440 - DNA, 28 bp, synthetic construct
  source 1..28: mol_type = other DNA
tgggtacagcaaagtgtggtgctgctgg

SEQ ID NO: 12441 - DNA, 28 bp, synthetic construct
  source 1..28: mol_type = other DNA
caccacactttgctgtacccatcagtgg

SEQ ID NO: 12442 - DNA, 28 bp, synthetic construct
  source 1..28: mol_type = other DNA
ggccactgatgggtacagcaaagtgtgg

SEQ ID NO: 12443 - DNA, 28 bp, synthetic construct
  source 1..28: mol_type = other DNA
tctgcagagaaggcaggccactgatggg

SEQ ID NO: 12444 - DNA, 28 bp, synthetic construct
  source 1..28: mol_type = other DNA
ttctgcagagaaggcaggccactgatgg

SEQ ID NO: 12445 - DNA, 28 bp, synthetic construct
  source 1..28: mol_type = other DNA
ggcctgccttctctgcagaagcagctgg

SEQ ID NO: 12446 - DNA, 28 bp, synthetic construct
  source 1..28: mol_type = other DNA
gcctgccttctctgcagaagcagctggg

SEQ ID NO: 12447 - DNA, 28 bp, synthetic construct
  source 1..28: mol_type = other DNA
acccagctgcttctgcagagaaggcagg

SEQ ID NO: 12448 - DNA, 28 bp, synthetic construct
  source 1..28: mol_type = other DNA
tggcacccagctgcttctgcagagaagg

SEQ ID NO: 12449 - DNA, 28 bp, synthetic construct
  source 1..28: mol_type = other DNA
tctgcagaagcagctgggtgccatgtgg

SEQ ID NO: 12450 - DNA, 28 bp, synthetic construct
  source 1..28: mol_type = other DNA
gctgggtgccatgtggcccataagctgg

SEQ ID NO: 12451 - DNA, 28 bp, synthetic construct
  source 1..28: mol_type = other DNA
ctgggtgccatgtggcccataagctggg

SEQ ID NO: 12452 - DNA, 28 bp, synthetic construct
  source 1..28: mol_type = other DNA
cttaagacccagcttatgggccacatgg

SEQ ID NO: 12453 - DNA, 28 bp, synthetic construct
  source 1..28: mol_type = other DNA
aagtctgacttaagacccagcttatggg

SEQ ID NO: 12454 - DNA, 28 bp, synthetic construct
  source 1..28: mol_type = other DNA
gaagtctgacttaagacccagcttatgg

SEQ ID NO: 12455 - DNA, 28 bp, synthetic construct
  source 1..28: mol_type = other DNA
atttgtttacgaggatgaaattctttgg

SEQ ID NO: 12456 - DNA, 28 bp, synthetic construct
  source 1..28: mol_type = other DNA
cccccgcgccaggccgggacttacccgg

SEQ ID NO: 12457 - DNA, 28 bp, synthetic construct
  source 1..28: mol_type = other DNA
ccccgcgccaggccgggacttacccggg

SEQ ID NO: 12458 - DNA, 28 bp, synthetic construct
  source 1..28: mol_type = other DNA
gcccgggtaagtcccggcctggcgcggg

SEQ ID NO: 12459 - DNA, 28 bp, synthetic construct
  source 1..28: mol_type = other DNA
ggcccgggtaagtcccggcctggcgcgg

SEQ ID NO: 12460 - DNA, 28 bp, synthetic construct
  source 1..28: mol_type = other DNA
gcgccaggccgggacttacccgggccgg

SEQ ID NO: 12461 - DNA, 28 bp, synthetic construct
  source 1..28: mol_type = other DNA
cgccaggccgggacttacccgggccggg

SEQ ID NO: 12462 - DNA, 28 bp, synthetic construct
  source 1..28: mol_type = other DNA
cgcccggcccgggtaagtcccggcctgg

SEQ ID NO: 12463 - DNA, 28 bp, synthetic construct
  source 1..28: mol_type = other DNA
cggcgcgcccggcccgggtaagtcccgg

SEQ ID NO: 12464 - DNA, 28 bp, synthetic construct
  source 1..28: mol_type = other DNA
ggacttacccgggccgggcgcgccgcgg

SEQ ID NO: 12465 - DNA, 28 bp, synthetic construct
  source 1..28: mol_type = other DNA
gcggggtccgcggcgcgcccggcccggg

SEQ ID NO: 12466 - DNA, 28 bp, synthetic construct
  source 1..28: mol_type = other DNA
cgcggggtccgcggcgcgcccggcccgg

SEQ ID NO: 12467 - DNA, 28 bp, synthetic construct
  source 1..28: mol_type = other DNA
cgggccgggcgcgccgcggaccccgcgg

SEQ ID NO: 12468 - DNA, 28 bp, synthetic construct
  source 1..28: mol_type = other DNA
gccgggcgcgccgcggaccccgcggcgg

SEQ ID NO: 12469 - DNA, 28 bp, synthetic construct
  source 1..28: mol_type = other DNA
gccgccgcggggtccgcggcgcgcccgg

SEQ ID NO: 12470 - DNA, 28 bp, synthetic construct
  source 1..28: mol_type = other DNA
gaggaagcggccgccgcggggtccgcgg

SEQ ID NO: 12471 - DNA, 28 bp, synthetic construct
  source 1..28: mol_type = other DNA
ggaggaggaggaagcggccgccgcgggg

SEQ ID NO: 12472 - DNA, 28 bp, synthetic construct
  source 1..28: mol_type = other DNA
aggaggaggaggaagcggccgccgcggg

SEQ ID NO: 12473 - DNA, 28 bp, synthetic construct
  source 1..28: mol_type = other DNA
gaggaggaggaggaagcggccgccgcgg

SEQ ID NO: 12474 - DNA, 28 bp, synthetic construct
  source 1..28: mol_type = other DNA
gaggaggaggaggaggaggaggaagcgg

SEQ ID NO: 12475 - DNA, 28 bp, synthetic construct
  source 1..28: mol_type = other DNA
ttaagtgaggaggaggaggaggaggagg

SEQ ID NO: 12476 - DNA, 28 bp, synthetic construct
  source 1..28: mol_type = other DNA
ttgttaagtgaggaggaggaggaggagg

SEQ ID NO: 12477 - DNA, 28 bp, synthetic construct
  source 1..28: mol_type = other DNA
attttgttaagtgaggaggaggaggagg

SEQ ID NO: 12478 - DNA, 28 bp, synthetic construct
  source 1..28: mol_type = other DNA
tcctcctcctcctcacttaacaaaatgg

SEQ ID NO: 12479 - DNA, 28 bp, synthetic construct
  source 1..28: mol_type = other DNA
gccattttgttaagtgaggaggaggagg

SEQ ID NO: 12480 - DNA, 28 bp, synthetic construct
  source 1..28: mol_type = other DNA
tcctcctcctcacttaacaaaatggcgg

SEQ ID NO: 12481 - DNA, 28 bp, synthetic construct
  source 1..28: mol_type = other DNA
gccgccattttgttaagtgaggaggagg

SEQ ID NO: 12482 - DNA, 28 bp, synthetic construct
  source 1..28: mol_type = other DNA
tcctcctcacttaacaaaatggcggcgg

SEQ ID NO: 12483 - DNA, 28 bp, synthetic construct
  source 1..28: mol_type = other DNA
gccgccgccattttgttaagtgaggagg

SEQ ID NO: 12484 - DNA, 28 bp, synthetic construct
  source 1..28: mol_type = other DNA
cctcacttaacaaaatggcggcggcagg

SEQ ID NO: 12485 - DNA, 28 bp, synthetic construct
  source 1..28: mol_type = other DNA
acaaaatggcggcggcaggaagtgccgg

SEQ ID NO: 12486 - DNA, 28 bp, synthetic construct
  source 1..28: mol_type = other DNA
caaaatggcggcggcaggaagtgccggg

SEQ ID NO: 12487 - DNA, 28 bp, synthetic construct
  source 1..28: mol_type = other DNA
cggcggcaggaagtgccgggcgcctcgg

SEQ ID NO: 12488 - DNA, 28 bp, synthetic construct
  source 1..28: mol_type = other DNA
aggtgaggactggtgccctttggggcgg

SEQ ID NO: 12489 - DNA, 28 bp, synthetic construct
  source 1..28: mol_type = other DNA
ctcaggtgaggactggtgccctttgggg

SEQ ID NO: 12490 - DNA, 28 bp, synthetic construct
  source 1..28: mol_type = other DNA
tctcaggtgaggactggtgccctttggg

SEQ ID NO: 12491 - DNA, 28 bp, synthetic construct
  source 1..28: mol_type = other DNA
gtctcaggtgaggactggtgccctttgg

SEQ ID NO: 12492 - DNA, 28 bp, synthetic construct
  source 1..28: mol_type = other DNA
ggcaccagtcctcacctgagacgctagg

SEQ ID NO: 12493 - DNA, 28 bp, synthetic construct
  source 1..28: mol_type = other DNA
gcggcctagcgtctcaggtgaggactgg

SEQ ID NO: 12494 - DNA, 28 bp, synthetic construct
  source 1..28: mol_type = other DNA
ggcgtgcggcctagcgtctcaggtgagg

SEQ ID NO: 12495 - DNA, 28 bp, synthetic construct
  source 1..28: mol_type = other DNA
ggggcggcgtgcggcctagcgtctcagg

SEQ ID NO: 12496 - DNA, 28 bp, synthetic construct
  source 1..28: mol_type = other DNA
acgctaggccgcacgccgcccccgccgg

SEQ ID NO: 12497 - DNA, 28 bp, synthetic construct
  source 1..28: mol_type = other DNA
gcggacggccggcgggggcggcgtgcgg

SEQ ID NO: 12498 - DNA, 28 bp, synthetic construct
  source 1..28: mol_type = other DNA
gcagcgggcggacggccggcgggggcgg

SEQ ID NO: 12499 - DNA, 28 bp, synthetic construct
  source 1..28: mol_type = other DNA
gcggcagcgggcggacggccggcggggg

SEQ ID NO: 12500 - DNA, 28 bp, synthetic construct
  source 1..28: mol_type = other DNA
ggcggcagcgggcggacggccggcgggg

SEQ ID NO: 12501 - DNA, 28 bp, synthetic construct
  source 1..28: mol_type = other DNA
cggcggcagcgggcggacggccggcggg

SEQ ID NO: 12502 - DNA, 28 bp, synthetic construct
  source 1..28: mol_type = other DNA
gcggcggcagcgggcggacggccggcgg

SEQ ID NO: 12503 - DNA, 28 bp, synthetic construct
  source 1..28: mol_type = other DNA
ggggcggcggcagcgggcggacggccgg

SEQ ID NO: 12504 - DNA, 28 bp, synthetic construct
  source 1..28: mol_type = other DNA
ggagggggcggcggcagcgggcggacgg

SEQ ID NO: 12505 - DNA, 28 bp, synthetic construct
  source 1..28: mol_type = other DNA
tcggggagggggcggcggcagcgggcgg

SEQ ID NO: 12506 - DNA, 28 bp, synthetic construct
  source 1..28: mol_type = other DNA
agctcggggagggggcggcggcagcggg

SEQ ID NO: 12507 - DNA, 28 bp, synthetic construct
  source 1..28: mol_type = other DNA
cagctcggggagggggcggcggcagcgg

SEQ ID NO: 12508 - DNA, 28 bp, synthetic construct
  source 1..28: mol_type = other DNA
cgcaggcagctcggggagggggcggcgg

SEQ ID NO: 12509 - DNA, 28 bp, synthetic construct
  source 1..28: mol_type = other DNA
ccgccccctccccgagctgcctgcgcgg

SEQ ID NO: 12510 - DNA, 28 bp, synthetic construct
  source 1..28: mol_type = other DNA
gcgccgcgcaggcagctcggggaggggg

SEQ ID NO: 12511 - DNA, 28 bp, synthetic construct
  source 1..28: mol_type = other DNA
ggcgccgcgcaggcagctcggggagggg

SEQ ID NO: 12512 - DNA, 28 bp, synthetic construct
  source 1..28: mol_type = other DNA
cggcgccgcgcaggcagctcggggaggg

SEQ ID NO: 12513 - DNA, 28 bp, synthetic construct
  source 1..28: mol_type = other DNA
cctccccgagctgcctgcgcggcgccgg

SEQ ID NO: 12514 - DNA, 28 bp, synthetic construct
  source 1..28: mol_type = other DNA
ctccccgagctgcctgcgcggcgccggg

SEQ ID NO: 12515 - DNA, 28 bp, synthetic construct
  source 1..28: mol_type = other DNA
tccccgagctgcctgcgcggcgccgggg

SEQ ID NO: 12516 - DNA, 28 bp, synthetic construct
  source 1..28: mol_type = other DNA
gccccggcgccgcgcaggcagctcgggg

SEQ ID NO: 12517 - DNA, 28 bp, synthetic construct
  source 1..28: mol_type = other DNA
ggccccggcgccgcgcaggcagctcggg

SEQ ID NO: 12518 - DNA, 28 bp, synthetic construct
  source 1..28: mol_type = other DNA
gggccccggcgccgcgcaggcagctcgg

SEQ ID NO: 12519 - DNA, 28 bp, synthetic construct
  source 1..28: mol_type = other DNA
cggcgggcgggccccggcgccgcgcagg

SEQ ID NO: 12520 - DNA, 28 bp, synthetic construct
  source 1..28: mol_type = other DNA
gctcggcagagcggcgggcgggccccgg

SEQ ID NO: 12521 - DNA, 28 bp, synthetic construct
  source 1..28: mol_type = other DNA
ctgtgagctcggcagagcggcgggcggg

SEQ ID NO: 12522 - DNA, 28 bp, synthetic construct
  source 1..28: mol_type = other DNA
ccgcccgccgctctgccgagctcacagg

SEQ ID NO: 12523 - DNA, 28 bp, synthetic construct
  source 1..28: mol_type = other DNA
cggcctgtgagctcggcagagcggcggg

SEQ ID NO: 12524 - DNA, 28 bp, synthetic construct
  source 1..28: mol_type = other DNA
gcggcctgtgagctcggcagagcggcgg

SEQ ID NO: 12525 - DNA, 28 bp, synthetic construct
  source 1..28: mol_type = other DNA
agcgcggcctgtgagctcggcagagcgg

SEQ ID NO: 12526 - DNA, 28 bp, synthetic construct
  source 1..28: mol_type = other DNA
cgcgggcgagcgcggcctgtgagctcgg

SEQ ID NO: 12527 - DNA, 28 bp, synthetic construct
  source 1..28: mol_type = other DNA
cgagctcacaggccgcgctcgcccgcgg

SEQ ID NO: 12528 - DNA, 28 bp, synthetic construct
  source 1..28: mol_type = other DNA
gagctcacaggccgcgctcgcccgcggg

SEQ ID NO: 12529 - DNA, 28 bp, synthetic construct
  source 1..28: mol_type = other DNA
ggccgcgctcgcccgcgggcaccgccgg

SEQ ID NO: 12530 - DNA, 28 bp, synthetic construct
  source 1..28: mol_type = other DNA
tgccggcggtgcccgcgggcgagcgcgg

SEQ ID NO: 12531 - DNA, 28 bp, synthetic construct
  source 1..28: mol_type = other DNA
tgcggcggctgccggcggtgcccgcggg

SEQ ID NO: 12532 - DNA, 28 bp, synthetic construct
  source 1..28: mol_type = other DNA
ctgcggcggctgccggcggtgcccgcgg

SEQ ID NO: 12533 - DNA, 28 bp, synthetic construct
  source 1..28: mol_type = other DNA
cggcagcggctgcggcggctgccggcgg

SEQ ID NO: 12534 - DNA, 28 bp, synthetic construct
  source 1..28: mol_type = other DNA
cggcggcagcggctgcggcggctgccgg

SEQ ID NO: 12535 - DNA, 28 bp, synthetic construct
  source 1..28: mol_type = other DNA
gcagtggcggcggcagcggctgcggcgg

SEQ ID NO: 12536 - DNA, 28 bp, synthetic construct
  source 1..28: mol_type = other DNA
gaagcagtggcggcggcagcggctgcgg

SEQ ID NO: 12537 - DNA, 28 bp, synthetic construct
  source 1..28: mol_type = other DNA
gcagccgctgccgccgccactgcttcgg

SEQ ID NO: 12538 - DNA, 28 bp, synthetic construct
  source 1..28: mol_type = other DNA
ggagccgaagcagtggcggcggcagcgg

SEQ ID NO: 12539 - DNA, 28 bp, synthetic construct
  source 1..28: mol_type = other DNA
tgccgccgccactgcttcggctcctcgg

SEQ ID NO: 12540 - DNA, 28 bp, synthetic construct
  source 1..28: mol_type = other DNA
agccgaggagccgaagcagtggcggcgg

SEQ ID NO: 12541 - DNA, 28 bp, synthetic construct
  source 1..28: mol_type = other DNA
cgcagccgaggagccgaagcagtggcgg

SEQ ID NO: 12542 - DNA, 28 bp, synthetic construct
  source 1..28: mol_type = other DNA
cgccactgcttcggctcctcggctgcgg

SEQ ID NO: 12543 - DNA, 28 bp, synthetic construct
  source 1..28: mol_type = other DNA
gccactgcttcggctcctcggctgcggg

SEQ ID NO: 12544 - DNA, 28 bp, synthetic construct
  source 1..28: mol_type = other DNA
tcccgcagccgaggagccgaagcagtgg

SEQ ID NO: 12545 - DNA, 28 bp, synthetic construct
  source 1..28: mol_type = other DNA
tgtttgttctggtctcccgcagccgagg

SEQ ID NO: 12546 - DNA, 28 bp, synthetic construct
  source 1..28: mol_type = other DNA
gcggcggcggctgggctgtttgttctgg

SEQ ID NO: 12547 - DNA, 28 bp, synthetic construct
  source 1..28: mol_type = other DNA
ggcggcggcggcggcggcggcggctggg

SEQ ID NO: 12548 - DNA, 28 bp, synthetic construct
  source 1..28: mol_type = other DNA
cggcggcggcggcggcggcggcggctgg

SEQ ID NO: 12549 - DNA, 28 bp, synthetic construct
  source 1..28: mol_type = other DNA
gcggcggcggcggcggcggcggcggcgg

SEQ ID NO: 12550 - DNA, 28 bp, synthetic construct
  source 1..28: mol_type = other DNA
ctggcggcggcggcggcggcggcggcgg

SEQ ID NO: 12551 - DNA, 28 bp, synthetic construct
  source 1..28: mol_type = other DNA
gcgctggcggcggcggcggcggcggcgg

SEQ ID NO: 12552 - DNA, 28 bp, synthetic construct
  source 1..28: mol_type = other DNA
agtgcgctggcggcggcggcggcggcgg

SEQ ID NO: 12553 - DNA, 28 bp, synthetic construct
  source 1..28: mol_type = other DNA
gtcagtgcgctggcggcggcggcggcgg

SEQ ID NO: 12554 - DNA, 28 bp, synthetic construct
  source 1..28: mol_type = other DNA
gacgtcagtgcgctggcggcggcggcgg

SEQ ID NO: 12555 - DNA, 28 bp, synthetic construct
  source 1..28: mol_type = other DNA
ggtgacgtcagtgcgctggcggcggcgg

SEQ ID NO: 12556 - DNA, 28 bp, synthetic construct
  source 1..28: mol_type = other DNA
cgcggtgacgtcagtgcgctggcggcgg

SEQ ID NO: 12557 - DNA, 28 bp, synthetic construct
  source 1..28: mol_type = other DNA
gtgcgcggtgacgtcagtgcgctggcgg

SEQ ID NO: 12558 - DNA, 28 bp, synthetic construct
  source 1..28: mol_type = other DNA
agcgtgcgcggtgacgtcagtgcgctgg

SEQ ID NO: 12559 - DNA, 28 bp, synthetic construct
  source 1..28: mol_type = other DNA
gacgtcaccgcgcacgctgcgcgcgcgg

SEQ ID NO: 12560 - DNA, 28 bp, synthetic construct
  source 1..28: mol_type = other DNA
cgcggggccgcgcgcgcagcgtgcgcgg

SEQ ID NO: 12561 - DNA, 28 bp, synthetic construct
  source 1..28: mol_type = other DNA
cgcgcggccccgcgccgccgccgcccgg

SEQ ID NO: 12562 - DNA, 28 bp, synthetic construct
  source 1..28: mol_type = other DNA
gcgcacaccgggcggcggcggcgcgggg

SEQ ID NO: 12563 - DNA, 28 bp, synthetic construct
  source 1..28: mol_type = other DNA
cgcgcacaccgggcggcggcggcgcggg

SEQ ID NO: 12564 - DNA, 28 bp, synthetic construct
  source 1..28: mol_type = other DNA
gcgcgcacaccgggcggcggcggcgcgg

SEQ ID NO: 12565 - DNA, 28 bp, synthetic construct
  source 1..28: mol_type = other DNA
gcggggcgcgcacaccgggcggcggcgg

SEQ ID NO: 12566 - DNA, 28 bp, synthetic construct
  source 1..28: mol_type = other DNA
ggggcggggcgcgcacaccgggcggcgg

SEQ ID NO: 12567 - DNA, 28 bp, synthetic construct
  source 1..28: mol_type = other DNA
gcgggggcggggcgcgcacaccgggcgg

SEQ ID NO: 12568 - DNA, 28 bp, synthetic construct
  source 1..28: mol_type = other DNA
ggcgcgggggcggggcgcgcacaccggg

SEQ ID NO: 12569 - DNA, 28 bp, synthetic construct
  source 1..28: mol_type = other DNA
gggcgcgggggcggggcgcgcacaccgg

SEQ ID NO: 12570 - DNA, 28 bp, synthetic construct
  source 1..28: mol_type = other DNA
ctcgttcgcgctgggcgcgggggcgggg

SEQ ID NO: 12571 - DNA, 28 bp, synthetic construct
  source 1..28: mol_type = other DNA
gctcgttcgcgctgggcgcgggggcggg

SEQ ID NO: 12572 - DNA, 28 bp, synthetic construct
  source 1..28: mol_type = other DNA
agctcgttcgcgctgggcgcgggggcgg

SEQ ID NO: 12573 - DNA, 28 bp, synthetic construct
  source 1..28: mol_type = other DNA
cagagctcgttcgcgctgggcgcggggg

SEQ ID NO: 12574 - DNA, 28 bp, synthetic construct
  source 1..28: mol_type = other DNA
ccccgcgcccagcgcgaacgagctctgg

SEQ ID NO: 12575 - DNA, 28 bp, synthetic construct
  source 1..28: mol_type = other DNA
tccagagctcgttcgcgctgggcgcggg

SEQ ID NO: 12576 - DNA, 28 bp, synthetic construct
  source 1..28: mol_type = other DNA
ctccagagctcgttcgcgctgggcgcgg

SEQ ID NO: 12577 - DNA, 28 bp, synthetic construct
  source 1..28: mol_type = other DNA
tgtctctccagagctcgttcgcgctggg

SEQ ID NO: 12578 - DNA, 28 bp, synthetic construct
  source 1..28: mol_type = other DNA
ctgtctctccagagctcgttcgcgctgg

SEQ ID NO: 12579 - DNA, 28 bp, synthetic construct
  source 1..28: mol_type = other DNA
gcgcgaacgagctctggagagacagtgg

SEQ ID NO: 12580 - DNA, 28 bp, synthetic construct
  source 1..28: mol_type = other DNA
gagctctggagagacagtggctgcgagg

SEQ ID NO: 12581 - DNA, 28 bp, synthetic construct
  source 1..28: mol_type = other DNA
ggagagacagtggctgcgaggtgagtgg

SEQ ID NO: 12582 - DNA, 28 bp, synthetic construct
  source 1..28: mol_type = other DNA
gagagacagtggctgcgaggtgagtggg

SEQ ID NO: 12583 - DNA, 28 bp, synthetic construct
  source 1..28: mol_type = other DNA
agagacagtggctgcgaggtgagtgggg

SEQ ID NO: 12584 - DNA, 28 bp, synthetic construct
  source 1..28: mol_type = other DNA
gagacagtggctgcgaggtgagtggggg

SEQ ID NO: 12585 - DNA, 28 bp, synthetic construct
  source 1..28: mol_type = other DNA
gctgcgaggtgagtgggggataccgcgg

SEQ ID NO: 12586 - DNA, 28 bp, synthetic construct
  source 1..28: mol_type = other DNA
ggtgagtgggggataccgcggactgagg

SEQ ID NO: 12587 - DNA, 28 bp, synthetic construct
  source 1..28: mol_type = other DNA
gtgagtgggggataccgcggactgaggg

SEQ ID NO: 12588 - DNA, 28 bp, synthetic construct
  source 1..28: mol_type = other DNA
agtgggggataccgcggactgagggagg

SEQ ID NO: 12589 - DNA, 28 bp, synthetic construct
  source 1..28: mol_type = other DNA
ctgcggggtctcctccctcagtccgcgg

SEQ ID NO: 12590 - DNA, 28 bp, synthetic construct
  source 1..28: mol_type = other DNA
tgagggaggagaccccgcagagcgaagg

SEQ ID NO: 12591 - DNA, 28 bp, synthetic construct
  source 1..28: mol_type = other DNA
gaggagaccccgcagagcgaaggagcgg

SEQ ID NO: 12592 - DNA, 28 bp, synthetic construct
  source 1..28: mol_type = other DNA
aggagaccccgcagagcgaaggagcggg

SEQ ID NO: 12593 - DNA, 28 bp, synthetic construct
  source 1..28: mol_type = other DNA
gaccccgcagagcgaaggagcgggctgg

SEQ ID NO: 12594 - DNA, 28 bp, synthetic construct
  source 1..28: mol_type = other DNA
accccgcagagcgaaggagcgggctggg

SEQ ID NO: 12595 - DNA, 28 bp, synthetic construct
  source 1..28: mol_type = other DNA
ccccgcagagcgaaggagcgggctgggg

SEQ ID NO: 12596 - DNA, 28 bp, synthetic construct
  source 1..28: mol_type = other DNA
cccgcagagcgaaggagcgggctggggg

SEQ ID NO: 12597 - DNA, 28 bp, synthetic construct
  source 1..28: mol_type = other DNA
tcccccagcccgctccttcgctctgcgg

SEQ ID NO: 12598 - DNA, 28 bp, synthetic construct
  source 1..28: mol_type = other DNA
gagcgaaggagcgggctgggggaaacgg

SEQ ID NO: 12599 - DNA, 28 bp, synthetic construct
  source 1..28: mol_type = other DNA
agcgaaggagcgggctgggggaaacggg

SEQ ID NO: 12600 - DNA, 28 bp, synthetic construct
  source 1..28: mol_type = other DNA
gaaggagcgggctgggggaaacgggcgg

SEQ ID NO: 12601 - DNA, 28 bp, synthetic construct
  source 1..28: mol_type = other DNA
gggctgggggaaacgggcggactgcagg

SEQ ID NO: 12602 - DNA, 28 bp, synthetic construct
  source 1..28: mol_type = other DNA
tgggggaaacgggcggactgcaggctgg

SEQ ID NO: 12603 - DNA, 28 bp, synthetic construct
  source 1..28: mol_type = other DNA
gggggaaacgggcggactgcaggctggg

SEQ ID NO: 12604 - DNA, 28 bp, synthetic construct
  source 1..28: mol_type = other DNA
acgggcggactgcaggctgggcctgcgg

SEQ ID NO: 12605 - DNA, 28 bp, synthetic construct
  source 1..28: mol_type = other DNA
cgggcggactgcaggctgggcctgcggg

SEQ ID NO: 12606 - DNA, 28 bp, synthetic construct
  source 1..28: mol_type = other DNA
gctgggcctgcgggaaaagatctgaagg

SEQ ID NO: 12607 - DNA, 28 bp, synthetic construct
  source 1..28: mol_type = other DNA
tctcagccttcagatcttttcccgcagg

SEQ ID NO: 12608 - DNA, 28 bp, synthetic construct
  source 1..28: mol_type = other DNA
agagagacatccaaaatactaagaaagg

SEQ ID NO: 12609 - DNA, 28 bp, synthetic construct
  source 1..28: mol_type = other DNA
tgtcttcagacctttcttagtattttgg

SEQ ID NO: 12610 - DNA, 28 bp, synthetic construct
  source 1..28: mol_type = other DNA
gaaaggtctgaagacagaccctcacagg

SEQ ID NO: 12611 - DNA, 28 bp, synthetic construct
  source 1..28: mol_type = other DNA
aaaggtctgaagacagaccctcacaggg

SEQ ID NO: 12612 - DNA, 28 bp, synthetic construct
  source 1..28: mol_type = other DNA
ggtctgaagacagaccctcacagggagg

SEQ ID NO: 12613 - DNA, 28 bp, synthetic construct
  source 1..28: mol_type = other DNA
gtctgaagacagaccctcacagggaggg

SEQ ID NO: 12614 - DNA, 28 bp, synthetic construct
  source 1..28: mol_type = other DNA
tgaagacagaccctcacagggagggagg

SEQ ID NO: 12615 - DNA, 28 bp, synthetic construct
  source 1..28: mol_type = other DNA
gacagaccctcacagggagggaggatgg

SEQ ID NO: 12616 - DNA, 28 bp, synthetic construct
  source 1..28: mol_type = other DNA
accctcacagggagggaggatggtgagg

SEQ ID NO: 12617 - DNA, 28 bp, synthetic construct
  source 1..28: mol_type = other DNA
tcctcaccatcctccctccctgtgaggg

SEQ ID NO: 12618 - DNA, 28 bp, synthetic construct
  source 1..28: mol_type = other DNA
ctcctcaccatcctccctccctgtgagg

SEQ ID NO: 12619 - DNA, 28 bp, synthetic construct
  source 1..28: mol_type = other DNA
ctcacagggagggaggatggtgaggagg

SEQ ID NO: 12620 - DNA, 28 bp, synthetic construct
  source 1..28: mol_type = other DNA
tcacagggagggaggatggtgaggaggg

SEQ ID NO: 12621 - DNA, 28 bp, synthetic construct
  source 1..28: mol_type = other DNA
ggtgaggagggaccccacagactgatgg

SEQ ID NO: 12622 - DNA, 28 bp, synthetic construct
  source 1..28: mol_type = other DNA
gaggagggaccccacagactgatggagg

SEQ ID NO: 12623 - DNA, 28 bp, synthetic construct
  source 1..28: mol_type = other DNA
gagggaccccacagactgatggaggagg

SEQ ID NO: 12624 - DNA, 28 bp, synthetic construct
  source 1..28: mol_type = other DNA
ggaccccacagactgatggaggaggcgg

SEQ ID NO: 12625 - DNA, 28 bp, synthetic construct
  source 1..28: mol_type = other DNA
ccccacagactgatggaggaggcggagg

SEQ ID NO: 12626 - DNA, 28 bp, synthetic construct
  source 1..28: mol_type = other DNA
tcctccgcctcctccatcagtctgtggg

SEQ ID NO: 12627 - DNA, 28 bp, synthetic construct
  source 1..28: mol_type = other DNA
ctcctccgcctcctccatcagtctgtgg

SEQ ID NO: 12628 - DNA, 28 bp, synthetic construct
  source 1..28: mol_type = other DNA
ggaggaggcggaggagagagccctaagg

SEQ ID NO: 12629 - DNA, 28 bp, synthetic construct
  source 1..28: mol_type = other DNA
gaggaggcggaggagagagccctaaggg

SEQ ID NO: 12630 - DNA, 28 bp, synthetic construct
  source 1..28: mol_type = other DNA
aggaggcggaggagagagccctaagggg

SEQ ID NO: 12631 - DNA, 28 bp, synthetic construct
  source 1..28: mol_type = other DNA
ggaggcggaggagagagccctaaggggg

SEQ ID NO: 12632 - DNA, 28 bp, synthetic construct
  source 1..28: mol_type = other DNA
gaggcggaggagagagccctaagggggg

SEQ ID NO: 12633 - DNA, 28 bp, synthetic construct
  source 1..28: mol_type = other DNA
ggagagagccctaaggggggaccccagg

SEQ ID NO: 12634 - DNA, 28 bp, synthetic construct
  source 1..28: mol_type = other DNA
agagccctaaggggggaccccaggtagg

SEQ ID NO: 12635 - DNA, 28 bp, synthetic construct
  source 1..28: mol_type = other DNA
gagccctaaggggggaccccaggtaggg

SEQ ID NO: 12636 - DNA, 28 bp, synthetic construct
  source 1..28: mol_type = other DNA
ccctaaggggggaccccaggtagggagg

SEQ ID NO: 12637 - DNA, 28 bp, synthetic construct
  source 1..28: mol_type = other DNA
gcctccctacctggggtccccccttagg

SEQ ID NO: 12638 - DNA, 28 bp, synthetic construct
  source 1..28: mol_type = other DNA
ggggggaccccaggtagggaggctgagg

SEQ ID NO: 12639 - DNA, 28 bp, synthetic construct
  source 1..28: mol_type = other DNA
tctctcgcctcagcctccctacctgggg

SEQ ID NO: 12640 - DNA, 28 bp, synthetic construct
  source 1..28: mol_type = other DNA
ctctctcgcctcagcctccctacctggg

SEQ ID NO: 12641 - DNA, 28 bp, synthetic construct
  source 1..28: mol_type = other DNA
gctctctcgcctcagcctccctacctgg

SEQ ID NO: 12642 - DNA, 28 bp, synthetic construct
  source 1..28: mol_type = other DNA
ggaggctgaggcgagagagctgcgatgg

SEQ ID NO: 12643 - DNA, 28 bp, synthetic construct
  source 1..28: mol_type = other DNA
gaggctgaggcgagagagctgcgatggg

SEQ ID NO: 12644 - DNA, 28 bp, synthetic construct
  source 1..28: mol_type = other DNA
aggctgaggcgagagagctgcgatgggg

SEQ ID NO: 12645 - DNA, 28 bp, synthetic construct
  source 1..28: mol_type = other DNA
ggctgaggcgagagagctgcgatggggg

SEQ ID NO: 12646 - DNA, 28 bp, synthetic construct
  source 1..28: mol_type = other DNA
ggcgagagagctgcgatgggggcgccgg

SEQ ID NO: 12647 - DNA, 28 bp, synthetic construct
  source 1..28: mol_type = other DNA
gcgagagagctgcgatgggggcgccggg

SEQ ID NO: 12648 - DNA, 28 bp, synthetic construct
  source 1..28: mol_type = other DNA
cgagagagctgcgatgggggcgccgggg

SEQ ID NO: 12649 - DNA, 28 bp, synthetic construct
  source 1..28: mol_type = other DNA
agagctgcgatgggggcgccggggctgg

SEQ ID NO: 12650 - DNA, 28 bp, synthetic construct
  source 1..28: mol_type = other DNA
gagctgcgatgggggcgccggggctggg

SEQ ID NO: 12651 - DNA, 28 bp, synthetic construct
  source 1..28: mol_type = other DNA
agctgcgatgggggcgccggggctgggg

SEQ ID NO: 12652 - DNA, 28 bp, synthetic construct
  source 1..28: mol_type = other DNA
tgggggcgccggggctggggtgaagtgg

SEQ ID NO: 12653 - DNA, 28 bp, synthetic construct
  source 1..28: mol_type = other DNA
gggcgccggggctggggtgaagtggagg

SEQ ID NO: 12654 - DNA, 28 bp, synthetic construct
  source 1..28: mol_type = other DNA
ccggggctggggtgaagtggaggaaagg

SEQ ID NO: 12655 - DNA, 28 bp, synthetic construct
  source 1..28: mol_type = other DNA
gggctggggtgaagtggaggaaaggagg

SEQ ID NO: 12656 - DNA, 28 bp, synthetic construct
  source 1..28: mol_type = other DNA
ggtgaagtggaggaaaggaggtgagagg

SEQ ID NO: 12657 - DNA, 28 bp, synthetic construct
  source 1..28: mol_type = other DNA
gaagtggaggaaaggaggtgagaggagg

SEQ ID NO: 12658 - DNA, 28 bp, synthetic construct
  source 1..28: mol_type = other DNA
aggaggtgagaggaggctgcgagcaagg

SEQ ID NO: 12659 - DNA, 28 bp, synthetic construct
  source 1..28: mol_type = other DNA
tgagaggaggctgcgagcaaggccgagg

SEQ ID NO: 12660 - DNA, 28 bp, synthetic construct
  source 1..28: mol_type = other DNA
gaggaggctgcgagcaaggccgaggcgg

SEQ ID NO: 12661 - DNA, 28 bp, synthetic construct
  source 1..28: mol_type = other DNA
gagcaaggccgaggcggatcctccttgg

SEQ ID NO: 12662 - DNA, 28 bp, synthetic construct
  source 1..28: mol_type = other DNA
aggggcagccaaggaggatccgcctcgg

SEQ ID NO: 12663 - DNA, 28 bp, synthetic construct
  source 1..28: mol_type = other DNA
gaggcggatcctccttggctgcccctgg

SEQ ID NO: 12664 - DNA, 28 bp, synthetic construct
  source 1..28: mol_type = other DNA
aggcggatcctccttggctgcccctggg

SEQ ID NO: 12665 - DNA, 28 bp, synthetic construct
  source 1..28: mol_type = other DNA
ggatcctccttggctgcccctgggcagg

SEQ ID NO: 12666 - DNA, 28 bp, synthetic construct
  source 1..28: mol_type = other DNA
gatcctccttggctgcccctgggcaggg

SEQ ID NO: 12667 - DNA, 28 bp, synthetic construct
  source 1..28: mol_type = other DNA
cctccttggctgcccctgggcagggagg

SEQ ID NO: 12668 - DNA, 28 bp, synthetic construct
  source 1..28: mol_type = other DNA
ctacctccctgcccaggggcagccaagg

SEQ ID NO: 12669 - DNA, 28 bp, synthetic construct
  source 1..28: mol_type = other DNA
agaaaggtgctacctccctgcccagggg

SEQ ID NO: 12670 - DNA, 28 bp, synthetic construct
  source 1..28: mol_type = other DNA
gagaaaggtgctacctccctgcccaggg

SEQ ID NO: 12671 - DNA, 28 bp, synthetic construct
  source 1..28: mol_type = other DNA
ggagaaaggtgctacctccctgcccagg

SEQ ID NO: 12672 - DNA, 28 bp, synthetic construct
  source 1..28: mol_type = other DNA
tcaacaggggggcataagaggagaaagg

SEQ ID NO: 12673 - DNA, 28 bp, synthetic construct
  source 1..28: mol_type = other DNA
aagaagatcaacaggggggcataagagg

SEQ ID NO: 12674 - DNA, 28 bp, synthetic construct
  source 1..28: mol_type = other DNA
gtgggttggaagaagatcaacagggggg

SEQ ID NO: 12675 - DNA, 28 bp, synthetic construct
  source 1..28: mol_type = other DNA
ggtgggttggaagaagatcaacaggggg

SEQ ID NO: 12676 - DNA, 28 bp, synthetic construct
  source 1..28: mol_type = other DNA
aggtgggttggaagaagatcaacagggg

SEQ ID NO: 12677 - DNA, 28 bp, synthetic construct
  source 1..28: mol_type = other DNA
aaggtgggttggaagaagatcaacaggg

SEQ ID NO: 12678 - DNA, 28 bp, synthetic construct
  source 1..28: mol_type = other DNA
aaaggtgggttggaagaagatcaacagg

SEQ ID NO: 12679 - DNA, 28 bp, synthetic construct
  source 1..28: mol_type = other DNA
tcttccaacccacctttttaaaaaaagg

SEQ ID NO: 12680 - DNA, 28 bp, synthetic construct
  source 1..28: mol_type = other DNA
cttccaacccacctttttaaaaaaaggg

SEQ ID NO: 12681 - DNA, 28 bp, synthetic construct
  source 1..28: mol_type = other DNA
tgtccctttttttaaaaaggtgggttgg

SEQ ID NO: 12682 - DNA, 28 bp, synthetic construct
  source 1..28: mol_type = other DNA
acccacctttttaaaaaaagggacatgg

SEQ ID NO: 12683 - DNA, 28 bp, synthetic construct
  source 1..28: mol_type = other DNA
accatgtccctttttttaaaaaggtggg

SEQ ID NO: 12684 - DNA, 28 bp, synthetic construct
  source 1..28: mol_type = other DNA
gaccatgtccctttttttaaaaaggtgg

SEQ ID NO: 12685 - DNA, 28 bp, synthetic construct
  source 1..28: mol_type = other DNA
caagaccatgtccctttttttaaaaagg

SEQ ID NO: 12686 - DNA, 28 bp, synthetic construct
  source 1..28: mol_type = other DNA
gggacatggtcttgctctgtcccccagg

SEQ ID NO: 12687 - DNA, 28 bp, synthetic construct
  source 1..28: mol_type = other DNA
catggtcttgctctgtcccccaggctgg

SEQ ID NO: 12688 - DNA, 28 bp, synthetic construct
  source 1..28: mol_type = other DNA
actgcactactgcactccagcctggggg

SEQ ID NO: 12689 - DNA, 28 bp, synthetic construct
  source 1..28: mol_type = other DNA
gactgcactactgcactccagcctgggg

SEQ ID NO: 12690 - DNA, 28 bp, synthetic construct
  source 1..28: mol_type = other DNA
tgactgcactactgcactccagcctggg

SEQ ID NO: 12691 - DNA, 28 bp, synthetic construct
  source 1..28: mol_type = other DNA
atgactgcactactgcactccagcctgg

SEQ ID NO: 12692 - DNA, 28 bp, synthetic construct
  source 1..28: mol_type = other DNA
atagctcactgcagcctcaacctgctgg

SEQ ID NO: 12693 - DNA, 28 bp, synthetic construct
  source 1..28: mol_type = other DNA
aggatcgcttgaggccagcaggttgagg

SEQ ID NO: 12694 - DNA, 28 bp, synthetic construct
  source 1..28: mol_type = other DNA
agcaggaggatcgcttgaggccagcagg

SEQ ID NO: 12695 - DNA, 28 bp, synthetic construct
  source 1..28: mol_type = other DNA
gaggctgaagcaggaggatcgcttgagg

SEQ ID NO: 12696 - DNA, 28 bp, synthetic construct
  source 1..28: mol_type = other DNA
cagctacttgggaggctgaagcaggagg

SEQ ID NO: 12697 - DNA, 28 bp, synthetic construct
  source 1..28: mol_type = other DNA
ctcctgcttcagcctcccaagtagctgg

SEQ ID NO: 12698 - DNA, 28 bp, synthetic construct
  source 1..28: mol_type = other DNA
tcctgcttcagcctcccaagtagctggg

SEQ ID NO: 12699 - DNA, 28 bp, synthetic construct
  source 1..28: mol_type = other DNA
tcccagctacttgggaggctgaagcagg

SEQ ID NO: 12700 - DNA, 28 bp, synthetic construct
  source 1..28: mol_type = other DNA
cagcctcccaagtagctgggactacagg

SEQ ID NO: 12701 - DNA, 28 bp, synthetic construct
  source 1..28: mol_type = other DNA
acacctgtagtcccagctacttgggagg

SEQ ID NO: 12702 - DNA, 28 bp, synthetic construct
  source 1..28: mol_type = other DNA
tgcacacctgtagtcccagctacttggg

SEQ ID NO: 12703 - DNA, 28 bp, synthetic construct
  source 1..28: mol_type = other DNA
gtgcacacctgtagtcccagctacttgg

SEQ ID NO: 12704 - DNA, 28 bp, synthetic construct
  source 1..28: mol_type = other DNA
acaaaaaatagttagctgggtgtggtgg

SEQ ID NO: 12705 - DNA, 28 bp, synthetic construct
  source 1..28: mol_type = other DNA
tctacaaaaaatagttagctgggtgtgg

SEQ ID NO: 12706 - DNA, 28 bp, synthetic construct
  source 1..28: mol_type = other DNA
cccagctaactattttttgtagagatgg

SEQ ID NO: 12707 - DNA, 28 bp, synthetic construct
  source 1..28: mol_type = other DNA
ccagctaactattttttgtagagatggg

SEQ ID NO: 12708 - DNA, 28 bp, synthetic construct
  source 1..28: mol_type = other DNA
ttgtagagatgggatctcacgatgttgg

SEQ ID NO: 12709 - DNA, 28 bp, synthetic construct
  source 1..28: mol_type = other DNA
gagatgggatctcacgatgttggccagg

SEQ ID NO: 12710 - DNA, 28 bp, synthetic construct
  source 1..28: mol_type = other DNA
tgggatctcacgatgttggccaggctgg

SEQ ID NO: 12711 - DNA, 28 bp, synthetic construct
  source 1..28: mol_type = other DNA
gttggccaggctggtctctgtctcctgg

SEQ ID NO: 12712 - DNA, 28 bp, synthetic construct
  source 1..28: mol_type = other DNA
tgagtccaggagacagagaccagcctgg

SEQ ID NO: 12713 - DNA, 28 bp, synthetic construct
  source 1..28: mol_type = other DNA
cgaggcaggaggatcgcttgagtccagg

SEQ ID NO: 12714 - DNA, 28 bp, synthetic construct
  source 1..28: mol_type = other DNA
tagcactttgggaggtcgaggcaggagg

SEQ ID NO: 12715 - DNA, 28 bp, synthetic construct
  source 1..28: mol_type = other DNA
tactagcactttgggaggtcgaggcagg

SEQ ID NO: 12716 - DNA, 28 bp, synthetic construct
  source 1..28: mol_type = other DNA
gtaatactagcactttgggaggtcgagg

SEQ ID NO: 12717 - DNA, 28 bp, synthetic construct
  source 1..28: mol_type = other DNA
cgacctcccaaagtgctagtattacagg

SEQ ID NO: 12718 - DNA, 28 bp, synthetic construct
  source 1..28: mol_type = other DNA
acgcctgtaatactagcactttgggagg

SEQ ID NO: 12719 - DNA, 28 bp, synthetic construct
  source 1..28: mol_type = other DNA
ctcacgcctgtaatactagcactttggg

SEQ ID NO: 12720 - DNA, 28 bp, synthetic construct
  source 1..28: mol_type = other DNA
gctcacgcctgtaatactagcactttgg

SEQ ID NO: 12721 - DNA, 28 bp, synthetic construct
  source 1..28: mol_type = other DNA
aaggatgggaaggagctgggcgcggtgg

SEQ ID NO: 12722 - DNA, 28 bp, synthetic construct
  source 1..28: mol_type = other DNA
cttaaggatgggaaggagctgggcgcgg

SEQ ID NO: 12723 - DNA, 28 bp, synthetic construct
  source 1..28: mol_type = other DNA
tgagtcttaaggatgggaaggagctggg

SEQ ID NO: 12724 - DNA, 28 bp, synthetic construct
  source 1..28: mol_type = other DNA
ttgagtcttaaggatgggaaggagctgg

SEQ ID NO: 12725 - DNA, 28 bp, synthetic construct
  source 1..28: mol_type = other DNA
ttggggttgagtcttaaggatgggaagg

SEQ ID NO: 12726 - DNA, 28 bp, synthetic construct
  source 1..28: mol_type = other DNA
tgacttggggttgagtcttaaggatggg

SEQ ID NO: 12727 - DNA, 28 bp, synthetic construct
  source 1..28: mol_type = other DNA
ctgacttggggttgagtcttaaggatgg

SEQ ID NO: 12728 - DNA, 28 bp, synthetic construct
  source 1..28: mol_type = other DNA
tggtctgacttggggttgagtcttaagg

SEQ ID NO: 12729 - DNA, 28 bp, synthetic construct
  source 1..28: mol_type = other DNA
ttaagactcaaccccaagtcagaccagg

SEQ ID NO: 12730 - DNA, 28 bp, synthetic construct
  source 1..28: mol_type = other DNA
actcaaccccaagtcagaccaggctcgg

SEQ ID NO: 12731 - DNA, 28 bp, synthetic construct
  source 1..28: mol_type = other DNA
caaccccaagtcagaccaggctcggtgg

SEQ ID NO: 12732 - DNA, 28 bp, synthetic construct
  source 1..28: mol_type = other DNA
gagccaccgagcctggtctgacttgggg

SEQ ID NO: 12733 - DNA, 28 bp, synthetic construct
  source 1..28: mol_type = other DNA
tgagccaccgagcctggtctgacttggg

SEQ ID NO: 12734 - DNA, 28 bp, synthetic construct
  source 1..28: mol_type = other DNA
gtgagccaccgagcctggtctgacttgg

SEQ ID NO: 12735 - DNA, 28 bp, synthetic construct
  source 1..28: mol_type = other DNA
gattacaggtgtgagccaccgagcctgg

SEQ ID NO: 12736 - DNA, 28 bp, synthetic construct
  source 1..28: mol_type = other DNA
gctcacacctgtaatctcagcactttgg

SEQ ID NO: 12737 - DNA, 28 bp, synthetic construct
  source 1..28: mol_type = other DNA
ctcacacctgtaatctcagcactttggg

SEQ ID NO: 12738 - DNA, 28 bp, synthetic construct
  source 1..28: mol_type = other DNA
acacctgtaatctcagcactttgggagg

SEQ ID NO: 12739 - DNA, 28 bp, synthetic construct
  source 1..28: mol_type = other DNA
ctgcctcccaaagtgctgagattacagg

SEQ ID NO: 12740 - DNA, 28 bp, synthetic construct
  source 1..28: mol_type = other DNA
gtaatctcagcactttgggaggcagagg

SEQ ID NO: 12741 - DNA, 28 bp, synthetic construct
  source 1..28: mol_type = other DNA
tctcagcactttgggaggcagaggcagg

SEQ ID NO: 12742 - DNA, 28 bp, synthetic construct
  source 1..28: mol_type = other DNA
cagcactttgggaggcagaggcaggagg

SEQ ID NO: 12743 - DNA, 28 bp, synthetic construct
  source 1..28: mol_type = other DNA
actttgggaggcagaggcaggaggttgg

SEQ ID NO: 12744 - DNA, 28 bp, synthetic construct
  source 1..28: mol_type = other DNA
gaggcagaggcaggaggttggcttgagg

SEQ ID NO: 12745 - DNA, 28 bp, synthetic construct
  source 1..28: mol_type = other DNA
agaggcaggaggttggcttgaggccagg

SEQ ID NO: 12746 - DNA, 28 bp, synthetic construct
  source 1..28: mol_type = other DNA
gaggcaggaggttggcttgaggccaggg

SEQ ID NO: 12747 - DNA, 28 bp, synthetic construct
  source 1..28: mol_type = other DNA
aggcaggaggttggcttgaggccagggg

SEQ ID NO: 12748 - DNA, 28 bp, synthetic construct
  source 1..28: mol_type = other DNA
aggaggttggcttgaggccaggggttgg

SEQ ID NO: 12749 - DNA, 28 bp, synthetic construct
  source 1..28: mol_type = other DNA
gttggctaggatggtctccaacccctgg

SEQ ID NO: 12750 - DNA, 28 bp, synthetic construct
  source 1..28: mol_type = other DNA
cgaggtttcactctgttggctaggatgg

SEQ ID NO: 12751 - DNA, 28 bp, synthetic construct
  source 1..28: mol_type = other DNA
gaggcgaggtttcactctgttggctagg

SEQ ID NO: 12752 - DNA, 28 bp, synthetic construct
  source 1..28: mol_type = other DNA
tagtagaggcgaggtttcactctgttgg

SEQ ID NO: 12753 - DNA, 28 bp, synthetic construct
  source 1..28: mol_type = other DNA
aatttttgtatttttagtagaggcgagg

SEQ ID NO: 12754 - DNA, 28 bp, synthetic construct
  source 1..28: mol_type = other DNA
gggctaatttttgtatttttagtagagg

SEQ ID NO: 12755 - DNA, 28 bp, synthetic construct
  source 1..28: mol_type = other DNA
taaaaatacaaaaattagccccgtgtgg

SEQ ID NO: 12756 - DNA, 28 bp, synthetic construct
  source 1..28: mol_type = other DNA
aaaaatacaaaaattagccccgtgtggg

SEQ ID NO: 12757 - DNA, 28 bp, synthetic construct
  source 1..28: mol_type = other DNA
atacaaaaattagccccgtgtgggccgg

SEQ ID NO: 12758 - DNA, 28 bp, synthetic construct
  source 1..28: mol_type = other DNA
tacaaaaattagccccgtgtgggccggg

SEQ ID NO: 12759 - DNA, 28 bp, synthetic construct
  source 1..28: mol_type = other DNA
ttagccccgtgtgggccgggcgcagtgg

SEQ ID NO: 12760 - DNA, 28 bp, synthetic construct
  source 1..28: mol_type = other DNA
tgagccactgcgcccggcccacacgggg

SEQ ID NO: 12761 - DNA, 28 bp, synthetic construct
  source 1..28: mol_type = other DNA
gtgagccactgcgcccggcccacacggg

SEQ ID NO: 12762 - DNA, 28 bp, synthetic construct
  source 1..28: mol_type = other DNA
cgtgagccactgcgcccggcccacacgg

SEQ ID NO: 12763 - DNA, 28 bp, synthetic construct
  source 1..28: mol_type = other DNA
gattacaggcgtgagccactgcgcccgg

SEQ ID NO: 12764 - DNA, 28 bp, synthetic construct
  source 1..28: mol_type = other DNA
gctcacgcctgtaatcccagcactttgg

SEQ ID NO: 12765 - DNA, 28 bp, synthetic construct
  source 1..28: mol_type = other DNA
ctcacgcctgtaatcccagcactttggg

SEQ ID NO: 12766 - DNA, 28 bp, synthetic construct
  source 1..28: mol_type = other DNA
acgcctgtaatcccagcactttgggagg

SEQ ID NO: 12767 - DNA, 28 bp, synthetic construct
  source 1..28: mol_type = other DNA
cctgtaatcccagcactttgggaggcgg

SEQ ID NO: 12768 - DNA, 28 bp, synthetic construct
  source 1..28: mol_type = other DNA
ctgtaatcccagcactttgggaggcggg

SEQ ID NO: 12769 - DNA, 28 bp, synthetic construct
  source 1..28: mol_type = other DNA
tgatctgcccgcctcccaaagtgctggg

SEQ ID NO: 12770 - DNA, 28 bp, synthetic construct
  source 1..28: mol_type = other DNA
gtgatctgcccgcctcccaaagtgctgg

SEQ ID NO: 12771 - DNA, 28 bp, synthetic construct
  source 1..28: mol_type = other DNA
cactttgggaggcgggcagatcacgagg

SEQ ID NO: 12772 - DNA, 28 bp, synthetic construct
  source 1..28: mol_type = other DNA
tgggaggcgggcagatcacgaggtaagg

SEQ ID NO: 12773 - DNA, 28 bp, synthetic construct
  source 1..28: mol_type = other DNA
cgaggtaaggagatcgagaccatcctgg

SEQ ID NO: 12774 - DNA, 28 bp, synthetic construct
  source 1..28: mol_type = other DNA
gagatcgagaccatcctggctaagacgg

SEQ ID NO: 12775 - DNA, 28 bp, synthetic construct
  source 1..28: mol_type = other DNA
cggggtttcaccgtcttagccaggatgg

SEQ ID NO: 12776 - DNA, 28 bp, synthetic construct
  source 1..28: mol_type = other DNA
gagacggggtttcaccgtcttagccagg

SEQ ID NO: 12777 - DNA, 28 bp, synthetic construct
  source 1..28: mol_type = other DNA
attttttgtatttttagtagagacgggg

SEQ ID NO: 12778 - DNA, 28 bp, synthetic construct
  source 1..28: mol_type = other DNA
aattttttgtatttttagtagagacggg

SEQ ID NO: 12779 - DNA, 28 bp, synthetic construct
  source 1..28: mol_type = other DNA
taattttttgtatttttagtagagacgg

SEQ ID NO: 12780 - DNA, 28 bp, synthetic construct
  source 1..28: mol_type = other DNA
tctactaaaaatacaaaaaattagccgg

SEQ ID NO: 12781 - DNA, 28 bp, synthetic construct
  source 1..28: mol_type = other DNA
ctactaaaaatacaaaaaattagccggg

SEQ ID NO: 12782 - DNA, 28 bp, synthetic construct
  source 1..28: mol_type = other DNA
aaaaatacaaaaaattagccgggtgtgg

SEQ ID NO: 12783 - DNA, 28 bp, synthetic construct
  source 1..28: mol_type = other DNA
aatacaaaaaattagccgggtgtggtgg

SEQ ID NO: 12784 - DNA, 28 bp, synthetic construct
  source 1..28: mol_type = other DNA
acaaaaaattagccgggtgtggtggtgg

SEQ ID NO: 12785 - DNA, 28 bp, synthetic construct
  source 1..28: mol_type = other DNA
caaaaaattagccgggtgtggtggtggg

SEQ ID NO: 12786 - DNA, 28 bp, synthetic construct
  source 1..28: mol_type = other DNA
gactacaggcgcccaccaccacacccgg

SEQ ID NO: 12787 - DNA, 28 bp, synthetic construct
  source 1..28: mol_type = other DNA
cagtctctcgagtagctgggactacagg

SEQ ID NO: 12788 - DNA, 28 bp, synthetic construct
  source 1..28: mol_type = other DNA
gtagtcccagctactcgagagactgagg

SEQ ID NO: 12789 - DNA, 28 bp, synthetic construct
  source 1..28: mol_type = other DNA
tcccagctactcgagagactgaggcagg

SEQ ID NO: 12790 - DNA, 28 bp, synthetic construct
  source 1..28: mol_type = other DNA
tcctgcctcagtctctcgagtagctggg

SEQ ID NO: 12791 - DNA, 28 bp, synthetic construct
  source 1..28: mol_type = other DNA
ctcctgcctcagtctctcgagtagctgg

SEQ ID NO: 12792 - DNA, 28 bp, synthetic construct
  source 1..28: mol_type = other DNA
tactcgagagactgaggcaggagaatgg

SEQ ID NO: 12793 - DNA, 28 bp, synthetic construct
  source 1..28: mol_type = other DNA
ctgaggcaggagaatggcgtgaacccgg

SEQ ID NO: 12794 - DNA, 28 bp, synthetic construct
  source 1..28: mol_type = other DNA
tgaggcaggagaatggcgtgaacccggg

SEQ ID NO: 12795 - DNA, 28 bp, synthetic construct
  source 1..28: mol_type = other DNA
ggcaggagaatggcgtgaacccgggagg

SEQ ID NO: 12796 - DNA, 28 bp, synthetic construct
  source 1..28: mol_type = other DNA
aggagaatggcgtgaacccgggaggcgg

SEQ ID NO: 12797 - DNA, 28 bp, synthetic construct
  source 1..28: mol_type = other DNA
cccgggaggcggagcttgctgtgagcgg

SEQ ID NO: 12798 - DNA, 28 bp, synthetic construct
  source 1..28: mol_type = other DNA
tccgctcacagcaagctccgcctcccgg

SEQ ID NO: 12799 - DNA, 28 bp, synthetic construct
  source 1..28: mol_type = other DNA
ctctgtcgcacaggctggagtgcagggg

SEQ ID NO: 12800 - DNA, 28 bp, synthetic construct
  source 1..28: mol_type = other DNA
gctctgtcgcacaggctggagtgcaggg

SEQ ID NO: 12801 - DNA, 28 bp, synthetic construct
  source 1..28: mol_type = other DNA
cgctctgtcgcacaggctggagtgcagg

SEQ ID NO: 12802 - DNA, 28 bp, synthetic construct
  source 1..28: mol_type = other DNA
cggagtctcgctctgtcgcacaggctgg

SEQ ID NO: 12803 - DNA, 28 bp, synthetic construct
  source 1..28: mol_type = other DNA
gagacggagtctcgctctgtcgcacagg

SEQ ID NO: 12804 - DNA, 28 bp, synthetic construct
  source 1..28: mol_type = other DNA
taattttttttttttttttttgagacgg

SEQ ID NO: 12805 - DNA, 28 bp, synthetic construct
  source 1..28: mol_type = other DNA
tcaaaaaaaaaaaaaaaaaattagccgg

SEQ ID NO: 12806 - DNA, 28 bp, synthetic construct
  source 1..28: mol_type = other DNA
caaaaaaaaaaaaaaaaaattagccggg

SEQ ID NO: 12807 - DNA, 28 bp, synthetic construct
  source 1..28: mol_type = other DNA
aaaaaaaaaaaaaattagccgggtgtgg

SEQ ID NO: 12808 - DNA, 28 bp, synthetic construct
  source 1..28: mol_type = other DNA
aaaaaaaaaaattagccgggtgtggtgg

SEQ ID NO: 12809 - DNA, 28 bp, synthetic construct
  source 1..28: mol_type = other DNA
gattacaggcatgcgccaccacacccgg

SEQ ID NO: 12810 - DNA, 28 bp, synthetic construct
  source 1..28: mol_type = other DNA
gctggcattacaggcatgggattacagg

SEQ ID NO: 12811 - DNA, 28 bp, synthetic construct
  source 1..28: mol_type = other DNA
cccatgcctgtaatgccagctactcagg

SEQ ID NO: 12812 - DNA, 28 bp, synthetic construct
  source 1..28: mol_type = other DNA
tcctgagtagctggcattacaggcatgg

SEQ ID NO: 12813 - DNA, 28 bp, synthetic construct
  source 1..28: mol_type = other DNA
atgcctgtaatgccagctactcaggagg

SEQ ID NO: 12814 - DNA, 28 bp, synthetic construct
  source 1..28: mol_type = other DNA
tagcctcctgagtagctggcattacagg

SEQ ID NO: 12815 - DNA, 28 bp, synthetic construct
  source 1..28: mol_type = other DNA
gtaatgccagctactcaggaggctaagg

SEQ ID NO: 12816 - DNA, 28 bp, synthetic construct
  source 1..28: mol_type = other DNA
cttctgccttagcctcctgagtagctgg

SEQ ID NO: 12817 - DNA, 28 bp, synthetic construct
  source 1..28: mol_type = other DNA
ctaaggcagaagaatcacttgaacccgg

SEQ ID NO: 12818 - DNA, 28 bp, synthetic construct
  source 1..28: mol_type = other DNA
taaggcagaagaatcacttgaacccggg

SEQ ID NO: 12819 - DNA, 28 bp, synthetic construct
  source 1..28: mol_type = other DNA
ggcagaagaatcacttgaacccgggagg

SEQ ID NO: 12820 - DNA, 28 bp, synthetic construct
  source 1..28: mol_type = other DNA
agaatcacttgaacccgggaggcgtagg

SEQ ID NO: 12821 - DNA, 28 bp, synthetic construct
  source 1..28: mol_type = other DNA
cggctcactgcaacctacgcctcccggg

SEQ ID NO: 12822 - DNA, 28 bp, synthetic construct
  source 1..28: mol_type = other DNA
tcggctcactgcaacctacgcctcccgg

SEQ ID NO: 12823 - DNA, 28 bp, synthetic construct
  source 1..28: mol_type = other DNA
aggctagagtgcagtggcacaatctcgg

SEQ ID NO: 12824 - DNA, 28 bp, synthetic construct
  source 1..28: mol_type = other DNA
gagattgtgccactgcactctagcctgg

SEQ ID NO: 12825 - DNA, 28 bp, synthetic construct
  source 1..28: mol_type = other DNA
agattgtgccactgcactctagcctggg

SEQ ID NO: 12826 - DNA, 28 bp, synthetic construct
  source 1..28: mol_type = other DNA
ctctgtcgcccaggctagagtgcagtgg

SEQ ID NO: 12827 - DNA, 28 bp, synthetic construct
  source 1..28: mol_type = other DNA
gcactctagcctgggcgacagagcaagg

SEQ ID NO: 12828 - DNA, 28 bp, synthetic construct
  source 1..28: mol_type = other DNA
gagacagagccttgctctgtcgcccagg

SEQ ID NO: 12829 - DNA, 28 bp, synthetic construct
  source 1..28: mol_type = other DNA
cttagggttgagtctttttcttttttgg

SEQ ID NO: 12830 - DNA, 28 bp, synthetic construct
  source 1..28: mol_type = other DNA
aaagactcaaccctaagtcagctccagg

SEQ ID NO: 12831 - DNA, 28 bp, synthetic construct
  source 1..28: mol_type = other DNA
gcacatacgtcctggagctgacttaggg

SEQ ID NO: 12832 - DNA, 28 bp, synthetic construct
  source 1..28: mol_type = other DNA
ggcacatacgtcctggagctgacttagg

SEQ ID NO: 12833 - DNA, 28 bp, synthetic construct
  source 1..28: mol_type = other DNA
acatgtagagtaggcacatacgtcctgg

SEQ ID NO: 12834 - DNA, 28 bp, synthetic construct
  source 1..28: mol_type = other DNA
cccctcggactcacacatgtagagtagg

SEQ ID NO: 12835 - RNA, 20 nt, synthetic construct
  source 1..20: mol_type = other RNA
ccaccttgggctccaaactc

SEQ ID NO: 12836 - RNA, 20 nt, synthetic construct
  source 1..20: mol_type = other RNA
tgagtcactgcacccagcca

SEQ ID NO: 12837 - RNA, 20 nt, synthetic construct
  source 1..20: mol_type = other RNA
aagagtcaggctccttggct

SEQ ID NO: 12838 - RNA, 20 nt, synthetic construct
  source 1..20: mol_type = other RNA
gaagagtcaggctccttggc

SEQ ID NO: 12839 - RNA, 20 nt, synthetic construct
  source 1..20: mol_type = other RNA
ctgtgaagagtcaggctcct

SEQ ID NO: 12840 - RNA, 20 nt, synthetic construct
  source 1..20: mol_type = other RNA
ggagtgcactgtgaagagtc

SEQ ID NO: 12841 - RNA, 20 nt, synthetic construct
  source 1..20: mol_type = other RNA
cagtgcactcctcatctcat

SEQ ID NO: 12842 - RNA, 20 nt, synthetic construct
  source 1..20: mol_type = other RNA
agtgcactcctcatctcatt

SEQ ID NO: 12843 - RNA, 20 nt, synthetic construct
  source 1..20: mol_type = other RNA
tcctcatctcattgggacat

SEQ ID NO: 12844 - RNA, 20 nt, synthetic construct
  source 1..20: mol_type = other RNA
catctcattgggacattggt

SEQ ID NO: 12845 - RNA, 20 nt, synthetic construct
  source 1..20: mol_type = other RNA
atctcattgggacattggtt

SEQ ID NO: 12846 - RNA, 20 nt, synthetic construct
  source 1..20: mol_type = other RNA
accaatgtcccaatgagatg

SEQ ID NO: 12847 - RNA, 20 nt, synthetic construct
  source 1..20: mol_type = other RNA
gggacattggttgggctagc

SEQ ID NO: 12848 - RNA, 20 nt, synthetic construct
  source 1..20: mol_type = other RNA
ggacattggttgggctagca

SEQ ID NO: 12849 - RNA, 20 nt, synthetic construct
  source 1..20: mol_type = other RNA
agggaataactgttcttact

SEQ ID NO: 12850 - RNA, 20 nt, synthetic construct
  source 1..20: mol_type = other RNA
ggaaagtactcctctctgtc

SEQ ID NO: 12851 - RNA, 20 nt, synthetic construct
  source 1..20: mol_type = other RNA
actcctctctgtcaggcatg

SEQ ID NO: 12852 - RNA, 20 nt, synthetic construct
  source 1..20: mol_type = other RNA
tctctgtcaggcatgtggca

SEQ ID NO: 12853 - RNA, 20 nt, synthetic construct
  source 1..20: mol_type = other RNA
ttgccacatgcctgacagag

SEQ ID NO: 12854 - RNA, 20 nt, synthetic construct
  source 1..20: mol_type = other RNA
tgggttaaggagatcacata

SEQ ID NO: 12855 - RNA, 20 nt, synthetic construct
  source 1..20: mol_type = other RNA
aacccacaaacaaccccacc

SEQ ID NO: 12856 - RNA, 20 nt, synthetic construct
  source 1..20: mol_type = other RNA
gtggggttgtttgtgggtta

SEQ ID NO: 12857 - RNA, 20 nt, synthetic construct
  source 1..20: mol_type = other RNA
ccacaaacaaccccaccagg

SEQ ID NO: 12858 - RNA, 20 nt, synthetic construct
  source 1..20: mol_type = other RNA
cacaaacaaccccaccagga

SEQ ID NO: 12859 - RNA, 20 nt, synthetic construct
  source 1..20: mol_type = other RNA
ctcctggtggggttgtttgt

SEQ ID NO: 12860 - RNA, 20 nt, synthetic construct
  source 1..20: mol_type = other RNA
cctcctggtggggttgtttg

SEQ ID NO: 12861 - RNA, 20 nt, synthetic construct
  source 1..20: mol_type = other RNA
ataatataaccctcctggtg

SEQ ID NO: 12862 - RNA, 20 nt, synthetic construct
  source 1..20: mol_type = other RNA
gataatataaccctcctggt

SEQ ID NO: 12863 - RNA, 20 nt, synthetic construct
  source 1..20: mol_type = other RNA
tgataatataaccctcctgg

SEQ ID NO: 12864 - RNA, 20 nt, synthetic construct
  source 1..20: mol_type = other RNA
tggtgataatataaccctcc

SEQ ID NO: 12865 - RNA, 20 nt, synthetic construct
  source 1..20: mol_type = other RNA
tatcaccaccaatttacaga

SEQ ID NO: 12866 - RNA, 20 nt, synthetic construct
  source 1..20: mol_type = other RNA
atcaccaccaatttacagat

SEQ ID NO: 12867 - RNA, 20 nt, synthetic construct
  source 1..20: mol_type = other RNA
tcaccaccaatttacagatg

SEQ ID NO: 12868 - RNA, 20 nt, synthetic construct
  source 1..20: mol_type = other RNA
tttccccatctgtaaattgg

SEQ ID NO: 12869 - RNA, 20 nt, synthetic construct
  source 1..20: mol_type = other RNA
atttacagatggggaaattc

SEQ ID NO: 12870 - RNA, 20 nt, synthetic construct
  source 1..20: mol_type = other RNA
gaatttccccatctgtaaat

SEQ ID NO: 12871 - RNA, 20 nt, synthetic construct
  source 1..20: mol_type = other RNA
attcaggctttgagagatta

SEQ ID NO: 12872 - RNA, 20 nt, synthetic construct
  source 1..20: mol_type = other RNA
tgggcttatgaatctgactg

SEQ ID NO: 12873 - RNA, 20 nt, synthetic construct
  source 1..20: mol_type = other RNA
attcataagcccaaactatc

SEQ ID NO: 12874 - RNA, 20 nt, synthetic construct
  source 1..20: mol_type = other RNA
ttcataagcccaaactatct

SEQ ID NO: 12875 - RNA, 20 nt, synthetic construct
  source 1..20: mol_type = other RNA
gctaagagcccagatagttt

SEQ ID NO: 12876 - RNA, 20 nt, synthetic construct
  source 1..20: mol_type = other RNA
ggctaagagcccagatagtt

SEQ ID NO: 12877 - RNA, 20 nt, synthetic construct
  source 1..20: mol_type = other RNA
cccacatgctcctgcctcag

SEQ ID NO: 12878 - RNA, 20 nt, synthetic construct
  source 1..20: mol_type = other RNA
ccacatgctcctgcctcagt

SEQ ID NO: 12879 - RNA, 20 nt, synthetic construct
  source 1..20: mol_type = other RNA
cactgaggcaggagcatgtg

SEQ ID NO: 12880 - RNA, 20 nt, synthetic construct
  source 1..20: mol_type = other RNA
ccactgaggcaggagcatgt

SEQ ID NO: 12881 - RNA, 20 nt, synthetic construct
  source 1..20: mol_type = other RNA
cccactgaggcaggagcatg

SEQ ID NO: 12882 - RNA, 20 nt, synthetic construct
  source 1..20: mol_type = other RNA
tgcctcagtgggctacacct

SEQ ID NO: 12883 - RNA, 20 nt, synthetic construct
  source 1..20: mol_type = other RNA
aaggtgtagcccactgaggc

SEQ ID NO: 12884 - RNA, 20 nt, synthetic construct
  source 1..20: mol_type = other RNA
caccaaggtgtagcccactg

SEQ ID NO: 12885 - RNA, 20 nt, synthetic construct
  source 1..20: mol_type = other RNA
ttggtgagatgcctatgttt

SEQ ID NO: 12886 - RNA, 20 nt, synthetic construct
  source 1..20: mol_type = other RNA
gaaacataggcatctcacca

SEQ ID NO: 12887 - RNA, 20 nt, synthetic construct
  source 1..20: mol_type = other RNA
atgcctatgtttcggtccac

SEQ ID NO: 12888 - RNA, 20 nt, synthetic construct
  source 1..20: mol_type = other RNA
ggaccagtggaccgaaacat

SEQ ID NO: 12889 - RNA, 20 nt, synthetic construct
  source 1..20: mol_type = other RNA
tggtccactcctgaagacca

SEQ ID NO: 12890 - RNA, 20 nt, synthetic construct
  source 1..20: mol_type = other RNA
ggtcttcaggagtggaccag

SEQ ID NO: 12891 - RNA, 20 nt, synthetic construct
  source 1..20: mol_type = other RNA
actcctgaagaccaaggcac

SEQ ID NO: 12892 - RNA, 20 nt, synthetic construct
  source 1..20: mol_type = other RNA
tgtgccttggtcttcaggag

SEQ ID NO: 12893 - RNA, 20 nt, synthetic construct
  source 1..20: mol_type = other RNA
aaacctgtgccttggtcttc

SEQ ID NO: 12894 - RNA, 20 nt, synthetic construct
  source 1..20: mol_type = other RNA
gtctctctaaacctgtgcct

SEQ ID NO: 12895 - RNA, 20 nt, synthetic construct
  source 1..20: mol_type = other RNA
ggtttagagagacgtaccag

SEQ ID NO: 12896 - RNA, 20 nt, synthetic construct
  source 1..20: mol_type = other RNA
agagacgtaccagcggctaa

SEQ ID NO: 12897 - RNA, 20 nt, synthetic construct
  source 1..20: mol_type = other RNA
gcagaagtacctttagccgc

SEQ ID NO: 12898 - RNA, 20 nt, synthetic construct
  source 1..20: mol_type = other RNA
cttctgcatccaagaactag

SEQ ID NO: 12899 - RNA, 20 nt, synthetic construct
  source 1..20: mol_type = other RNA
cacgggacacctctagttct

SEQ ID NO: 12900 - RNA, 20 nt, synthetic construct
  source 1..20: mol_type = other RNA
tgtcccctttacaacattgt

SEQ ID NO: 12901 - RNA, 20 nt, synthetic construct
  source 1..20: mol_type = other RNA
caatgttgtaaaggggacac

SEQ ID NO: 12902 - RNA, 20 nt, synthetic construct
  source 1..20: mol_type = other RNA
acaatgttgtaaaggggaca

SEQ ID NO: 12903 - RNA, 20 nt, synthetic construct
  source 1..20: mol_type = other RNA
aggccaacaatgttgtaaag

SEQ ID NO: 12904 - RNA, 20 nt, synthetic construct
  source 1..20: mol_type = other RNA
gaggccaacaatgttgtaaa

SEQ ID NO: 12905 - RNA, 20 nt, synthetic construct
  source 1..20: mol_type = other RNA
ggaggccaacaatgttgtaa

SEQ ID NO: 12906 - RNA, 20 nt, synthetic construct
  source 1..20: mol_type = other RNA
caacattgttggcctccctc

SEQ ID NO: 12907 - RNA, 20 nt, synthetic construct
  source 1..20: mol_type = other RNA
aacattgttggcctccctct

SEQ ID NO: 12908 - RNA, 20 nt, synthetic construct
  source 1..20: mol_type = other RNA
aaggtacaaggcccagaggg

SEQ ID NO: 12909 - RNA, 20 nt, synthetic construct
  source 1..20: mol_type = other RNA
cataaggtacaaggcccaga

SEQ ID NO: 12910 - RNA, 20 nt, synthetic construct
  source 1..20: mol_type = other RNA
acataaggtacaaggcccag

SEQ ID NO: 12911 - RNA, 20 nt, synthetic construct
  source 1..20: mol_type = other RNA
ggcaataaacataaggtaca

SEQ ID NO: 12912 - RNA, 20 nt, synthetic construct
  source 1..20: mol_type = other RNA
taaatgaggcaataaacata

SEQ ID NO: 12913 - RNA, 20 nt, synthetic construct
  source 1..20: mol_type = other RNA
tttattgcctcatttaatcc

SEQ ID NO: 12914 - RNA, 20 nt, synthetic construct
  source 1..20: mol_type = other RNA
tgcctcatttaatccaggta

SEQ ID NO: 12915 - RNA, 20 nt, synthetic construct
  source 1..20: mol_type = other RNA
ctccttacctggattaaatg

SEQ ID NO: 12916 - RNA, 20 nt, synthetic construct
  source 1..20: mol_type = other RNA
aatccaggtaaggagtcttt

SEQ ID NO: 12917 - RNA, 20 nt, synthetic construct
  source 1..20: mol_type = other RNA
aggtaaggagtctttaggat

SEQ ID NO: 12918 - RNA, 20 nt, synthetic construct
  source 1..20: mol_type = other RNA
taaggagtctttaggattgg

SEQ ID NO: 12919 - RNA, 20 nt, synthetic construct
  source 1..20: mol_type = other RNA
atgtattctttttatagaca

SEQ ID NO: 12920 - RNA, 20 nt, synthetic construct
  source 1..20: mol_type = other RNA
agacaaggaagatgatgctc

SEQ ID NO: 12921 - RNA, 20 nt, synthetic construct
  source 1..20: mol_type = other RNA
gaagatgatgctcaggagtt

SEQ ID NO: 12922 - RNA, 20 nt, synthetic construct
  source 1..20: mol_type = other RNA
gagtttggataacctgccca

SEQ ID NO: 12923 - RNA, 20 nt, synthetic construct
  source 1..20: mol_type = other RNA
acctgcccaaggtcacgcag

SEQ ID NO: 12924 - RNA, 20 nt, synthetic construct
  source 1..20: mol_type = other RNA
tgcccaaggtcacgcagtgg

SEQ ID NO: 12925 - RNA, 20 nt, synthetic construct
  source 1..20: mol_type = other RNA
tccactgcgtgaccttgggc

SEQ ID NO: 12926 - RNA, 20 nt, synthetic construct
  source 1..20: mol_type = other RNA
aaggtcacgcagtggaggag

SEQ ID NO: 12927 - RNA, 20 nt, synthetic construct
  source 1..20: mol_type = other RNA
ctcctccactgcgtgacctt

SEQ ID NO: 12928 - RNA, 20 nt, synthetic construct
  source 1..20: mol_type = other RNA
tctcctccactgcgtgacct

SEQ ID NO: 12929 - RNA, 20 nt, synthetic construct
  source 1..20: mol_type = other RNA
cagtggaggagaggactaga

SEQ ID NO: 12930 - RNA, 20 nt, synthetic construct
  source 1..20: mol_type = other RNA
aggactagaaggtaaatcaa

SEQ ID NO: 12931 - RNA, 20 nt, synthetic construct
  source 1..20: mol_type = other RNA
ttcactaccttccccttctc

SEQ ID NO: 12932 - RNA, 20 nt, synthetic construct
  source 1..20: mol_type = other RNA
tcactaccttccccttctct

SEQ ID NO: 12933 - RNA, 20 nt, synthetic construct
  source 1..20: mol_type = other RNA
gagaaggggaaggtagtgaa

SEQ ID NO: 12934 - RNA, 20 nt, synthetic construct
  source 1..20: mol_type = other RNA
ctacagcccagagaagggga

SEQ ID NO: 12935 - RNA, 20 nt, synthetic construct
  source 1..20: mol_type = other RNA
actgctacagcccagagaag

SEQ ID NO: 12936 - RNA, 20 nt, synthetic construct
  source 1..20: mol_type = other RNA
cactgctacagcccagagaa

SEQ ID NO: 12937 - RNA, 20 nt, synthetic construct
  source 1..20: mol_type = other RNA
tcactgctacagcccagaga

SEQ ID NO: 12938 - RNA, 20 nt, synthetic construct
  source 1..20: mol_type = other RNA
ggctgtagcagtgagttaac

SEQ ID NO: 12939 - RNA, 20 nt, synthetic construct
  source 1..20: mol_type = other RNA
actggctcagacttgcccag

SEQ ID NO: 12940 - RNA, 20 nt, synthetic construct
  source 1..20: mol_type = other RNA
tgcccagcggaatgcccttc

SEQ ID NO: 12941 - RNA, 20 nt, synthetic construct
  source 1..20: mol_type = other RNA
gtcctgaagggcattccgct

SEQ ID NO: 12942 - RNA, 20 nt, synthetic construct
  source 1..20: mol_type = other RNA
tgtcctgaagggcattccgc

SEQ ID NO: 12943 - RNA, 20 nt, synthetic construct
  source 1..20: mol_type = other RNA
agtactcagtgtgtcctgaa

SEQ ID NO: 12944 - RNA, 20 nt, synthetic construct
  source 1..20: mol_type = other RNA
cagtactcagtgtgtcctga

SEQ ID NO: 12945 - RNA, 20 nt, synthetic construct
  source 1..20: mol_type = other RNA
taagagctgcatatgcgctc

SEQ ID NO: 12946 - RNA, 20 nt, synthetic construct
  source 1..20: mol_type = other RNA
aagagctgcatatgcgctca

SEQ ID NO: 12947 - RNA, 20 nt, synthetic construct
  source 1..20: mol_type = other RNA
atatgcgctcagggagaatg

SEQ ID NO: 12948 - RNA, 20 nt, synthetic construct
  source 1..20: mol_type = other RNA
tagacgctgtttgtgattca

SEQ ID NO: 12949 - RNA, 20 nt, synthetic construct
  source 1..20: mol_type = other RNA
agacgctgtttgtgattcac

SEQ ID NO: 12950 - RNA, 20 nt, synthetic construct
  source 1..20: mol_type = other RNA
tgtttgtgattcacgggtaa

SEQ ID NO: 12951 - RNA, 20 nt, synthetic construct
  source 1..20: mol_type = other RNA
gtttgtgattcacgggtaaa

SEQ ID NO: 12952 - RNA, 20 nt, synthetic construct
  source 1..20: mol_type = other RNA
ggtaaagggccttctcccag

SEQ ID NO: 12953 - RNA, 20 nt, synthetic construct
  source 1..20: mol_type = other RNA
ccttctcccagaggcagcag

SEQ ID NO: 12954 - RNA, 20 nt, synthetic construct
  source 1..20: mol_type = other RNA
cctctgctgcctctgggaga

SEQ ID NO: 12955 - RNA, 20 nt, synthetic construct
  source 1..20: mol_type = other RNA
gatctgcctctgctgcctct

SEQ ID NO: 12956 - RNA, 20 nt, synthetic construct
  source 1..20: mol_type = other RNA
ggatctgcctctgctgcctc

SEQ ID NO: 12957 - RNA, 20 nt, synthetic construct
  source 1..20: mol_type = other RNA
gcagaggcagatcctgtctc

SEQ ID NO: 12958 - RNA, 20 nt, synthetic construct
  source 1..20: mol_type = other RNA
atcctgtctctggtgtgccc

SEQ ID NO: 12959 - RNA, 20 nt, synthetic construct
  source 1..20: mol_type = other RNA
ggccagggcacaccagagac

SEQ ID NO: 12960 - RNA, 20 nt, synthetic construct
  source 1..20: mol_type = other RNA
gtgtgccctggcccccgact

SEQ ID NO: 12961 - RNA, 20 nt, synthetic construct
  source 1..20: mol_type = other RNA
tgccctggcccccgacttgg

SEQ ID NO: 12962 - RNA, 20 nt, synthetic construct
  source 1..20: mol_type = other RNA
ggcctccaagtcgggggcca

SEQ ID NO: 12963 - RNA, 20 nt, synthetic construct
  source 1..20: mol_type = other RNA
cccccgacttggaggcctcc

SEQ ID NO: 12964 - RNA, 20 nt, synthetic construct
  source 1..20: mol_type = other RNA
ccccgacttggaggcctcct

SEQ ID NO: 12965 - RNA, 20 nt, synthetic construct
  source 1..20: mol_type = other RNA
ccaggaggcctccaagtcgg

SEQ ID NO: 12966 - RNA, 20 nt, synthetic construct
  source 1..20: mol_type = other RNA
acttggaggcctcctgggcc

SEQ ID NO: 12967 - RNA, 20 nt, synthetic construct
  source 1..20: mol_type = other RNA
gcccaggaggcctccaagtc

SEQ ID NO: 12968 - RNA, 20 nt, synthetic construct
  source 1..20: mol_type = other RNA
ggcccaggaggcctccaagt

SEQ ID NO: 12969 - RNA, 20 nt, synthetic construct
  source 1..20: mol_type = other RNA
aggtcttggcctggcccagg

SEQ ID NO: 12970 - RNA, 20 nt, synthetic construct
  source 1..20: mol_type = other RNA
ggccaggccaagaccttccc

SEQ ID NO: 12971 - RNA, 20 nt, synthetic construct
  source 1..20: mol_type = other RNA
ggaaggtcttggcctggccc

SEQ ID NO: 12972 - RNA, 20 nt, synthetic construct
  source 1..20: mol_type = other RNA
tgccggggaaggtcttggcc

SEQ ID NO: 12973 - RNA, 20 nt, synthetic construct
  source 1..20: mol_type = other RNA
aagaccttccccggcagcga

SEQ ID NO: 12974 - RNA, 20 nt, synthetic construct
  source 1..20: mol_type = other RNA
atcgctgccggggaaggtct

SEQ ID NO: 12975 - RNA, 20 nt, synthetic construct
  source 1..20: mol_type = other RNA
gagaccatcgctgccgggga

SEQ ID NO: 12976 - RNA, 20 nt, synthetic construct
  source 1..20: mol_type = other RNA
gctggagaccatcgctgccg

SEQ ID NO: 12977 - RNA, 20 nt, synthetic construct
  source 1..20: mol_type = other RNA
ggctggagaccatcgctgcc

SEQ ID NO: 12978 - RNA, 20 nt, synthetic construct
  source 1..20: mol_type = other RNA
tggctggagaccatcgctgc

SEQ ID NO: 12979 - RNA, 20 nt, synthetic construct
  source 1..20: mol_type = other RNA
gccacactcaactgccctga

SEQ ID NO: 12980 - RNA, 20 nt, synthetic construct
  source 1..20: mol_type = other RNA
ccacactcaactgccctgaa

SEQ ID NO: 12981 - RNA, 20 nt, synthetic construct
  source 1..20: mol_type = other RNA
tcagggcagttgagtgtggc

SEQ ID NO: 12982 - RNA, 20 nt, synthetic construct
  source 1..20: mol_type = other RNA
cccttcagggcagttgagtg

SEQ ID NO: 12983 - RNA, 20 nt, synthetic construct
  source 1..20: mol_type = other RNA
aagcaggaaatgtcccttca

SEQ ID NO: 12984 - RNA, 20 nt, synthetic construct
  source 1..20: mol_type = other RNA
taagcaggaaatgtcccttc

SEQ ID NO: 12985 - RNA, 20 nt, synthetic construct
  source 1..20: mol_type = other RNA
ttcctgcttattcccttgcc

SEQ ID NO: 12986 - RNA, 20 nt, synthetic construct
  source 1..20: mol_type = other RNA
agccgggcaagggaataagc

SEQ ID NO: 12987 - RNA, 20 nt, synthetic construct
  source 1..20: mol_type = other RNA
gcccggctgtgtcctccacc

SEQ ID NO: 12988 - RNA, 20 nt, synthetic construct
  source 1..20: mol_type = other RNA
gtggaggacacagccgggca

SEQ ID NO: 12989 - RNA, 20 nt, synthetic construct
  source 1..20: mol_type = other RNA
ggctgtgtcctccacccgga

SEQ ID NO: 12990 - RNA, 20 nt, synthetic construct
  source 1..20: mol_type = other RNA
tccgggtggaggacacagcc

SEQ ID NO: 12991 - RNA, 20 nt, synthetic construct
  source 1..20: mol_type = other RNA
ttccgggtggaggacacagc

SEQ ID NO: 12992 - RNA, 20 nt, synthetic construct
  source 1..20: mol_type = other RNA
ggcacaggccttccgggtgg

SEQ ID NO: 12993 - RNA, 20 nt, synthetic construct
  source 1..20: mol_type = other RNA
gaaggcacaggccttccggg

SEQ ID NO: 12994 - RNA, 20 nt, synthetic construct
  source 1..20: mol_type = other RNA
gaagaaggcacaggccttcc

SEQ ID NO: 12995 - RNA, 20 nt, synthetic construct
  source 1..20: mol_type = other RNA
cgaagaaggcacaggccttc

SEQ ID NO: 12996 - RNA, 20 nt, synthetic construct
  source 1..20: mol_type = other RNA
catgcaggcgaagaaggcac

SEQ ID NO: 12997 - RNA, 20 nt, synthetic construct
  source 1..20: mol_type = other RNA
gtaggacatgcaggcgaaga

SEQ ID NO: 12998 - RNA, 20 nt, synthetic construct
  source 1..20: mol_type = other RNA
cgcctgcatgtcctaccctg

SEQ ID NO: 12999 - RNA, 20 nt, synthetic construct
  source 1..20: mol_type = other RNA
ctgcatgtcctaccctgagg

SEQ ID NO: 13000 - RNA, 20 nt, synthetic construct
  source 1..20: mol_type = other RNA
ctcctcagggtaggacatgc

SEQ ID NO: 13001 - RNA, 20 nt, synthetic construct
  source 1..20: mol_type = other RNA
ctaccctgaggaggctccct

SEQ ID NO: 13002 - RNA, 20 nt, synthetic construct
  source 1..20: mol_type = other RNA
caagggagcctcctcagggt

SEQ ID NO: 13003 - RNA, 20 nt, synthetic construct
  source 1..20: mol_type = other RNA
agaccaagggagcctcctca

SEQ ID NO: 13004 - RNA, 20 nt, synthetic construct
  source 1..20: mol_type = other RNA
aagaccaagggagcctcctc

SEQ ID NO: 13005 - RNA, 20 nt, synthetic construct
  source 1..20: mol_type = other RNA
ggagagcgatgaaagaccaa

SEQ ID NO: 13006 - RNA, 20 nt, synthetic construct
  source 1..20: mol_type = other RNA
gtctttcatcgctctcccta

SEQ ID NO: 13007 - RNA, 20 nt, synthetic construct
  source 1..20: mol_type = other RNA
tctttcatcgctctccctat

SEQ ID NO: 13008 - RNA, 20 nt, synthetic construct
  source 1..20: mol_type = other RNA
ggaaggcgtgaagacccata

SEQ ID NO: 13009 - RNA, 20 nt, synthetic construct
  source 1..20: mol_type = other RNA
gggaaggcgtgaagacccat

SEQ ID NO: 13010 - RNA, 20 nt, synthetic construct
  source 1..20: mol_type = other RNA
ccgaaccaccgcgcccaagc

SEQ ID NO: 13011 - RNA, 20 nt, synthetic construct
  source 1..20: mol_type = other RNA
ctgcttgggcgcggtggttc

SEQ ID NO: 13012 - RNA, 20 nt, synthetic construct
  source 1..20: mol_type = other RNA
cctgcttgggcgcggtggtt

SEQ ID NO: 13013 - RNA, 20 nt, synthetic construct
  source 1..20: mol_type = other RNA
gtgctcctgcttgggcgcgg

SEQ ID NO: 13014 - RNA, 20 nt, synthetic construct
  source 1..20: mol_type = other RNA
cccaagcaggagcacgttct

SEQ ID NO: 13015 - RNA, 20 nt, synthetic construct
  source 1..20: mol_type = other RNA
ccgagaacgtgctcctgctt

SEQ ID NO: 13016 - RNA, 20 nt, synthetic construct
  source 1..20: mol_type = other RNA
gccgagaacgtgctcctgct

SEQ ID NO: 13017 - RNA, 20 nt, synthetic construct
  source 1..20: mol_type = other RNA
acgttctcggccctcttcac

SEQ ID NO: 13018 - RNA, 20 nt, synthetic construct
  source 1..20: mol_type = other RNA
cgttctcggccctcttcaca

SEQ ID NO: 13019 - RNA, 20 nt, synthetic construct
  source 1..20: mol_type = other RNA
ggaggagcgccctgtgaaga

SEQ ID NO: 13020 - RNA, 20 nt, synthetic construct
  source 1..20: mol_type = other RNA
aggaggagcgccctgtgaag

SEQ ID NO: 13021 - RNA, 20 nt, synthetic construct
  source 1..20: mol_type = other RNA
cacagggcgctcctcctcac

SEQ ID NO: 13022 - RNA, 20 nt, synthetic construct
  source 1..20: mol_type = other RNA
acagggcgctcctcctcaca

SEQ ID NO: 13023 - RNA, 20 nt, synthetic construct
  source 1..20: mol_type = other RNA
cagggcgctcctcctcacag

SEQ ID NO: 13024 - RNA, 20 nt, synthetic construct
  source 1..20: mol_type = other RNA
ctcctcctcacaggggtgcc

SEQ ID NO: 13025 - RNA, 20 nt, synthetic construct
  source 1..20: mol_type = other RNA
tcctcctcacaggggtgccc

SEQ ID NO: 13026 - RNA, 20 nt, synthetic construct
  source 1..20: mol_type = other RNA
tcccgggcacccctgtgagg

SEQ ID NO: 13027 - RNA, 20 nt, synthetic construct
  source 1..20: mol_type = other RNA
aaatcccgggcacccctgtg

SEQ ID NO: 13028 - RNA, 20 nt, synthetic construct
  source 1..20: mol_type = other RNA
aggcacagaataaaaatccc

SEQ ID NO: 13029 - RNA, 20 nt, synthetic construct
  source 1..20: mol_type = other RNA
atttttattctgtgccttcc

SEQ ID NO: 13030 - RNA, 20 nt, synthetic construct
  source 1..20: mol_type = other RNA
tttattctgtgccttcctgg

SEQ ID NO: 13031 - RNA, 20 nt, synthetic construct
  source 1..20: mol_type = other RNA
cctggtggctcctacaagtc

SEQ ID NO: 13032 - RNA, 20 nt, synthetic construct
  source 1..20: mol_type = other RNA
acttgtaggagccaccagga

SEQ ID NO: 13033 - RNA, 20 nt, synthetic construct
  source 1..20: mol_type = other RNA
gtggctcctacaagtctgga

SEQ ID NO: 13034 - RNA, 20 nt, synthetic construct
  source 1..20: mol_type = other RNA
tggctcctacaagtctggaa

SEQ ID NO: 13035 - RNA, 20 nt, synthetic construct
  source 1..20: mol_type = other RNA
tcctacaagtctggaagggc

SEQ ID NO: 13036 - RNA, 20 nt, synthetic construct
  source 1..20: mol_type = other RNA
tacaagtctggaagggcagg

SEQ ID NO: 13037 - RNA, 20 nt, synthetic construct
  source 1..20: mol_type = other RNA
tcctgcccttccagacttgt

SEQ ID NO: 13038 - RNA, 20 nt, synthetic construct
  source 1..20: mol_type = other RNA
ggaggcgcatctcactcctc

SEQ ID NO: 13039 - RNA, 20 nt, synthetic construct
  source 1..20: mol_type = other RNA
gaggcgcatctcactcctct

SEQ ID NO: 13040 - RNA, 20 nt, synthetic construct
  source 1..20: mol_type = other RNA
gggtcccctcccctagcgcc

SEQ ID NO: 13041 - RNA, 20 nt, synthetic construct
  source 1..20: mol_type = other RNA
tcccctcccctagcgcctgg

SEQ ID NO: 13042 - RNA, 20 nt, synthetic construct
  source 1..20: mol_type = other RNA
cccctcccctagcgcctggc

SEQ ID NO: 13043 - RNA, 20 nt, synthetic construct
  source 1..20: mol_type = other RNA
cccgccaggcgctaggggag

SEQ ID NO: 13044 - RNA, 20 nt, synthetic construct
  source 1..20: mol_type = other RNA
tcccgccaggcgctagggga

SEQ ID NO: 13045 - RNA, 20 nt, synthetic construct
  source 1..20: mol_type = other RNA
ctcccgccaggcgctagggg

SEQ ID NO: 13046 - RNA, 20 nt, synthetic construct
  source 1..20: mol_type = other RNA
ctagcgcctggcgggagccc

SEQ ID NO: 13047 - RNA, 20 nt, synthetic construct
  source 1..20: mol_type = other RNA
gggctcccgccaggcgctag

SEQ ID NO: 13048 - RNA, 20 nt, synthetic construct
  source 1..20: mol_type = other RNA
tgggctcccgccaggcgcta

SEQ ID NO: 13049 - RNA, 20 nt, synthetic construct
  source 1..20: mol_type = other RNA
ctgggctcccgccaggcgct

SEQ ID NO: 13050 - RNA, 20 nt, synthetic construct
  source 1..20: mol_type = other RNA
atgcagcctgggctcccgcc

SEQ ID NO: 13051 - RNA, 20 nt, synthetic construct
  source 1..20: mol_type = other RNA
gggagcccaggctgcatttg

SEQ ID NO: 13052 - RNA, 20 nt, synthetic construct
  source 1..20: mol_type = other RNA
gaattccacaaatgcagcct

SEQ ID NO: 13053 - RNA, 20 nt, synthetic construct
  source 1..20: mol_type = other RNA
tgaattccacaaatgcagcc

SEQ ID NO: 13054 - RNA, 20 nt, synthetic construct
  source 1..20: mol_type = other RNA
gctcaagctgaacacattgc

SEQ ID NO: 13055 - RNA, 20 nt, synthetic construct
  source 1..20: mol_type = other RNA
gcaatgtgttcagcttgagc

SEQ ID NO: 13056 - RNA, 20 nt, synthetic construct
  source 1..20: mol_type = other RNA
acacattgctggctcctgct

SEQ ID NO: 13057 - RNA, 20 nt, synthetic construct
  source 1..20: mol_type = other RNA
cacattgctggctcctgctc

SEQ ID NO: 13058 - RNA, 20 nt, synthetic construct
  source 1..20: mol_type = other RNA
attgctggctcctgctcggg

SEQ ID NO: 13059 - RNA, 20 nt, synthetic construct
  source 1..20: mol_type = other RNA
gctcctgctcgggtggagcc

SEQ ID NO: 13060 - RNA, 20 nt, synthetic construct
  source 1..20: mol_type = other RNA
tagccgggctccacccgagc

SEQ ID NO: 13061 - RNA, 20 nt, synthetic construct
  source 1..20: mol_type = other RNA
gagcccggctaattagagtg

SEQ ID NO: 13062 - RNA, 20 nt, synthetic construct
  source 1..20: mol_type = other RNA
agcccggctaattagagtga

SEQ ID NO: 13063 - RNA, 20 nt, synthetic construct
  source 1..20: mol_type = other RNA
gcccggctaattagagtgag

SEQ ID NO: 13064 - RNA, 20 nt, synthetic construct
  source 1..20: mol_type = other RNA
gcccctcactctaattagcc

SEQ ID NO: 13065 - RNA, 20 nt, synthetic construct
  source 1..20: mol_type = other RNA
agcccctcactctaattagc

SEQ ID NO: 13066 - RNA, 20 nt, synthetic construct
  source 1..20: mol_type = other RNA
tagagtgaggggctccccgt

SEQ ID NO: 13067 - RNA, 20 nt, synthetic construct
  source 1..20: mol_type = other RNA
agagtgaggggctccccgta

SEQ ID NO: 13068 - RNA, 20 nt, synthetic construct
  source 1..20: mol_type = other RNA
aggggctccccgtagggcga

SEQ ID NO: 13069 - RNA, 20 nt, synthetic construct
  source 1..20: mol_type = other RNA
ggggctccccgtagggcgaa

SEQ ID NO: 13070 - RNA, 20 nt, synthetic construct
  source 1..20: mol_type = other RNA
gggctccccgtagggcgaag

SEQ ID NO: 13071 - RNA, 20 nt, synthetic construct
  source 1..20: mol_type = other RNA
gcgcaccccttcgccctacg

SEQ ID NO: 13072 - RNA, 20 nt, synthetic construct
  source 1..20: mol_type = other RNA
agcgcaccccttcgccctac

SEQ ID NO: 13073 - RNA, 20 nt, synthetic construct
  source 1..20: mol_type = other RNA
cagcgcaccccttcgcccta

SEQ ID NO: 13074 - RNA, 20 nt, synthetic construct
  source 1..20: mol_type = other RNA
aaggggtgcgctgtcagatg

SEQ ID NO: 13075 - RNA, 20 nt, synthetic construct
  source 1..20: mol_type = other RNA
gatgtggcattcccgtttta

SEQ ID NO: 13076 - RNA, 20 nt, synthetic construct
  source 1..20: mol_type = other RNA
tcccgttttacggagacaca

SEQ ID NO: 13077 - RNA, 20 nt, synthetic construct
  source 1..20: mol_type = other RNA
accgtgtgtctccgtaaaac

SEQ ID NO: 13078 - RNA, 20 nt, synthetic construct
  source 1..20: mol_type = other RNA
caccgtgtgtctccgtaaaa

SEQ ID NO: 13079 - RNA, 20 nt, synthetic construct
  source 1..20: mol_type = other RNA
cacacggtgtcttacacgcc

SEQ ID NO: 13080 - RNA, 20 nt, synthetic construct
  source 1..20: mol_type = other RNA
acacggtgtcttacacgcca

SEQ ID NO: 13081 - RNA, 20 nt, synthetic construct
  source 1..20: mol_type = other RNA
gtgtcttacacgccagggag

SEQ ID NO: 13082 - RNA, 20 nt, synthetic construct
  source 1..20: mol_type = other RNA
ttgcgtctcagacctctccc

SEQ ID NO: 13083 - RNA, 20 nt, synthetic construct
  source 1..20: mol_type = other RNA
agacgcaaagagccgtcgag

SEQ ID NO: 13084 - RNA, 20 nt, synthetic construct
  source 1..20: mol_type = other RNA
gacgcaaagagccgtcgagc

SEQ ID NO: 13085 - RNA, 20 nt, synthetic construct
  source 1..20: mol_type = other RNA
aagagccgtcgagcgggctg

SEQ ID NO: 13086 - RNA, 20 nt, synthetic construct
  source 1..20: mol_type = other RNA
agagccgtcgagcgggctgc

SEQ ID NO: 13087 - RNA, 20 nt, synthetic construct
  source 1..20: mol_type = other RNA
caatcccgcagcccgctcga

SEQ ID NO: 13088 - RNA, 20 nt, synthetic construct
  source 1..20: mol_type = other RNA
ggaagggtggctgcaggcgg

SEQ ID NO: 13089 - RNA, 20 nt, synthetic construct
  source 1..20: mol_type = other RNA
tgcggaagggtggctgcagg

SEQ ID NO: 13090 - RNA, 20 nt, synthetic construct
  source 1..20: mol_type = other RNA
gcgtgcggaagggtggctgc

SEQ ID NO: 13091 - RNA, 20 nt, synthetic construct
  source 1..20: mol_type = other RNA
cacaagtgcgtgcggaaggg

SEQ ID NO: 13092 - RNA, 20 nt, synthetic construct
  source 1..20: mol_type = other RNA
acacacaagtgcgtgcggaa

SEQ ID NO: 13093 - RNA, 20 nt, synthetic construct
  source 1..20: mol_type = other RNA
cacacacaagtgcgtgcgga

SEQ ID NO: 13094 - RNA, 20 nt, synthetic construct
  source 1..20: mol_type = other RNA
acgcacttgtgtgtgcaccc

SEQ ID NO: 13095 - RNA, 20 nt, synthetic construct
  source 1..20: mol_type = other RNA
ggtgcacacacaagtgcgtg

SEQ ID NO: 13096 - RNA, 20 nt, synthetic construct
  source 1..20: mol_type = other RNA
tgtgtgcacccaggccaaca

SEQ ID NO: 13097 - RNA, 20 nt, synthetic construct
  source 1..20: mol_type = other RNA
tgcacccaggccaacatgga

SEQ ID NO: 13098 - RNA, 20 nt, synthetic construct
  source 1..20: mol_type = other RNA
ggcgccttccatgttggcct

SEQ ID NO: 13099 - RNA, 20 nt, synthetic construct
  source 1..20: mol_type = other RNA
tggcgccttccatgttggcc

SEQ ID NO: 13100 - RNA, 20 nt, synthetic construct
  source 1..20: mol_type = other RNA
taggatggcgccttccatgt

SEQ ID NO: 13101 - RNA, 20 nt, synthetic construct
  source 1..20: mol_type = other RNA
tcctaacttctgccgtgagc

SEQ ID NO: 13102 - RNA, 20 nt, synthetic construct
  source 1..20: mol_type = other RNA
gctcacggcagaagttagga

SEQ ID NO: 13103 - RNA, 20 nt, synthetic construct
  source 1..20: mol_type = other RNA
taacttctgccgtgagcagg

SEQ ID NO: 13104 - RNA, 20 nt, synthetic construct
  source 1..20: mol_type = other RNA
aacttctgccgtgagcaggt

SEQ ID NO: 13105 - RNA, 20 nt, synthetic construct
  source 1..20: mol_type = other RNA
acctgctcacggcagaagtt

SEQ ID NO: 13106 - RNA, 20 nt, synthetic construct
  source 1..20: mol_type = other RNA
ttctgccgtgagcaggtggg

SEQ ID NO: 13107 - RNA, 20 nt, synthetic construct
  source 1..20: mol_type = other RNA
tctgccgtgagcaggtggga

SEQ ID NO: 13108 - RNA, 20 nt, synthetic construct
  source 1..20: mol_type = other RNA
tcttccctcccacctgctca

SEQ ID NO: 13109 - RNA, 20 nt, synthetic construct
  source 1..20: mol_type = other RNA
tgggagggaagagagacgag

SEQ ID NO: 13110 - RNA, 20 nt, synthetic construct
  source 1..20: mol_type = other RNA
agagacgagaggtattccat

SEQ ID NO: 13111 - RNA, 20 nt, synthetic construct
  source 1..20: mol_type = other RNA
gaggtattccattggttgtc

SEQ ID NO: 13112 - RNA, 20 nt, synthetic construct
  source 1..20: mol_type = other RNA
aggtattccattggttgtct

SEQ ID NO: 13113 - RNA, 20 nt, synthetic construct
  source 1..20: mol_type = other RNA
ggtggcggcggcgcgccgag

SEQ ID NO: 13114 - RNA, 20 nt, synthetic construct
  source 1..20: mol_type = other RNA
gtggcggcggcgcgccgagc

SEQ ID NO: 13115 - RNA, 20 nt, synthetic construct
  source 1..20: mol_type = other RNA
ggcggcgcgccgagcgggcc

SEQ ID NO: 13116 - RNA, 20 nt, synthetic construct
  source 1..20: mol_type = other RNA
cgcgccgagcgggcccggcg

SEQ ID NO: 13117 - RNA, 20 nt, synthetic construct
  source 1..20: mol_type = other RNA
gcgccgagcgggcccggcgc

SEQ ID NO: 13118 - RNA, 20 nt, synthetic construct
  source 1..20: mol_type = other RNA
gcgggcccggcgcgggcgag

SEQ ID NO: 13119 - RNA, 20 nt, synthetic construct
  source 1..20: mol_type = other RNA
cgggcccggcgcgggcgagc

SEQ ID NO: 13120 - RNA, 20 nt, synthetic construct
  source 1..20: mol_type = other RNA
gcagcccgctcgcccgcgcc

SEQ ID NO: 13121 - RNA, 20 nt, synthetic construct
  source 1..20: mol_type = other RNA
gcgggcgagcgggctgcagc

SEQ ID NO: 13122 - RNA, 20 nt, synthetic construct
  source 1..20: mol_type = other RNA
ggcgagcgggctgcagccgg

SEQ ID NO: 13123 - RNA, 20 nt, synthetic construct
  source 1..20: mol_type = other RNA
gagcgggctgcagccggcgg

SEQ ID NO: 13124 - RNA, 20 nt, synthetic construct
  source 1..20: mol_type = other RNA
cagccggcggcggcgccagc

SEQ ID NO: 13125 - RNA, 20 nt, synthetic construct
  source 1..20: mol_type = other RNA
ggcggcggcgccagcaggta

SEQ ID NO: 13126 - RNA, 20 nt, synthetic construct
  source 1..20: mol_type = other RNA
gtacctgctggcgccgccgc

SEQ ID NO: 13127 - RNA, 20 nt, synthetic construct
  source 1..20: mol_type = other RNA
cgggtgcgggccgtacctgc

SEQ ID NO: 13128 - RNA, 20 nt, synthetic construct
  source 1..20: mol_type = other RNA
gcccgcacccgccgccgccc

SEQ ID NO: 13129 - RNA, 20 nt, synthetic construct
  source 1..20: mol_type = other RNA
cgcacccgccgccgccccgg

SEQ ID NO: 13130 - RNA, 20 nt, synthetic construct
  source 1..20: mol_type = other RNA
gccggggcggcggcgggtgc

SEQ ID NO: 13131 - RNA, 20 nt, synthetic construct
  source 1..20: mol_type = other RNA
cgccggggcggcggcgggtg

SEQ ID NO: 13132 - RNA, 20 nt, synthetic construct
  source 1..20: mol_type = other RNA
gccgccgccccggcggcctt

SEQ ID NO: 13133 - RNA, 20 nt, synthetic construct
  source 1..20: mol_type = other RNA
ccgccgccccggcggccttt

SEQ ID NO: 13134 - RNA, 20 nt, synthetic construct
  source 1..20: mol_type = other RNA
cgccgccccggcggcctttg

SEQ ID NO: 13135 - RNA, 20 nt, synthetic construct
  source 1..20: mol_type = other RNA
gccgccccggcggcctttgg

SEQ ID NO: 13136 - RNA, 20 nt, synthetic construct
  source 1..20: mol_type = other RNA
cccaaaggccgccggggcgg

SEQ ID NO: 13137 - RNA, 20 nt, synthetic construct
  source 1..20: mol_type = other RNA
gcccccaaaggccgccgggg

SEQ ID NO: 13138 - RNA, 20 nt, synthetic construct
  source 1..20: mol_type = other RNA
gcggcctttgggggctgagc

SEQ ID NO: 13139 - RNA, 20 nt, synthetic construct
  source 1..20: mol_type = other RNA
ctcagcccccaaaggccgcc

SEQ ID NO: 13140 - RNA, 20 nt, synthetic construct
  source 1..20: mol_type = other RNA
gctcagcccccaaaggccgc

SEQ ID NO: 13141 - RNA, 20 nt, synthetic construct
  source 1..20: mol_type = other RNA
ttgggggctgagccggagcc

SEQ ID NO: 13142 - RNA, 20 nt, synthetic construct
  source 1..20: mol_type = other RNA
ggctccggctcagcccccaa

SEQ ID NO: 13143 - RNA, 20 nt, synthetic construct
  source 1..20: mol_type = other RNA
tttgcaatcgcgccgggctc

SEQ ID NO: 13144 - RNA, 20 nt, synthetic construct
  source 1..20: mol_type = other RNA
gaaaactttgcaatcgcgcc

SEQ ID NO: 13145 - RNA, 20 nt, synthetic construct
  source 1..20: mol_type = other RNA
cgaaaactttgcaatcgcgc

SEQ ID NO: 13146 - RNA, 20 nt, synthetic construct
  source 1..20: mol_type = other RNA
gattgcaaagttttcgtgcg

SEQ ID NO: 13147 - RNA, 20 nt, synthetic construct
  source 1..20: mol_type = other RNA
gttttcgtgcgcggcccctc

SEQ ID NO: 13148 - RNA, 20 nt, synthetic construct
  source 1..20: mol_type = other RNA
cgtgcgcggcccctctggcc

SEQ ID NO: 13149 - RNA, 20 nt, synthetic construct
  source 1..20: mol_type = other RNA
gcccctctggcccggagttg

SEQ ID NO: 13150 - RNA, 20 nt, synthetic construct
  source 1..20: mol_type = other RNA
gccgcaactccgggccagag

SEQ ID NO: 13151 - RNA, 20 nt, synthetic construct
  source 1..20: mol_type = other RNA
agccgcaactccgggccaga

SEQ ID NO: 13152 - RNA, 20 nt, synthetic construct
  source 1..20: mol_type = other RNA
cagccgcaactccgggccag

SEQ ID NO: 13153 - RNA, 20 nt, synthetic construct
  source 1..20: mol_type = other RNA
cgcgtctcagccgcaactcc

SEQ ID NO: 13154 - RNA, 20 nt, synthetic construct
  source 1..20: mol_type = other RNA
gcgcgtctcagccgcaactc

SEQ ID NO: 13155 - RNA, 20 nt, synthetic construct
  source 1..20: mol_type = other RNA
gagacgcgcgccgcgcgagc

SEQ ID NO: 13156 - RNA, 20 nt, synthetic construct
  source 1..20: mol_type = other RNA
agacgcgcgccgcgcgagcc

SEQ ID NO: 13157 - RNA, 20 nt, synthetic construct
  source 1..20: mol_type = other RNA
gacgcgcgccgcgcgagccg

SEQ ID NO: 13158 - RNA, 20 nt, synthetic construct
  source 1..20: mol_type = other RNA
acgcgcgccgcgcgagccgg

SEQ ID NO: 13159 - RNA, 20 nt, synthetic construct
  source 1..20: mol_type = other RNA
gccgcgcgagccgggggact

SEQ ID NO: 13160 - RNA, 20 nt, synthetic construct
  source 1..20: mol_type = other RNA
cgagccgggggactcggcga

SEQ ID NO: 13161 - RNA, 20 nt, synthetic construct
  source 1..20: mol_type = other RNA
gagccgggggactcggcgac

SEQ ID NO: 13162 - RNA, 20 nt, synthetic construct
  source 1..20: mol_type = other RNA
agccgggggactcggcgacg

SEQ ID NO: 13163 - RNA, 20 nt, synthetic construct
  source 1..20: mol_type = other RNA
cgggggactcggcgacgggg

SEQ ID NO: 13164 - RNA, 20 nt, synthetic construct
  source 1..20: mol_type = other RNA
gggggactcggcgacggggc

SEQ ID NO: 13165 - RNA, 20 nt, synthetic construct
  source 1..20: mol_type = other RNA
ggggactcggcgacggggcg

SEQ ID NO: 13166 - RNA, 20 nt, synthetic construct
  source 1..20: mol_type = other RNA
cgccccgtcgccgagtcccc

SEQ ID NO: 13167 - RNA, 20 nt, synthetic construct
  source 1..20: mol_type = other RNA
actcggcgacggggcgggga

SEQ ID NO: 13168 - RNA, 20 nt, synthetic construct
  source 1..20: mol_type = other RNA
ctcggcgacggggcggggac

SEQ ID NO: 13169 - RNA, 20 nt, synthetic construct
  source 1..20: mol_type = other RNA
cgcagagcgggacacggaga

SEQ ID NO: 13170 - RNA, 20 nt, synthetic construct
  source 1..20: mol_type = other RNA
gcgcagagcgggacacggag

SEQ ID NO: 13171 - RNA, 20 nt, synthetic construct
  source 1..20: mol_type = other RNA
gaagggcgcagagcgggaca

SEQ ID NO: 13172 - RNA, 20 nt, synthetic construct
  source 1..20: mol_type = other RNA
cgcgcagaagggcgcagagc

SEQ ID NO: 13173 - RNA, 20 nt, synthetic construct
  source 1..20: mol_type = other RNA
gcgcgcagaagggcgcagag

SEQ ID NO: 13174 - RNA, 20 nt, synthetic construct
  source 1..20: mol_type = other RNA
agggagcggggcgcgcagaa

SEQ ID NO: 13175 - RNA, 20 nt, synthetic construct
  source 1..20: mol_type = other RNA
cagggagcggggcgcgcaga

SEQ ID NO: 13176 - RNA, 20 nt, synthetic construct
  source 1..20: mol_type = other RNA
gcgcgccccgctccctgtac

SEQ ID NO: 13177 - RNA, 20 nt, synthetic construct
  source 1..20: mol_type = other RNA
ctgctccggtacagggagcg

SEQ ID NO: 13178 - RNA, 20 nt, synthetic construct
  source 1..20: mol_type = other RNA
gctgctccggtacagggagc

SEQ ID NO: 13179 - RNA, 20 nt, synthetic construct
  source 1..20: mol_type = other RNA
cgctgctccggtacagggag

SEQ ID NO: 13180 - RNA, 20 nt, synthetic construct
  source 1..20: mol_type = other RNA
cctgtaccggagcagcgatc

SEQ ID NO: 13181 - RNA, 20 nt, synthetic construct
  source 1..20: mol_type = other RNA
ctgtaccggagcagcgatcc

SEQ ID NO: 13182 - RNA, 20 nt, synthetic construct
  source 1..20: mol_type = other RNA
taccggagcagcgatccggg

SEQ ID NO: 13183 - RNA, 20 nt, synthetic construct
  source 1..20: mol_type = other RNA
ccggatcgctgctccggtac

SEQ ID NO: 13184 - RNA, 20 nt, synthetic construct
  source 1..20: mol_type = other RNA
cggagcagcgatccgggagg

SEQ ID NO: 13185 - RNA, 20 nt, synthetic construct
  source 1..20: mol_type = other RNA
cgcctcccggatcgctgctc

SEQ ID NO: 13186 - RNA, 20 nt, synthetic construct
  source 1..20: mol_type = other RNA
cgatccgggaggcggccgag

SEQ ID NO: 13187 - RNA, 20 nt, synthetic construct
  source 1..20: mol_type = other RNA
aggcggccgagaggtgcgcg

SEQ ID NO: 13188 - RNA, 20 nt, synthetic construct
  source 1..20: mol_type = other RNA
ggcggccgagaggtgcgcgc

SEQ ID NO: 13189 - RNA, 20 nt, synthetic construct
  source 1..20: mol_type = other RNA
gcggccgagaggtgcgcgcg

SEQ ID NO: 13190 - RNA, 20 nt, synthetic construct
  source 1..20: mol_type = other RNA
aggtgcgcgcggggccgagc

SEQ ID NO: 13191 - RNA, 20 nt, synthetic construct
  source 1..20: mol_type = other RNA
gcgcggggccgagccggctg

SEQ ID NO: 13192 - RNA, 20 nt, synthetic construct
  source 1..20: mol_type = other RNA
cgcggggccgagccggctgc

SEQ ID NO: 13193 - RNA, 20 nt, synthetic construct
  source 1..20: mol_type = other RNA
gcggggccgagccggctgcg

SEQ ID NO: 13194 - RNA, 20 nt, synthetic construct
  source 1..20: mol_type = other RNA
ggccgagccggctgcggggc

SEQ ID NO: 13195 - RNA, 20 nt, synthetic construct
  source 1..20: mol_type = other RNA
gacctgccccgcagccggct

SEQ ID NO: 13196 - RNA, 20 nt, synthetic construct
  source 1..20: mol_type = other RNA
ggctgcggggcaggtcgagc

SEQ ID NO: 13197 - RNA, 20 nt, synthetic construct
  source 1..20: mol_type = other RNA
gctgcggggcaggtcgagca

SEQ ID NO: 13198 - RNA, 20 nt, synthetic construct
  source 1..20: mol_type = other RNA
tgctcgacctgccccgcagc

SEQ ID NO: 13199 - RNA, 20 nt, synthetic construct
  source 1..20: mol_type = other RNA
tttggggtgacgcacgctgg

SEQ ID NO: 13200 - RNA, 20 nt, synthetic construct
  source 1..20: mol_type = other RNA
gtgcgtcaccccaaagtttg

SEQ ID NO: 13201 - RNA, 20 nt, synthetic construct
  source 1..20: mol_type = other RNA
tgcgtcaccccaaagtttgc

SEQ ID NO: 13202 - RNA, 20 nt, synthetic construct
  source 1..20: mol_type = other RNA
gcgtcaccccaaagtttgcg

SEQ ID NO: 13203 - RNA, 20 nt, synthetic construct
  source 1..20: mol_type = other RNA
tcaccccaaagtttgcgggg

SEQ ID NO: 13204 - RNA, 20 nt, synthetic construct
  source 1..20: mol_type = other RNA
cccaaagtttgcggggtggc

SEQ ID NO: 13205 - RNA, 20 nt, synthetic construct
  source 1..20: mol_type = other RNA
ccaaagtttgcggggtggca

SEQ ID NO: 13206 - RNA, 20 nt, synthetic construct
  source 1..20: mol_type = other RNA
ctgccaccccgcaaactttg

SEQ ID NO: 13207 - RNA, 20 nt, synthetic construct
  source 1..20: mol_type = other RNA
cctgccaccccgcaaacttt

SEQ ID NO: 13208 - RNA, 20 nt, synthetic construct
  source 1..20: mol_type = other RNA
ccctgccaccccgcaaactt

SEQ ID NO: 13209 - RNA, 20 nt, synthetic construct
  source 1..20: mol_type = other RNA
gggtggcagggcgcgcgctc

SEQ ID NO: 13210 - RNA, 20 nt, synthetic construct
  source 1..20: mol_type = other RNA
gctctggccacccgccgctc

SEQ ID NO: 13211 - RNA, 20 nt, synthetic construct
  source 1..20: mol_type = other RNA
ctctggccacccgccgctct

SEQ ID NO: 13212 - RNA, 20 nt, synthetic construct
  source 1..20: mol_type = other RNA
tggccacccgccgctctggg

SEQ ID NO: 13213 - RNA, 20 nt, synthetic construct
  source 1..20: mol_type = other RNA
ccgccgctctgggcggcagc

SEQ ID NO: 13214 - RNA, 20 nt, synthetic construct
  source 1..20: mol_type = other RNA
ctgccgcccagagcggcggg

SEQ ID NO: 13215 - RNA, 20 nt, synthetic construct
  source 1..20: mol_type = other RNA
ccgctctgggcggcagctgg

SEQ ID NO: 13216 - RNA, 20 nt, synthetic construct
  source 1..20: mol_type = other RNA
cagctgccgcccagagcggc

SEQ ID NO: 13217 - RNA, 20 nt, synthetic construct
  source 1..20: mol_type = other RNA
ccagctgccgcccagagcgg

SEQ ID NO: 13218 - RNA, 20 nt, synthetic construct
  source 1..20: mol_type = other RNA
ccaccagctgccgcccagag

SEQ ID NO: 13219 - RNA, 20 nt, synthetic construct
  source 1..20: mol_type = other RNA
cggcagctggtggcaacgca

SEQ ID NO: 13220 - RNA, 20 nt, synthetic construct
  source 1..20: mol_type = other RNA
ggcagctggtggcaacgcaa

SEQ ID NO: 13221 - RNA, 20 nt, synthetic construct
  source 1..20: mol_type = other RNA
ctggtggcaacgcaagggcg

SEQ ID NO: 13222 - RNA, 20 nt, synthetic construct
  source 1..20: mol_type = other RNA
gtggcaacgcaagggcgcgg

SEQ ID NO: 13223 - RNA, 20 nt, synthetic construct
  source 1..20: mol_type = other RNA
tggcaacgcaagggcgcggc

SEQ ID NO: 13224 - RNA, 20 nt, synthetic construct
  source 1..20: mol_type = other RNA
ggcaacgcaagggcgcggcg

SEQ ID NO: 13225 - RNA, 20 nt, synthetic construct
  source 1..20: mol_type = other RNA
gcaacgcaagggcgcggcgg

SEQ ID NO: 13226 - RNA, 20 nt, synthetic construct
  source 1..20: mol_type = other RNA
acgcaagggcgcggcggggg

SEQ ID NO: 13227 - RNA, 20 nt, synthetic construct
  source 1..20: mol_type = other RNA
aagggcgcggcgggggcggc

SEQ ID NO: 13228 - RNA, 20 nt, synthetic construct
  source 1..20: mol_type = other RNA
cgcggcgggggcggccggcg

SEQ ID NO: 13229 - RNA, 20 nt, synthetic construct
  source 1..20: mol_type = other RNA
ggcgggggcggccggcgcgg

SEQ ID NO: 13230 - RNA, 20 nt, synthetic construct
  source 1..20: mol_type = other RNA
gcgggggcggccggcgcgga

SEQ ID NO: 13231 - RNA, 20 nt, synthetic construct
  source 1..20: mol_type = other RNA
cgggggcggccggcgcggag

SEQ ID NO: 13232 - RNA, 20 nt, synthetic construct
  source 1..20: mol_type = other RNA
gggggcggccggcgcggagg

SEQ ID NO: 13233 - RNA, 20 nt, synthetic construct
  source 1..20: mol_type = other RNA
cggccggcgcggagggggcc

SEQ ID NO: 13234 - RNA, 20 nt, synthetic construct
  source 1..20: mol_type = other RNA
ggcgcggagggggccaggta

SEQ ID NO: 13235 - RNA, 20 nt, synthetic construct
  source 1..20: mol_type = other RNA
gcgcggagggggccaggtac

SEQ ID NO: 13236 - RNA, 20 nt, synthetic construct
  source 1..20: mol_type = other RNA
cgcggagggggccaggtacg

SEQ ID NO: 13237 - RNA, 20 nt, synthetic construct
  source 1..20: mol_type = other RNA
gtacctggccccctccgcgc

SEQ ID NO: 13238 - RNA, 20 nt, synthetic construct
  source 1..20: mol_type = other RNA
ggggccaggtacggggcccg

SEQ ID NO: 13239 - RNA, 20 nt, synthetic construct
  source 1..20: mol_type = other RNA
gggccaggtacggggcccgc

SEQ ID NO: 13240 - RNA, 20 nt, synthetic construct
  source 1..20: mol_type = other RNA
ccaggtacggggcccgcggg

SEQ ID NO: 13241 - RNA, 20 nt, synthetic construct
  source 1..20: mol_type = other RNA
ccgcccgcgggccccgtacc

SEQ ID NO: 13242 - RNA, 20 nt, synthetic construct
  source 1..20: mol_type = other RNA
gtgtcctgctaacttggccg

SEQ ID NO: 13243 - RNA, 20 nt, synthetic construct
  source 1..20: mol_type = other RNA
gttagagtgtcctgctaact

SEQ ID NO: 13244 - RNA, 20 nt, synthetic construct
  source 1..20: mol_type = other RNA
cactctaacaagtgactgcg

SEQ ID NO: 13245 - RNA, 20 nt, synthetic construct
  source 1..20: mol_type = other RNA
gtgactgcgcggcccgcgcc

SEQ ID NO: 13246 - RNA, 20 nt, synthetic construct
  source 1..20: mol_type = other RNA
tgactgcgcggcccgcgccc

SEQ ID NO: 13247 - RNA, 20 nt, synthetic construct
  source 1..20: mol_type = other RNA
gactgcgcggcccgcgcccg

SEQ ID NO: 13248 - RNA, 20 nt, synthetic construct
  source 1..20: mol_type = other RNA
tgcgcggcccgcgcccgggg

SEQ ID NO: 13249 - RNA, 20 nt, synthetic construct
  source 1..20: mol_type = other RNA
cgcgcccggggcggtgactg

SEQ ID NO: 13250 - RNA, 20 nt, synthetic construct
  source 1..20: mol_type = other RNA
gcagtcaccgccccgggcgc

SEQ ID NO: 13251 - RNA, 20 nt, synthetic construct
  source 1..20: mol_type = other RNA
cgcagtcaccgccccgggcg

SEQ ID NO: 13252 - RNA, 20 nt, synthetic construct
  source 1..20: mol_type = other RNA
cttgccgcagtcaccgcccc

SEQ ID NO: 13253 - RNA, 20 nt, synthetic construct
  source 1..20: mol_type = other RNA
gcttgccgcagtcaccgccc

SEQ ID NO: 13254 - RNA, 20 nt, synthetic construct
  source 1..20: mol_type = other RNA
ggtgactgcggcaagccccc

SEQ ID NO: 13255 - RNA, 20 nt, synthetic construct
  source 1..20: mol_type = other RNA
gtgactgcggcaagccccct

SEQ ID NO: 13256 - RNA, 20 nt, synthetic construct
  source 1..20: mol_type = other RNA
aagccccctgggtccccgcg

SEQ ID NO: 13257 - RNA, 20 nt, synthetic construct
  source 1..20: mol_type = other RNA
gcgccgcgcggggacccagg

SEQ ID NO: 13258 - RNA, 20 nt, synthetic construct
  source 1..20: mol_type = other RNA
tgcgccgcgcggggacccag

SEQ ID NO: 13259 - RNA, 20 nt, synthetic construct
  source 1..20: mol_type = other RNA
atgcgccgcgcggggaccca

SEQ ID NO: 13260 - RNA, 20 nt, synthetic construct
  source 1..20: mol_type = other RNA
gatgcgccgcgcggggaccc

SEQ ID NO: 13261 - RNA, 20 nt, synthetic construct
  source 1..20: mol_type = other RNA
ccgcgcggcgcatcccagcc

SEQ ID NO: 13262 - RNA, 20 nt, synthetic construct
  source 1..20: mol_type = other RNA
cgcgcggcgcatcccagcct

SEQ ID NO: 13263 - RNA, 20 nt, synthetic construct
  source 1..20: mol_type = other RNA
aggctgggatgcgccgcgcg

SEQ ID NO: 13264 - RNA, 20 nt, synthetic construct
  source 1..20: mol_type = other RNA
gcggcgcatcccagcctggg

SEQ ID NO: 13265 - RNA, 20 nt, synthetic construct
  source 1..20: mol_type = other RNA
cggcgcatcccagcctgggc

SEQ ID NO: 13266 - RNA, 20 nt, synthetic construct
  source 1..20: mol_type = other RNA
cccagcctgggcgggacgct

SEQ ID NO: 13267 - RNA, 20 nt, synthetic construct
  source 1..20: mol_type = other RNA
ccgagcgtcccgcccaggct

SEQ ID NO: 13268 - RNA, 20 nt, synthetic construct
  source 1..20: mol_type = other RNA
ctgggcgggacgctcggccg

SEQ ID NO: 13269 - RNA, 20 nt, synthetic construct
  source 1..20: mol_type = other RNA
cgcggccgagcgtcccgccc

SEQ ID NO: 13270 - RNA, 20 nt, synthetic construct
  source 1..20: mol_type = other RNA
cgggacgctcggccgcggcg

SEQ ID NO: 13271 - RNA, 20 nt, synthetic construct
  source 1..20: mol_type = other RNA
gacgctcggccgcggcgagg

SEQ ID NO: 13272 - RNA, 20 nt, synthetic construct
  source 1..20: mol_type = other RNA
acgctcggccgcggcgaggc

SEQ ID NO: 13273 - RNA, 20 nt, synthetic construct
  source 1..20: mol_type = other RNA
cgcggcgaggcgggcaagcc

SEQ ID NO: 13274 - RNA, 20 nt, synthetic construct
  source 1..20: mol_type = other RNA
gcgaggcgggcaagcctggc

SEQ ID NO: 13275 - RNA, 20 nt, synthetic construct
  source 1..20: mol_type = other RNA
cgaggcgggcaagcctggca

SEQ ID NO: 13276 - RNA, 20 nt, synthetic construct
  source 1..20: mol_type = other RNA
gggcaagcctggcagggcag

SEQ ID NO: 13277 - RNA, 20 nt, synthetic construct
  source 1..20: mol_type = other RNA
ggcaagcctggcagggcaga

SEQ ID NO: 13278 - RNA, 20 nt, synthetic construct
  source 1..20: mol_type = other RNA
tggcagggcagagggagccc

SEQ ID NO: 13279 - RNA, 20 nt, synthetic construct
  source 1..20: mol_type = other RNA
ggggctccctctgccctgcc

SEQ ID NO: 13280 - RNA, 20 nt, synthetic construct
  source 1..20: mol_type = other RNA
cagagggagccccggctccg

SEQ ID NO: 13281 - RNA, 20 nt, synthetic construct
  source 1..20: mol_type = other RNA
gaagagcaacctcggagccg

SEQ ID NO: 13282 - RNA, 20 nt, synthetic construct
  source 1..20: mol_type = other RNA
cgaagagcaacctcggagcc

SEQ ID NO: 13283 - RNA, 20 nt, synthetic construct
  source 1..20: mol_type = other RNA
gcgaagagcaacctcggagc

SEQ ID NO: 13284 - RNA, 20 nt, synthetic construct
  source 1..20: mol_type = other RNA
gaggttgctcttcgcacccg

SEQ ID NO: 13285 - RNA, 20 nt, synthetic construct
  source 1..20: mol_type = other RNA
tcgggtgcgaagagcaacct

SEQ ID NO: 13286 - RNA, 20 nt, synthetic construct
  source 1..20: mol_type = other RNA
tcgcacccgaggatcagtct

SEQ ID NO: 13287 - RNA, 20 nt, synthetic construct
  source 1..20: mol_type = other RNA
tggggccaagactgatcctc

SEQ ID NO: 13288 - RNA, 20 nt, synthetic construct
  source 1..20: mol_type = other RNA
ttggggccaagactgatcct

SEQ ID NO: 13289 - RNA, 20 nt, synthetic construct
  source 1..20: mol_type = other RNA
gatttgtgcgtcgcgctttg

SEQ ID NO: 13290 - RNA, 20 nt, synthetic construct
  source 1..20: mol_type = other RNA
ggatttgtgcgtcgcgcttt

SEQ ID NO: 13291 - RNA, 20 nt, synthetic construct
  source 1..20: mol_type = other RNA
tggatttgtgcgtcgcgctt

SEQ ID NO: 13292 - RNA, 20 nt, synthetic construct
  source 1..20: mol_type = other RNA
tcaatttgaaaacactcacg

SEQ ID NO: 13293 - RNA, 20 nt, synthetic construct
  source 1..20: mol_type = other RNA
ttccacctttctctgcaccc

SEQ ID NO: 13294 - RNA, 20 nt, synthetic construct
  source 1..20: mol_type = other RNA
cacctttctctgcaccctgg

SEQ ID NO: 13295 - RNA, 20 nt, synthetic construct
  source 1..20: mol_type = other RNA
caccagggtgcagagaaagg

SEQ ID NO: 13296 - RNA, 20 nt, synthetic construct
  source 1..20: mol_type = other RNA
ctccaccagggtgcagagaa

SEQ ID NO: 13297 - RNA, 20 nt, synthetic construct
  source 1..20: mol_type = other RNA
tgcaccctggtggagtgtga

SEQ ID NO: 13298 - RNA, 20 nt, synthetic construct
  source 1..20: mol_type = other RNA
gtggagtgtgaaggcagcag

SEQ ID NO: 13299 - RNA, 20 nt, synthetic construct
  source 1..20: mol_type = other RNA
tgctgccttcacactccacc

SEQ ID NO: 13300 - RNA, 20 nt, synthetic construct
  source 1..20: mol_type = other RNA
aaggcagcagaggaaccttt

SEQ ID NO: 13301 - RNA, 20 nt, synthetic construct
  source 1..20: mol_type = other RNA
gcagcagaggaaccttttgg

SEQ ID NO: 13302 - RNA, 20 nt, synthetic construct
  source 1..20: mol_type = other RNA
gcagaggaaccttttggagg

SEQ ID NO: 13303 - RNA, 20 nt, synthetic construct
  source 1..20: mol_type = other RNA
gaaccttttggaggaggaag

SEQ ID NO: 13304 - RNA, 20 nt, synthetic construct
  source 1..20: mol_type = other RNA
tgtcctcttcctcctccaaa

SEQ ID NO: 13305 - RNA, 20 nt, synthetic construct
  source 1..20: mol_type = other RNA
ggaggaggaagaggacacag

SEQ ID NO: 13306 - RNA, 20 nt, synthetic construct
  source 1..20: mol_type = other RNA
gacacagaggccctgtagcc

SEQ ID NO: 13307 - RNA, 20 nt, synthetic construct
  source 1..20: mol_type = other RNA
gatcttggtgcctggctaca

SEQ ID NO: 13308 - RNA, 20 nt, synthetic construct
  source 1..20: mol_type = other RNA
ggatcttggtgcctggctac

SEQ ID NO: 13309 - RNA, 20 nt, synthetic construct
  source 1..20: mol_type = other RNA
caggcaccaagatccctccc

SEQ ID NO: 13310 - RNA, 20 nt, synthetic construct
  source 1..20: mol_type = other RNA
gcaccaagatccctcccagg

SEQ ID NO: 13311 - RNA, 20 nt, synthetic construct
  source 1..20: mol_type = other RNA
ctgggagggatcttggtgcc

SEQ ID NO: 13312 - RNA, 20 nt, synthetic construct
  source 1..20: mol_type = other RNA
caagatccctcccaggtggc

SEQ ID NO: 13313 - RNA, 20 nt, synthetic construct
  source 1..20: mol_type = other RNA
aagatccctcccaggtggct

SEQ ID NO: 13314 - RNA, 20 nt, synthetic construct
  source 1..20: mol_type = other RNA
cagccacctgggagggatct

SEQ ID NO: 13315 - RNA, 20 nt, synthetic construct
  source 1..20: mol_type = other RNA
ctcccaggtggctgggtctg

SEQ ID NO: 13316 - RNA, 20 nt, synthetic construct
  source 1..20: mol_type = other RNA
tcccaggtggctgggtctga

SEQ ID NO: 13317 - RNA, 20 nt, synthetic construct
  source 1..20: mol_type = other RNA
cccaggtggctgggtctgag

SEQ ID NO: 13318 - RNA, 20 nt, synthetic construct
  source 1..20: mol_type = other RNA
tcagacccagccacctggga

SEQ ID NO: 13319 - RNA, 20 nt, synthetic construct
  source 1..20: mol_type = other RNA
ctcagacccagccacctggg

SEQ ID NO: 13320 - RNA, 20 nt, synthetic construct
  source 1..20: mol_type = other RNA
cccctcagacccagccacct

SEQ ID NO: 13321 - RNA, 20 nt, synthetic construct
  source 1..20: mol_type = other RNA
tcccctcagacccagccacc

SEQ ID NO: 13322 - RNA, 20 nt, synthetic construct
  source 1..20: mol_type = other RNA
ggggaactccgagcagccct

SEQ ID NO: 13323 - RNA, 20 nt, synthetic construct
  source 1..20: mol_type = other RNA
tttgaggacctagggctgct

SEQ ID NO: 13324 - RNA, 20 nt, synthetic construct
  source 1..20: mol_type = other RNA
agccctaggtcctcaaagtc

SEQ ID NO: 13325 - RNA, 20 nt, synthetic construct
  source 1..20: mol_type = other RNA
atccagactttgaggaccta

SEQ ID NO: 13326 - RNA, 20 nt, synthetic construct
  source 1..20: mol_type = other RNA
aatccagactttgaggacct

SEQ ID NO: 13327 - RNA, 20 nt, synthetic construct
  source 1..20: mol_type = other RNA
cctcaaagtctggatttgtg

SEQ ID NO: 13328 - RNA, 20 nt, synthetic construct
  source 1..20: mol_type = other RNA
ccacacaaatccagactttg

SEQ ID NO: 13329 - RNA, 20 nt, synthetic construct
  source 1..20: mol_type = other RNA
agtctggatttgtgtggaaa

SEQ ID NO: 13330 - RNA, 20 nt, synthetic construct
  source 1..20: mol_type = other RNA
tggaaaaggcagctctcact

SEQ ID NO: 13331 - RNA, 20 nt, synthetic construct
  source 1..20: mol_type = other RNA
aggcagctctcacttggcct

SEQ ID NO: 13332 - RNA, 20 nt, synthetic construct
  source 1..20: mol_type = other RNA
gctctcacttggccttggcg

SEQ ID NO: 13333 - RNA, 20 nt, synthetic construct
  source 1..20: mol_type = other RNA
acttggccttggcgaggcct

SEQ ID NO: 13334 - RNA, 20 nt, synthetic construct
  source 1..20: mol_type = other RNA
ggccttggcgaggcctcggt

SEQ ID NO: 13335 - RNA, 20 nt, synthetic construct
  source 1..20: mol_type = other RNA
ttggcgaggcctcggttggt

SEQ ID NO: 13336 - RNA, 20 nt, synthetic construct
  source 1..20: mol_type = other RNA
aaccaaccgaggcctcgcca

SEQ ID NO: 13337 - RNA, 20 nt, synthetic construct
  source 1..20: mol_type = other RNA
gttggttggtgagtgccaca

SEQ ID NO: 13338 - RNA, 20 nt, synthetic construct
  source 1..20: mol_type = other RNA
gggagaagtgacgctcacta

SEQ ID NO: 13339 - RNA, 20 nt, synthetic construct
  source 1..20: mol_type = other RNA
ttctccccgtgtaagagtgc

SEQ ID NO: 13340 - RNA, 20 nt, synthetic construct
  source 1..20: mol_type = other RNA
ccgtgtaagagtgctggtga

SEQ ID NO: 13341 - RNA, 20 nt, synthetic construct
  source 1..20: mol_type = other RNA
ttcaccagcactcttacacg

SEQ ID NO: 13342 - RNA, 20 nt, synthetic construct
  source 1..20: mol_type = other RNA
cttcaccagcactcttacac

SEQ ID NO: 13343 - RNA, 20 nt, synthetic construct
  source 1..20: mol_type = other RNA
ccttcaccagcactcttaca

SEQ ID NO: 13344 - RNA, 20 nt, synthetic construct
  source 1..20: mol_type = other RNA
aagagtgctggtgaaggctg

SEQ ID NO: 13345 - RNA, 20 nt, synthetic construct
  source 1..20: mol_type = other RNA
tgctggtgaaggctgaggca

SEQ ID NO: 13346 - RNA, 20 nt, synthetic construct
  source 1..20: mol_type = other RNA
gctggtgaaggctgaggcaa

SEQ ID NO: 13347 - RNA, 20 nt, synthetic construct
  source 1..20: mol_type = other RNA
gcaagggcccagaaagattg

SEQ ID NO: 13348 - RNA, 20 nt, synthetic construct
  source 1..20: mol_type = other RNA
caagggcccagaaagattga

SEQ ID NO: 13349 - RNA, 20 nt, synthetic construct
  source 1..20: mol_type = other RNA
aaagattgagggacaaagac

SEQ ID NO: 13350 - RNA, 20 nt, synthetic construct
  source 1..20: mol_type = other RNA
tctttgtccctcaatctttc

SEQ ID NO: 13351 - RNA, 20 nt, synthetic construct
  source 1..20: mol_type = other RNA
gcccgcattgcccatctgcc

SEQ ID NO: 13352 - RNA, 20 nt, synthetic construct
  source 1..20: mol_type = other RNA
gcattgcccatctgccaggc

SEQ ID NO: 13353 - RNA, 20 nt, synthetic construct
  source 1..20: mol_type = other RNA
gcctggcagatgggcaatgc

SEQ ID NO: 13354 - RNA, 20 nt, synthetic construct
  source 1..20: mol_type = other RNA
ttgcccatctgccaggctgg

SEQ ID NO: 13355 - RNA, 20 nt, synthetic construct
  source 1..20: mol_type = other RNA
acacctccagcctggcagat

SEQ ID NO: 13356 - RNA, 20 nt, synthetic construct
  source 1..20: mol_type = other RNA
tacacctccagcctggcaga

SEQ ID NO: 13357 - RNA, 20 nt, synthetic construct
  source 1..20: mol_type = other RNA
taatgaatacacctccagcc

SEQ ID NO: 13358 - RNA, 20 nt, synthetic construct
  source 1..20: mol_type = other RNA
ggaggtgtattcattattga

SEQ ID NO: 13359 - RNA, 20 nt, synthetic construct
  source 1..20: mol_type = other RNA
ggtgtattcattattgatgg

SEQ ID NO: 13360 - RNA, 20 nt, synthetic construct
  source 1..20: mol_type = other RNA
ctcagatatgcagccctgcc

SEQ ID NO: 13361 - RNA, 20 nt, synthetic construct
  source 1..20: mol_type = other RNA
tcagatatgcagccctgcct

SEQ ID NO: 13362 - RNA, 20 nt, synthetic construct
  source 1..20: mol_type = other RNA
atgtctcatttacccaggca

SEQ ID NO: 13363 - RNA, 20 nt, synthetic construct
  source 1..20: mol_type = other RNA
aatgtctcatttacccaggc

SEQ ID NO: 13364 - RNA, 20 nt, synthetic construct
  source 1..20: mol_type = other RNA
gaagaatgtctcatttaccc

SEQ ID NO: 13365 - RNA, 20 nt, synthetic construct
  source 1..20: mol_type = other RNA
ttatctgagaaagagaggaa

SEQ ID NO: 13366 - RNA, 20 nt, synthetic construct
  source 1..20: mol_type = other RNA
gttatctgagaaagagagga

SEQ ID NO: 13367 - RNA, 20 nt, synthetic construct
  source 1..20: mol_type = other RNA
tctctttctcagataacctg

SEQ ID NO: 13368 - RNA, 20 nt, synthetic construct
  source 1..20: mol_type = other RNA
tcaggttatctgagaaagag

SEQ ID NO: 13369 - RNA, 20 nt, synthetic construct
  source 1..20: mol_type = other RNA
ctcagataacctgaggacca

SEQ ID NO: 13370 - RNA, 20 nt, synthetic construct
  source 1..20: mol_type = other RNA
gaggaccatggatgctgatg

SEQ ID NO: 13371 - RNA, 20 nt, synthetic construct
  source 1..20: mol_type = other RNA
aggaccatggatgctgatga

SEQ ID NO: 13372 - RNA, 20 nt, synthetic construct
  source 1..20: mol_type = other RNA
catcagcatccatggtcctc

SEQ ID NO: 13373 - RNA, 20 nt, synthetic construct
  source 1..20: mol_type = other RNA
ttgaccctcatcagcatcca

SEQ ID NO: 13374 - RNA, 20 nt, synthetic construct
  source 1..20: mol_type = other RNA
caagacatgtcccaagtttc

SEQ ID NO: 13375 - RNA, 20 nt, synthetic construct
  source 1..20: mol_type = other RNA
taaggtctcacctgaaactt

SEQ ID NO: 13376 - RNA, 20 nt, synthetic construct
  source 1..20: mol_type = other RNA
ataaggtctcacctgaaact

SEQ ID NO: 13377 - RNA, 20 nt, synthetic construct
  source 1..20: mol_type = other RNA
gaccttatgagatagctgtg

SEQ ID NO: 13378 - RNA, 20 nt, synthetic construct
  source 1..20: mol_type = other RNA
cacacttcttctttctcatc

SEQ ID NO: 13379 - RNA, 20 nt, synthetic construct
  source 1..20: mol_type = other RNA
acacttcttctttctcatca

SEQ ID NO: 13380 - RNA, 20 nt, synthetic construct
  source 1..20: mol_type = other RNA
ttcttctttctcatcaggga

SEQ ID NO: 13381 - RNA, 20 nt, synthetic construct
  source 1..20: mol_type = other RNA
ctggagtatcgcttacaggg

SEQ ID NO: 13382 - RNA, 20 nt, synthetic construct
  source 1..20: mol_type = other RNA
tgtaagcgatactccagatg

SEQ ID NO: 13383 - RNA, 20 nt, synthetic construct
  source 1..20: mol_type = other RNA
gtaagcgatactccagatga

SEQ ID NO: 13384 - RNA, 20 nt, synthetic construct
  source 1..20: mol_type = other RNA
catctggagtatcgcttaca

SEQ ID NO: 13385 - RNA, 20 nt, synthetic construct
  source 1..20: mol_type = other RNA
tcatctggagtatcgcttac

SEQ ID NO: 13386 - RNA, 20 nt, synthetic construct
  source 1..20: mol_type = other RNA
atgggctcatcgccctcatc

SEQ ID NO: 13387 - RNA, 20 nt, synthetic construct
  source 1..20: mol_type = other RNA
tgagcccatgccgatccccg

SEQ ID NO: 13388 - RNA, 20 nt, synthetic construct
  source 1..20: mol_type = other RNA
aggtcctcggggatcggcat

SEQ ID NO: 13389 - RNA, 20 nt, synthetic construct
  source 1..20: mol_type = other RNA
gaggtcctcggggatcggca

SEQ ID NO: 13390 - RNA, 20 nt, synthetic construct
  source 1..20: mol_type = other RNA
gtggagaggtcctcggggat

SEQ ID NO: 13391 - RNA, 20 nt, synthetic construct
  source 1..20: mol_type = other RNA
cgaggacctctccaccacct

SEQ ID NO: 13392 - RNA, 20 nt, synthetic construct
  source 1..20: mol_type = other RNA
gaggacctctccaccacctc

SEQ ID NO: 13393 - RNA, 20 nt, synthetic construct
  source 1..20: mol_type = other RNA
aggtggtggagaggtcctcg

SEQ ID NO: 13394 - RNA, 20 nt, synthetic construct
  source 1..20: mol_type = other RNA
gaggtggtggagaggtcctc

SEQ ID NO: 13395 - RNA, 20 nt, synthetic construct
  source 1..20: mol_type = other RNA
gacctctccaccacctcggg

SEQ ID NO: 13396 - RNA, 20 nt, synthetic construct
  source 1..20: mol_type = other RNA
gtcctcccgaggtggtggag

SEQ ID NO: 13397 - RNA, 20 nt, synthetic construct
  source 1..20: mol_type = other RNA
ttgctgtcctcccgaggtgg

SEQ ID NO: 13398 - RNA, 20 nt, synthetic construct
  source 1..20: mol_type = other RNA
gctttgctgtcctcccgagg

SEQ ID NO: 13399 - RNA, 20 nt, synthetic construct
  source 1..20: mol_type = other RNA
ggagctttgctgtcctcccg

SEQ ID NO: 13400 - RNA, 20 nt, synthetic construct
  source 1..20: mol_type = other RNA
ctccaagagtgacagagtcg

SEQ ID NO: 13401 - RNA, 20 nt, synthetic construct
  source 1..20: mol_type = other RNA
tccaagagtgacagagtcgt

SEQ ID NO: 13402 - RNA, 20 nt, synthetic construct
  source 1..20: mol_type = other RNA
acccacgactctgtcactct

SEQ ID NO: 13403 - RNA, 20 nt, synthetic construct
  source 1..20: mol_type = other RNA
gtgacagagtcgtgggtaag

SEQ ID NO: 13404 - RNA, 20 nt, synthetic construct
  source 1..20: mol_type = other RNA
tgacagagtcgtgggtaagt

SEQ ID NO: 13405 - RNA, 20 nt, synthetic construct
  source 1..20: mol_type = other RNA
gtgggtaagtgggtcaccag

SEQ ID NO: 13406 - RNA, 20 nt, synthetic construct
  source 1..20: mol_type = other RNA
gtttcagaatgagaccaaag

SEQ ID NO: 13407 - RNA, 20 nt, synthetic construct
  source 1..20: mol_type = other RNA
ggttgaaaatgtcaccgctt

SEQ ID NO: 13408 - RNA, 20 nt, synthetic construct
  source 1..20: mol_type = other RNA
ggtgacattttcaacctctt

SEQ ID NO: 13409 - RNA, 20 nt, synthetic construct
  source 1..20: mol_type = other RNA
aaactgaagagagaccgaag

SEQ ID NO: 13410 - RNA, 20 nt, synthetic construct
  source 1..20: mol_type = other RNA
gttgtgcttctatcacttaa

SEQ ID NO: 13411 - RNA, 20 nt, synthetic construct
  source 1..20: mol_type = other RNA
agtatttgatttcaacttgg

SEQ ID NO: 13412 - RNA, 20 nt, synthetic construct
  source 1..20: mol_type = other RNA
attagtatttgatttcaact

SEQ ID NO: 13413 - RNA, 20 nt, synthetic construct
  source 1..20: mol_type = other RNA
atgtgtttttattatttatt

SEQ ID NO: 13414 - RNA, 20 nt, synthetic construct
  source 1..20: mol_type = other RNA
attaggaaatttattttact

SEQ ID NO: 13415 - RNA, 20 nt, synthetic construct
  source 1..20: mol_type = other RNA
ccctcagccatgacatatca

SEQ ID NO: 13416 - RNA, 20 nt, synthetic construct
  source 1..20: mol_type = other RNA
ccatgatatgtcatggctga

SEQ ID NO: 13417 - RNA, 20 nt, synthetic construct
  source 1..20: mol_type = other RNA
gccatgatatgtcatggctg

SEQ ID NO: 13418 - RNA, 20 nt, synthetic construct
  source 1..20: mol_type = other RNA
gattatgccatgatatgtca

SEQ ID NO: 13419 - RNA, 20 nt, synthetic construct
  source 1..20: mol_type = other RNA
aggataagatatacaaattt

SEQ ID NO: 13420 - RNA, 20 nt, synthetic construct
  source 1..20: mol_type = other RNA
gtatatcttatccttgcata

SEQ ID NO: 13421 - RNA, 20 nt, synthetic construct
  source 1..20: mol_type = other RNA
agaaagtcttaccttatgca

SEQ ID NO: 13422 - RNA, 20 nt, synthetic construct
  source 1..20: mol_type = other RNA
attcttaaaatatgtaagag

SEQ ID NO: 13423 - RNA, 20 nt, synthetic construct
  source 1..20: mol_type = other RNA
tgaaatattgctcataagcc

SEQ ID NO: 13424 - RNA, 20 nt, synthetic construct
  source 1..20: mol_type = other RNA
attgctcataagccaggtga

SEQ ID NO: 13425 - RNA, 20 nt, synthetic construct
  source 1..20: mol_type = other RNA
aggcgtggacagccatcacc

SEQ ID NO: 13426 - RNA, 20 nt, synthetic construct
  source 1..20: mol_type = other RNA
taagcaggggaaaagaggcg

SEQ ID NO: 13427 - RNA, 20 nt, synthetic construct
  source 1..20: mol_type = other RNA
aagggtaagcaggggaaaag

SEQ ID NO: 13428 - RNA, 20 nt, synthetic construct
  source 1..20: mol_type = other RNA
atctaagcaagggtaagcag

SEQ ID NO: 13429 - RNA, 20 nt, synthetic construct
  source 1..20: mol_type = other RNA
gatctaagcaagggtaagca

SEQ ID NO: 13430 - RNA, 20 nt, synthetic construct
  source 1..20: mol_type = other RNA
ttacccttgcttagatctta

SEQ ID NO: 13431 - RNA, 20 nt, synthetic construct
  source 1..20: mol_type = other RNA
ctaccataagatctaagcaa

SEQ ID NO: 13432 - RNA, 20 nt, synthetic construct
  source 1..20: mol_type = other RNA
tctaccataagatctaagca

SEQ ID NO: 13433 - RNA, 20 nt, synthetic construct
  source 1..20: mol_type = other RNA
aaagacatgaaagaaagagc

SEQ ID NO: 13434 - RNA, 20 nt, synthetic construct
  source 1..20: mol_type = other RNA
gaaagagctggagaagcctg

SEQ ID NO: 13435 - RNA, 20 nt, synthetic construct
  source 1..20: mol_type = other RNA
aaagagctggagaagcctga

SEQ ID NO: 13436 - RNA, 20 nt, synthetic construct
  source 1..20: mol_type = other RNA
aagagctggagaagcctgag

SEQ ID NO: 13437 - RNA, 20 nt, synthetic construct
  source 1..20: mol_type = other RNA
ctgaggggctgcccagtgag

SEQ ID NO: 13438 - RNA, 20 nt, synthetic construct
  source 1..20: mol_type = other RNA
cactcactgggcagcccctc

SEQ ID NO: 13439 - RNA, 20 nt, synthetic construct
  source 1..20: mol_type = other RNA
tgcccagtgagtggtctgct

SEQ ID NO: 13440 - RNA, 20 nt, synthetic construct
  source 1..20: mol_type = other RNA
atcctagcagaccactcact

SEQ ID NO: 13441 - RNA, 20 nt, synthetic construct
  source 1..20: mol_type = other RNA
catcctagcagaccactcac

SEQ ID NO: 13442 - RNA, 20 nt, synthetic construct
  source 1..20: mol_type = other RNA
aggatgctgtgccacagccc

SEQ ID NO: 13443 - RNA, 20 nt, synthetic construct
  source 1..20: mol_type = other RNA
ctgtgccacagcccaggcac

SEQ ID NO: 13444 - RNA, 20 nt, synthetic construct
  source 1..20: mol_type = other RNA
tgccacagcccaggcacagg

SEQ ID NO: 13445 - RNA, 20 nt, synthetic construct
  source 1..20: mol_type = other RNA
acagcccaggcacaggaggc

SEQ ID NO: 13446 - RNA, 20 nt, synthetic construct
  source 1..20: mol_type = other RNA
cagcccaggcacaggaggca

SEQ ID NO: 13447 - RNA, 20 nt, synthetic construct
  source 1..20: mol_type = other RNA
tgcctcctgtgcctgggctg

SEQ ID NO: 13448 - RNA, 20 nt, synthetic construct
  source 1..20: mol_type = other RNA
tctccctgcctcctgtgcct

SEQ ID NO: 13449 - RNA, 20 nt, synthetic construct
  source 1..20: mol_type = other RNA
ctctccctgcctcctgtgcc

SEQ ID NO: 13450 - RNA, 20 nt, synthetic construct
  source 1..20: mol_type = other RNA
acaggaggcagggagagcaa

SEQ ID NO: 13451 - RNA, 20 nt, synthetic construct
  source 1..20: mol_type = other RNA
caggaggcagggagagcaat

SEQ ID NO: 13452 - RNA, 20 nt, synthetic construct
  source 1..20: mol_type = other RNA
aggaggcagggagagcaatg

SEQ ID NO: 13453 - RNA, 20 nt, synthetic construct
  source 1..20: mol_type = other RNA
tgaatgttggtggaagggaa

SEQ ID NO: 13454 - RNA, 20 nt, synthetic construct
  source 1..20: mol_type = other RNA
ctgaatgttggtggaaggga

SEQ ID NO: 13455 - RNA, 20 nt, synthetic construct
  source 1..20: mol_type = other RNA
tctgctgaatgttggtggaa

SEQ ID NO: 13456 - RNA, 20 nt, synthetic construct
  source 1..20: mol_type = other RNA
ttctgctgaatgttggtgga

SEQ ID NO: 13457 - RNA, 20 nt, synthetic construct
  source 1..20: mol_type = other RNA
caaattctgctgaatgttgg

SEQ ID NO: 13458 - RNA, 20 nt, synthetic construct
  source 1..20: mol_type = other RNA
ctgcaaattctgctgaatgt

SEQ ID NO: 13459 - RNA, 20 nt, synthetic construct
  source 1..20: mol_type = other RNA
tccatgtttccaaagcttcc

SEQ ID NO: 13460 - RNA, 20 nt, synthetic construct
  source 1..20: mol_type = other RNA
ccatgtttccaaagcttcca

SEQ ID NO: 13461 - RNA, 20 nt, synthetic construct
  source 1..20: mol_type = other RNA
ccctggaagctttggaaaca

SEQ ID NO: 13462 - RNA, 20 nt, synthetic construct
  source 1..20: mol_type = other RNA
tgcaagtgccctggaagctt

SEQ ID NO: 13463 - RNA, 20 nt, synthetic construct
  source 1..20: mol_type = other RNA
ctctctaaatgcaagtgccc

SEQ ID NO: 13464 - RNA, 20 nt, synthetic construct
  source 1..20: mol_type = other RNA
gcagaactgaggaagaggaa

SEQ ID NO: 13465 - RNA, 20 nt, synthetic construct
  source 1..20: mol_type = other RNA
ggctggcagaactgaggaag

SEQ ID NO: 13466 - RNA, 20 nt, synthetic construct
  source 1..20: mol_type = other RNA
gagtgtggctggcagaactg

SEQ ID NO: 13467 - RNA, 20 nt, synthetic construct
  source 1..20: mol_type = other RNA
catcatggcaagagtgtggc

SEQ ID NO: 13468 - RNA, 20 nt, synthetic construct
  source 1..20: mol_type = other RNA
tgctcatcatggcaagagtg

SEQ ID NO: 13469 - RNA, 20 nt, synthetic construct
  source 1..20: mol_type = other RNA
ttggctgaaactgctcatca

SEQ ID NO: 13470 - RNA, 20 nt, synthetic construct
  source 1..20: mol_type = other RNA
agggcaggggaaggagcttt

SEQ ID NO: 13471 - RNA, 20 nt, synthetic construct
  source 1..20: mol_type = other RNA
ggaggtgttagggcagggga

SEQ ID NO: 13472 - RNA, 20 nt, synthetic construct
  source 1..20: mol_type = other RNA
ctgccctaacacctcctgca

SEQ ID NO: 13473 - RNA, 20 nt, synthetic construct
  source 1..20: mol_type = other RNA
tgcaggaggtgttagggcag

SEQ ID NO: 13474 - RNA, 20 nt, synthetic construct
  source 1..20: mol_type = other RNA
ttgcaggaggtgttagggca

SEQ ID NO: 13475 - RNA, 20 nt, synthetic construct
  source 1..20: mol_type = other RNA
cttgcaggaggtgttagggc

SEQ ID NO: 13476 - RNA, 20 nt, synthetic construct
  source 1..20: mol_type = other RNA
aacacctcctgcaaggcctg

SEQ ID NO: 13477 - RNA, 20 nt, synthetic construct
  source 1..20: mol_type = other RNA
aggccttgcaggaggtgtta

SEQ ID NO: 13478 - RNA, 20 nt, synthetic construct
  source 1..20: mol_type = other RNA
caggccttgcaggaggtgtt

SEQ ID NO: 13479 - RNA, 20 nt, synthetic construct
  source 1..20: mol_type = other RNA
ctcctgcaaggcctgaggtc

SEQ ID NO: 13480 - RNA, 20 nt, synthetic construct
  source 1..20: mol_type = other RNA
cagacctcaggccttgcagg

SEQ ID NO: 13481 - RNA, 20 nt, synthetic construct
  source 1..20: mol_type = other RNA
ttccagacctcaggccttgc

SEQ ID NO: 13482 - RNA, 20 nt, synthetic construct
  source 1..20: mol_type = other RNA
gcaggtggcttccagacctc

SEQ ID NO: 13483 - RNA, 20 nt, synthetic construct
  source 1..20: mol_type = other RNA
tggaagccacctgcgcctgc

SEQ ID NO: 13484 - RNA, 20 nt, synthetic construct
  source 1..20: mol_type = other RNA
gaggggccagcaggcgcagg

SEQ ID NO: 13485 - RNA, 20 nt, synthetic construct
  source 1..20: mol_type = other RNA
aaggaggggccagcaggcgc

SEQ ID NO: 13486 - RNA, 20 nt, synthetic construct
  source 1..20: mol_type = other RNA
acaagaaaggaggggccagc

SEQ ID NO: 13487 - RNA, 20 nt, synthetic construct
  source 1..20: mol_type = other RNA
ctcctttcttgtttctgcaa

SEQ ID NO: 13488 - RNA, 20 nt, synthetic construct
  source 1..20: mol_type = other RNA
ttgcagaaacaagaaaggag

SEQ ID NO: 13489 - RNA, 20 nt, synthetic construct
  source 1..20: mol_type = other RNA
attgcagaaacaagaaagga

SEQ ID NO: 13490 - RNA, 20 nt, synthetic construct
  source 1..20: mol_type = other RNA
cattgcagaaacaagaaagg

SEQ ID NO: 13491 - RNA, 20 nt, synthetic construct
  source 1..20: mol_type = other RNA
atccattgcagaaacaagaa

SEQ ID NO: 13492 - RNA, 20 nt, synthetic construct
  source 1..20: mol_type = other RNA
tgtttctgcaatggatgttg

SEQ ID NO: 13493 - RNA, 20 nt, synthetic construct
  source 1..20: mol_type = other RNA
atggatgttgtggccctgtg

SEQ ID NO: 13494 - RNA, 20 nt, synthetic construct
  source 1..20: mol_type = other RNA
tggatgttgtggccctgtga

SEQ ID NO: 13495 - RNA, 20 nt, synthetic construct
  source 1..20: mol_type = other RNA
tttttctcttctccctcaca

SEQ ID NO: 13496 - RNA, 20 nt, synthetic construct
  source 1..20: mol_type = other RNA
ctttttctcttctccctcac

SEQ ID NO: 13497 - RNA, 20 nt, synthetic construct
  source 1..20: mol_type = other RNA
aggtgaggatagagggagga

SEQ ID NO: 13498 - RNA, 20 nt, synthetic construct
  source 1..20: mol_type = other RNA
gaggtgaggatagagggagg

SEQ ID NO: 13499 - RNA, 20 nt, synthetic construct
  source 1..20: mol_type = other RNA
caggaggtgaggatagaggg

SEQ ID NO: 13500 - RNA, 20 nt, synthetic construct
  source 1..20: mol_type = other RNA
tggcaggaggtgaggataga

SEQ ID NO: 13501 - RNA, 20 nt, synthetic construct
  source 1..20: mol_type = other RNA
atggcaggaggtgaggatag

SEQ ID NO: 13502 - RNA, 20 nt, synthetic construct
  source 1..20: mol_type = other RNA
tgacagcatggcaggaggtg

SEQ ID NO: 13503 - RNA, 20 nt, synthetic construct
  source 1..20: mol_type = other RNA
aagggtgacagcatggcagg

SEQ ID NO: 13504 - RNA, 20 nt, synthetic construct
  source 1..20: mol_type = other RNA
tataagggtgacagcatggc

SEQ ID NO: 13505 - RNA, 20 nt, synthetic construct
  source 1..20: mol_type = other RNA
ctcttataagggtgacagca

SEQ ID NO: 13506 - RNA, 20 nt, synthetic construct
  source 1..20: mol_type = other RNA
tgtcacccttataagagaga

SEQ ID NO: 13507 - RNA, 20 nt, synthetic construct
  source 1..20: mol_type = other RNA
gtcacccttataagagagaa

SEQ ID NO: 13508 - RNA, 20 nt, synthetic construct
  source 1..20: mol_type = other RNA
ttagcccttctctcttataa

SEQ ID NO: 13509 - RNA, 20 nt, synthetic construct
  source 1..20: mol_type = other RNA
gttagcccttctctcttata

SEQ ID NO: 13510 - RNA, 20 nt, synthetic construct
  source 1..20: mol_type = other RNA
gagagaagggctaaccatcc

SEQ ID NO: 13511 - RNA, 20 nt, synthetic construct
  source 1..20: mol_type = other RNA
cactggaggattagcctgga

SEQ ID NO: 13512 - RNA, 20 nt, synthetic construct
  source 1..20: mol_type = other RNA
ggctaatcctccagtgatgc

SEQ ID NO: 13513 - RNA, 20 nt, synthetic construct
  source 1..20: mol_type = other RNA
gcatcactggaggattagcc

SEQ ID NO: 13514 - RNA, 20 nt, synthetic construct
  source 1..20: mol_type = other RNA
atcctccagtgatgcaggag

SEQ ID NO: 13515 - RNA, 20 nt, synthetic construct
  source 1..20: mol_type = other RNA
gtcctctcctgcatcactgg

SEQ ID NO: 13516 - RNA, 20 nt, synthetic construct
  source 1..20: mol_type = other RNA
tgatgcaggagaggacatcc

SEQ ID NO: 13517 - RNA, 20 nt, synthetic construct
  source 1..20: mol_type = other RNA
gatgtcctctcctgcatcac

SEQ ID NO: 13518 - RNA, 20 nt, synthetic construct
  source 1..20: mol_type = other RNA
gcaggagaggacatcctggc

SEQ ID NO: 13519 - RNA, 20 nt, synthetic construct
  source 1..20: mol_type = other RNA
ccggaagagtcagagcttcc

SEQ ID NO: 13520 - RNA, 20 nt, synthetic construct
  source 1..20: mol_type = other RNA
cctggaagctctgactcttc

SEQ ID NO: 13521 - RNA, 20 nt, synthetic construct
  source 1..20: mol_type = other RNA
cagagcttccaggtgagctc

SEQ ID NO: 13522 - RNA, 20 nt, synthetic construct
  source 1..20: mol_type = other RNA
agcttccaggtgagctcagg

SEQ ID NO: 13523 - RNA, 20 nt, synthetic construct
  source 1..20: mol_type = other RNA
gcttccaggtgagctcaggt

SEQ ID NO: 13524 - RNA, 20 nt, synthetic construct
  source 1..20: mol_type = other RNA
ctgacccacctgagctcacc

SEQ ID NO: 13525 - RNA, 20 nt, synthetic construct
  source 1..20: mol_type = other RNA
ctcaggtgggtcagcccccg

SEQ ID NO: 13526 - RNA, 20 nt, synthetic construct
  source 1..20: mol_type = other RNA
cccgaggctgtgaagagccc

SEQ ID NO: 13527 - RNA, 20 nt, synthetic construct
  source 1..20: mol_type = other RNA
ccgaggctgtgaagagccca

SEQ ID NO: 13528 - RNA, 20 nt, synthetic construct
  source 1..20: mol_type = other RNA
cgaggctgtgaagagcccag

SEQ ID NO: 13529 - RNA, 20 nt, synthetic construct
  source 1..20: mol_type = other RNA
tgggctcttcacagcctcgg

SEQ ID NO: 13530 - RNA, 20 nt, synthetic construct
  source 1..20: mol_type = other RNA
ctgggctcttcacagcctcg

SEQ ID NO: 13531 - RNA, 20 nt, synthetic construct
  source 1..20: mol_type = other RNA
cctgggctcttcacagcctc

SEQ ID NO: 13532 - RNA, 20 nt, synthetic construct
  source 1..20: mol_type = other RNA
ccctgggctcttcacagcct

SEQ ID NO: 13533 - RNA, 20 nt, synthetic construct
  source 1..20: mol_type = other RNA
agtggcatctactggcccct

SEQ ID NO: 13534 - RNA, 20 nt, synthetic construct
  source 1..20: mol_type = other RNA
aagtggcatctactggcccc

SEQ ID NO: 13535 - RNA, 20 nt, synthetic construct
  source 1..20: mol_type = other RNA
gtagatgccacttttgctcc

SEQ ID NO: 13536 - RNA, 20 nt, synthetic construct
  source 1..20: mol_type = other RNA
ggagcaaaagtggcatctac

SEQ ID NO: 13537 - RNA, 20 nt, synthetic construct
  source 1..20: mol_type = other RNA
gattcttcctggagcaaaag

SEQ ID NO: 13538 - RNA, 20 nt, synthetic construct
  source 1..20: mol_type = other RNA
acacagttgaagattcttcc

SEQ ID NO: 13539 - RNA, 20 nt, synthetic construct
  source 1..20: mol_type = other RNA
aactgtgtcctttttattca

SEQ ID NO: 13540 - RNA, 20 nt, synthetic construct
  source 1..20: mol_type = other RNA
actgtgtcctttttattcaa

SEQ ID NO: 13541 - RNA, 20 nt, synthetic construct
  source 1..20: mol_type = other RNA
ctgtgtcctttttattcaag

SEQ ID NO: 13542 - RNA, 20 nt, synthetic construct
  source 1..20: mol_type = other RNA
agagagccccttgaataaaa

SEQ ID NO: 13543 - RNA, 20 nt, synthetic construct
  source 1..20: mol_type = other RNA
gtaaaaggattgtgggatca

SEQ ID NO: 13544 - RNA, 20 nt, synthetic construct
  source 1..20: mol_type = other RNA
gaaatatgtaaaaggattgt

SEQ ID NO: 13545 - RNA, 20 nt, synthetic construct
  source 1..20: mol_type = other RNA
agaaatatgtaaaaggattg

SEQ ID NO: 13546 - RNA, 20 nt, synthetic construct
  source 1..20: mol_type = other RNA
ccttttacatatttctctcc

SEQ ID NO: 13547 - RNA, 20 nt, synthetic construct
  source 1..20: mol_type = other RNA
cctggagagaaatatgtaaa

SEQ ID NO: 13548 - RNA, 20 nt, synthetic construct
  source 1..20: mol_type = other RNA
ccaggagtatcacatttctg

SEQ ID NO: 13549 - RNA, 20 nt, synthetic construct
  source 1..20: mol_type = other RNA
caggagtatcacatttctga

SEQ ID NO: 13550 - RNA, 20 nt, synthetic construct
  source 1..20: mol_type = other RNA
cctcagaaatgtgatactcc

SEQ ID NO: 13551 - RNA, 20 nt, synthetic construct
  source 1..20: mol_type = other RNA
gccctgtgcctgttttctgc

SEQ ID NO: 13552 - RNA, 20 nt, synthetic construct
  source 1..20: mol_type = other RNA
tcctgcagaaaacaggcaca

SEQ ID NO: 13553 - RNA, 20 nt, synthetic construct
  source 1..20: mol_type = other RNA
ttcctgcagaaaacaggcac

SEQ ID NO: 13554 - RNA, 20 nt, synthetic construct
  source 1..20: mol_type = other RNA
agcaacttcctgcagaaaac

SEQ ID NO: 13555 - RNA, 20 nt, synthetic construct
  source 1..20: mol_type = other RNA
gcaggaagttgctgttgtcc

SEQ ID NO: 13556 - RNA, 20 nt, synthetic construct
  source 1..20: mol_type = other RNA
caggaagttgctgttgtccc

SEQ ID NO: 13557 - RNA, 20 nt, synthetic construct
  source 1..20: mol_type = other RNA
tgctgggggcagggggaccc

SEQ ID NO: 13558 - RNA, 20 nt, synthetic construct
  source 1..20: mol_type = other RNA
gtgctgggggcagggggacc

SEQ ID NO: 13559 - RNA, 20 nt, synthetic construct
  source 1..20: mol_type = other RNA
acagaggtgctgggggcagg

SEQ ID NO: 13560 - RNA, 20 nt, synthetic construct
  source 1..20: mol_type = other RNA
aacagaggtgctgggggcag

SEQ ID NO: 13561 - RNA, 20 nt, synthetic construct
  source 1..20: mol_type = other RNA
taacagaggtgctgggggca

SEQ ID NO: 13562 - RNA, 20 nt, synthetic construct
  source 1..20: mol_type = other RNA
gtaacagaggtgctgggggc

SEQ ID NO: 13563 - RNA, 20 nt, synthetic construct
  source 1..20: mol_type = other RNA
tcttgtaacagaggtgctgg

SEQ ID NO: 13564 - RNA, 20 nt, synthetic construct
  source 1..20: mol_type = other RNA
ttcttgtaacagaggtgctg

SEQ ID NO: 13565 - RNA, 20 nt, synthetic construct
  source 1..20: mol_type = other RNA
cttcttgtaacagaggtgct

SEQ ID NO: 13566 - RNA, 20 nt, synthetic construct
  source 1..20: mol_type = other RNA
gcttcttgtaacagaggtgc

SEQ ID NO: 13567 - RNA, 20 nt, synthetic construct
  source 1..20: mol_type = other RNA
gggtctgcttcttgtaacag

SEQ ID NO: 13568 - RNA, 20 nt, synthetic construct
  source 1..20: mol_type = other RNA
gcagacccttcatgccacac

SEQ ID NO: 13569 - RNA, 20 nt, synthetic construct
  source 1..20: mol_type = other RNA
cagacccttcatgccacact

SEQ ID NO: 13570 - RNA, 20 nt, synthetic construct
  source 1..20: mol_type = other RNA
ttcatgccacactgggaccc

SEQ ID NO: 13571 - RNA, 20 nt, synthetic construct
  source 1..20: mol_type = other RNA
tcatgccacactgggaccca

SEQ ID NO: 13572 - RNA, 20 nt, synthetic construct
  source 1..20: mol_type = other RNA
gggtcccagtgtggcatgaa

SEQ ID NO: 13573 - RNA, 20 nt, synthetic construct
  source 1..20: mol_type = other RNA
tgggtcccagtgtggcatga

SEQ ID NO: 13574 - RNA, 20 nt, synthetic construct
  source 1..20: mol_type = other RNA
tgccacactgggacccaggg

SEQ ID NO: 13575 - RNA, 20 nt, synthetic construct
  source 1..20: mol_type = other RNA
ggcctccctgggtcccagtg

SEQ ID NO: 13576 - RNA, 20 nt, synthetic construct
  source 1..20: mol_type = other RNA
acccagggaggccccaagcc

SEQ ID NO: 13577 - RNA, 20 nt, synthetic construct
  source 1..20: mol_type = other RNA
tcctggcttggggcctccct

SEQ ID NO: 13578 - RNA, 20 nt, synthetic construct
  source 1..20: mol_type = other RNA
gaggccccaagccaggatgc

SEQ ID NO: 13579 - RNA, 20 nt, synthetic construct
  source 1..20: mol_type = other RNA
aggccccaagccaggatgct

SEQ ID NO: 13580 - RNA, 20 nt, synthetic construct
  source 1..20: mol_type = other RNA
gatcccagcatcctggcttg

SEQ ID NO: 13581 - RNA, 20 nt, synthetic construct
  source 1..20: mol_type = other RNA
agatcccagcatcctggctt

SEQ ID NO: 13582 - RNA, 20 nt, synthetic construct
  source 1..20: mol_type = other RNA
aagatcccagcatcctggct

SEQ ID NO: 13583 - RNA, 20 nt, synthetic construct
  source 1..20: mol_type = other RNA
ggatgctgggatcttagtaa

SEQ ID NO: 13584 - RNA, 20 nt, synthetic construct
  source 1..20: mol_type = other RNA
ttactaagatcccagcatcc

SEQ ID NO: 13585 - RNA, 20 nt, synthetic construct
  source 1..20: mol_type = other RNA
gctgggatcttagtaaaggt

SEQ ID NO: 13586 - RNA, 20 nt, synthetic construct
  source 1..20: mol_type = other RNA
ggaatgatgtcagaacatag

SEQ ID NO: 13587 - RNA, 20 nt, synthetic construct
  source 1..20: mol_type = other RNA
atgatgtcagaacatagagg

SEQ ID NO: 13588 - RNA, 20 nt, synthetic construct
  source 1..20: mol_type = other RNA
ttccccccatagcatcatcc

SEQ ID NO: 13589 - RNA, 20 nt, synthetic construct
  source 1..20: mol_type = other RNA
cccccatagcatcatcctgg

SEQ ID NO: 13590 - RNA, 20 nt, synthetic construct
  source 1..20: mol_type = other RNA
ccccatagcatcatcctgga

SEQ ID NO: 13591 - RNA, 20 nt, synthetic construct
  source 1..20: mol_type = other RNA
ctccaggatgatgctatggg

SEQ ID NO: 13592 - RNA, 20 nt, synthetic construct
  source 1..20: mol_type = other RNA
cctccaggatgatgctatgg

SEQ ID NO: 13593 - RNA, 20 nt, synthetic construct
  source 1..20: mol_type = other RNA
ccctccaggatgatgctatg

SEQ ID NO: 13594 - RNA, 20 nt, synthetic construct
  source 1..20: mol_type = other RNA
gccctccaggatgatgctat

SEQ ID NO: 13595 - RNA, 20 nt, synthetic construct
  source 1..20: mol_type = other RNA
cgccctccaggatgatgcta

SEQ ID NO: 13596 - RNA, 20 nt, synthetic construct
  source 1..20: mol_type = other RNA
cacacaaatcagcgccctcc

SEQ ID NO: 13597 - RNA, 20 nt, synthetic construct
  source 1..20: mol_type = other RNA
gctgatttgtgtgctctgcc

SEQ ID NO: 13598 - RNA, 20 nt, synthetic construct
  source 1..20: mol_type = other RNA
gccaggttcatctgtgactc

SEQ ID NO: 13599 - RNA, 20 nt, synthetic construct
  source 1..20: mol_type = other RNA
tcctgagtcacagatgaacc

SEQ ID NO: 13600 - RNA, 20 nt, synthetic construct
  source 1..20: mol_type = other RNA
actcaggatttaaaagcccc

SEQ ID NO: 13601 - RNA, 20 nt, synthetic construct
  source 1..20: mol_type = other RNA
ggatttaaaagccccaggtg

SEQ ID NO: 13602 - RNA, 20 nt, synthetic construct
  source 1..20: mol_type = other RNA
cagaagggacaccacacctg

SEQ ID NO: 13603 - RNA, 20 nt, synthetic construct
  source 1..20: mol_type = other RNA
acagaagggacaccacacct

SEQ ID NO: 13604 - RNA, 20 nt, synthetic construct
  source 1..20: mol_type = other RNA
cacagaagggacaccacacc

SEQ ID NO: 13605 - RNA, 20 nt, synthetic construct
  source 1..20: mol_type = other RNA
gtgtcccttctgtgcctgca

SEQ ID NO: 13606 - RNA, 20 nt, synthetic construct
  source 1..20: mol_type = other RNA
cgcaccttgcaggcacagaa

SEQ ID NO: 13607 - RNA, 20 nt, synthetic construct
  source 1..20: mol_type = other RNA
acgcaccttgcaggcacaga

SEQ ID NO: 13608 - RNA, 20 nt, synthetic construct
  source 1..20: mol_type = other RNA
ctgctaaagacgcaccttgc

SEQ ID NO: 13609 - RNA, 20 nt, synthetic construct
  source 1..20: mol_type = other RNA
gcgtctttagcagttctccc

SEQ ID NO: 13610 - RNA, 20 nt, synthetic construct
  source 1..20: mol_type = other RNA
tttagcagttctccctggtg

SEQ ID NO: 13611 - RNA, 20 nt, synthetic construct
  source 1..20: mol_type = other RNA
gcagttctccctggtgtgga

SEQ ID NO: 13612 - RNA, 20 nt, synthetic construct
  source 1..20: mol_type = other RNA
ccctggtgtggaaggatcag

SEQ ID NO: 13613 - RNA, 20 nt, synthetic construct
  source 1..20: mol_type = other RNA
ccactgatccttccacacca

SEQ ID NO: 13614 - RNA, 20 nt, synthetic construct
  source 1..20: mol_type = other RNA
accactgatccttccacacc

SEQ ID NO: 13615 - RNA, 20 nt, synthetic construct
  source 1..20: mol_type = other RNA
atcagtggttcttgcagcct

SEQ ID NO: 13616 - RNA, 20 nt, synthetic construct
  source 1..20: mol_type = other RNA
gcttgctgtggagggtgcct

SEQ ID NO: 13617 - RNA, 20 nt, synthetic construct
  source 1..20: mol_type = other RNA
ctccacagcaagcccaacac

SEQ ID NO: 13618 - RNA, 20 nt, synthetic construct
  source 1..20: mol_type = other RNA
tgtgttgggcttgctgtgga

SEQ ID NO: 13619 - RNA, 20 nt, synthetic construct
  source 1..20: mol_type = other RNA
ctgtgttgggcttgctgtgg

SEQ ID NO: 13620 - RNA, 20 nt, synthetic construct
  source 1..20: mol_type = other RNA
cacctgtgttgggcttgctg

SEQ ID NO: 13621 - RNA, 20 nt, synthetic construct
  source 1..20: mol_type = other RNA
acacaggtgctgtgagcagc

SEQ ID NO: 13622 - RNA, 20 nt, synthetic construct
  source 1..20: mol_type = other RNA
ctgctcacagcacctgtgtt

SEQ ID NO: 13623 - RNA, 20 nt, synthetic construct
  source 1..20: mol_type = other RNA
gctgctcacagcacctgtgt

SEQ ID NO: 13624 - RNA, 20 nt, synthetic construct
  source 1..20: mol_type = other RNA
gtgagcagctggttcatgaa

SEQ ID NO: 13625 - RNA, 20 nt, synthetic construct
  source 1..20: mol_type = other RNA
tggttcatgaacggtgatcc

SEQ ID NO: 13626 - RNA, 20 nt, synthetic construct
  source 1..20: mol_type = other RNA
ggttcatgaacggtgatcct

SEQ ID NO: 13627 - RNA, 20 nt, synthetic construct
  source 1..20: mol_type = other RNA
gttcatgaacggtgatcctg

SEQ ID NO: 13628 - RNA, 20 nt, synthetic construct
  source 1..20: mol_type = other RNA
acggtgatcctggggagaag

SEQ ID NO: 13629 - RNA, 20 nt, synthetic construct
  source 1..20: mol_type = other RNA
gtgatcctggggagaagagg

SEQ ID NO: 13630 - RNA, 20 nt, synthetic construct
  source 1..20: mol_type = other RNA
ggagaagaggaggatgaaaa

SEQ ID NO: 13631 - RNA, 20 nt, synthetic construct
  source 1..20: mol_type = other RNA
aaaatggaaaaccagtgcaa

SEQ ID NO: 13632 - RNA, 20 nt, synthetic construct
  source 1..20: mol_type = other RNA
gcaaaggtgtgtcatccagt

SEQ ID NO: 13633 - RNA, 20 nt, synthetic construct
  source 1..20: mol_type = other RNA
catccagttggttactgctg

SEQ ID NO: 13634 - RNA, 20 nt, synthetic construct
  source 1..20: mol_type = other RNA
atccagttggttactgctgt

SEQ ID NO: 13635 - RNA, 20 nt, synthetic construct
  source 1..20: mol_type = other RNA
tggttactgctgtgggtgcc

SEQ ID NO: 13636 - RNA, 20 nt, synthetic construct
  source 1..20: mol_type = other RNA
ggttactgctgtgggtgccc

SEQ ID NO: 13637 - RNA, 20 nt, synthetic construct
  source 1..20: mol_type = other RNA
ctctggtgggatggaagccc

SEQ ID NO: 13638 - RNA, 20 nt, synthetic construct
  source 1..20: mol_type = other RNA
gctctggtgggatggaagcc

SEQ ID NO: 13639 - RNA, 20 nt, synthetic construct
  source 1..20: mol_type = other RNA
tagtgggggctctggtggga

SEQ ID NO: 13640 - RNA, 20 nt, synthetic construct
  source 1..20: mol_type = other RNA
caccagagcccccactagcc

SEQ ID NO: 13641 - RNA, 20 nt, synthetic construct
  source 1..20: mol_type = other RNA
accagagcccccactagcca

SEQ ID NO: 13642 - RNA, 20 nt, synthetic construct
  source 1..20: mol_type = other RNA
tggctagtgggggctctggt

SEQ ID NO: 13643 - RNA, 20 nt, synthetic construct
  source 1..20: mol_type = other RNA
ctggctagtgggggctctgg

SEQ ID NO: 13644 - RNA, 20 nt, synthetic construct
  source 1..20: mol_type = other RNA
gccctggctagtgggggctc

SEQ ID NO: 13645 - RNA, 20 nt, synthetic construct
  source 1..20: mol_type = other RNA
ccccactagccagggcagcc

SEQ ID NO: 13646 - RNA, 20 nt, synthetic construct
  source 1..20: mol_type = other RNA
cactagccagggcagcctgg

SEQ ID NO: 13647 - RNA, 20 nt, synthetic construct
  source 1..20: mol_type = other RNA
caggctgccctggctagtgg

SEQ ID NO: 13648 - RNA, 20 nt, synthetic construct
  source 1..20: mol_type = other RNA
ccaggctgccctggctagtg

SEQ ID NO: 13649 - RNA, 20 nt, synthetic construct
  source 1..20: mol_type = other RNA
tagccagggcagcctggcgg

SEQ ID NO: 13650 - RNA, 20 nt, synthetic construct
  source 1..20: mol_type = other RNA
cgccaggctgccctggctag

SEQ ID NO: 13651 - RNA, 20 nt, synthetic construct
  source 1..20: mol_type = other RNA
tcacctccgccaggctgccc

SEQ ID NO: 13652 - RNA, 20 nt, synthetic construct
  source 1..20: mol_type = other RNA
gaatgatgctcacctccgcc

SEQ ID NO: 13653 - RNA, 20 nt, synthetic construct
  source 1..20: mol_type = other RNA
gtgagcatcattctgctttc

SEQ ID NO: 13654 - RNA, 20 nt, synthetic construct
  source 1..20: mol_type = other RNA
gctttctggctgcacctgtg

SEQ ID NO: 13655 - RNA, 20 nt, synthetic construct
  source 1..20: mol_type = other RNA
ggaacgggctctgtccacac

SEQ ID NO: 13656 - RNA, 20 nt, synthetic construct
  source 1..20: mol_type = other RNA
agcccgttccaaagcctccc

SEQ ID NO: 13657 - RNA, 20 nt, synthetic construct
  source 1..20: mol_type = other RNA
ttccaaagcctcccaggcac

SEQ ID NO: 13658 - RNA, 20 nt, synthetic construct
  source 1..20: mol_type = other RNA
tccaaagcctcccaggcaca

SEQ ID NO: 13659 - RNA, 20 nt, synthetic construct
  source 1..20: mol_type = other RNA
gtgcctgggaggctttggaa

SEQ ID NO: 13660 - RNA, 20 nt, synthetic construct
  source 1..20: mol_type = other RNA
gccctgtgcctgggaggctt

SEQ ID NO: 13661 - RNA, 20 nt, synthetic construct
  source 1..20: mol_type = other RNA
atgtctgccctgtgcctggg

SEQ ID NO: 13662 - RNA, 20 nt, synthetic construct
  source 1..20: mol_type = other RNA
ttgatgtctgccctgtgcct

SEQ ID NO: 13663 - RNA, 20 nt, synthetic construct
  source 1..20: mol_type = other RNA
cacagggcagacatcaagca

SEQ ID NO: 13664 - RNA, 20 nt, synthetic construct
  source 1..20: mol_type = other RNA
acagggcagacatcaagcaa

SEQ ID NO: 13665 - RNA, 20 nt, synthetic construct
  source 1..20: mol_type = other RNA
cagggcagacatcaagcaag

SEQ ID NO: 13666 - RNA, 20 nt, synthetic construct
  source 1..20: mol_type = other RNA
catcaagcaaggggcagagc

SEQ ID NO: 13667 - RNA, 20 nt, synthetic construct
  source 1..20: mol_type = other RNA
atcaagcaaggggcagagct

SEQ ID NO: 13668 - RNA, 20 nt, synthetic construct
  source 1..20: mol_type = other RNA
tcaagcaaggggcagagctg

SEQ ID NO: 13669 - RNA, 20 nt, synthetic construct
  source 1..20: mol_type = other RNA
caaggggcagagctggggcg

SEQ ID NO: 13670 - RNA, 20 nt, synthetic construct
  source 1..20: mol_type = other RNA
aaggggcagagctggggcga

SEQ ID NO: 13671 - RNA, 20 nt, synthetic construct
  source 1..20: mol_type = other RNA
cagagctggggcgagggctc

SEQ ID NO: 13672 - RNA, 20 nt, synthetic construct
  source 1..20: mol_type = other RNA
agagctggggcgagggctct

SEQ ID NO: 13673 - RNA, 20 nt, synthetic construct
  source 1..20: mol_type = other RNA
gtgcccccgttattgaacac

SEQ ID NO: 13674 - RNA, 20 nt, synthetic construct
  source 1..20: mol_type = other RNA
gttattgaacacaggcctga

SEQ ID NO: 13675 - RNA, 20 nt, synthetic construct
  source 1..20: mol_type = other RNA
ttattgaacacaggcctgaa

SEQ ID NO: 13676 - RNA, 20 nt, synthetic construct
  source 1..20: mol_type = other RNA
tcaggcctgtgttcaataac

SEQ ID NO: 13677 - RNA, 20 nt, synthetic construct
  source 1..20: mol_type = other RNA
ttcaggcctgtgttcaataa

SEQ ID NO: 13678 - RNA, 20 nt, synthetic construct
  source 1..20: mol_type = other RNA
aggcctgaagggagcctaag

SEQ ID NO: 13679 - RNA, 20 nt, synthetic construct
  source 1..20: mol_type = other RNA
cctgaagggagcctaagagg

SEQ ID NO: 13680 - RNA, 20 nt, synthetic construct
  source 1..20: mol_type = other RNA
aagggagcctaagaggtggc

SEQ ID NO: 13681 - RNA, 20 nt, synthetic construct
  source 1..20: mol_type = other RNA
ccacctcttaggctcccttc

SEQ ID NO: 13682 - RNA, 20 nt, synthetic construct
  source 1..20: mol_type = other RNA
gagcctaagaggtggctggc

SEQ ID NO: 13683 - RNA, 20 nt, synthetic construct
  source 1..20: mol_type = other RNA
tctcctgccagccacctctt

SEQ ID NO: 13684 - RNA, 20 nt, synthetic construct
  source 1..20: mol_type = other RNA
ggctggcaggagatactaca

SEQ ID NO: 13685 - RNA, 20 nt, synthetic construct
  source 1..20: mol_type = other RNA
atactacaaggcagaaagac

SEQ ID NO: 13686 - RNA, 20 nt, synthetic construct
  source 1..20: mol_type = other RNA
tactacaaggcagaaagaca

SEQ ID NO: 13687 - RNA, 20 nt, synthetic construct
  source 1..20: mol_type = other RNA
taagagagaacaaaaagtca

SEQ ID NO: 13688 - RNA, 20 nt, synthetic construct
  source 1..20: mol_type = other RNA
aaaagagaacaccaaaatcc

SEQ ID NO: 13689 - RNA, 20 nt, synthetic construct
  source 1..20: mol_type = other RNA
ggattttggtgttctctttt

SEQ ID NO: 13690 - RNA, 20 nt, synthetic construct
  source 1..20: mol_type = other RNA
acaccaaaatcctggagtca

SEQ ID NO: 13691 - RNA, 20 nt, synthetic construct
  source 1..20: mol_type = other RNA
caccaaaatcctggagtcac

SEQ ID NO: 13692 - RNA, 20 nt, synthetic construct
  source 1..20: mol_type = other RNA
gacccgtgactccaggattt

SEQ ID NO: 13693 - RNA, 20 nt, synthetic construct
  source 1..20: mol_type = other RNA
aatggaagacccgtgactcc

SEQ ID NO: 13694 - RNA, 20 nt, synthetic construct
  source 1..20: mol_type = other RNA
agaaatgctagagagggtaa

SEQ ID NO: 13695 - RNA, 20 nt, synthetic construct
  source 1..20: mol_type = other RNA
acaagcagaaatgctagaga

SEQ ID NO: 13696 - RNA, 20 nt, synthetic construct
  source 1..20: mol_type = other RNA
gacaagcagaaatgctagag

SEQ ID NO: 13697 - RNA, 20 nt, synthetic construct
  source 1..20: mol_type = other RNA
gcttgtcttttccctagtat

SEQ ID NO: 13698 - RNA, 20 nt, synthetic construct
  source 1..20: mol_type = other RNA
aaaattcttcaccaatacta

SEQ ID NO: 13699 - RNA, 20 nt, synthetic construct
  source 1..20: mol_type = other RNA
aaaaattcttcaccaatact

SEQ ID NO: 13700 - RNA, 20 nt, synthetic construct
  source 1..20: mol_type = other RNA
aagtaaccaacccataccgt

SEQ ID NO: 13701 - RNA, 20 nt, synthetic construct
  source 1..20: mol_type = other RNA
caacccataccgttggttac

SEQ ID NO: 13702 - RNA, 20 nt, synthetic construct
  source 1..20: mol_type = other RNA
ctgtaaccaacggtatgggt

SEQ ID NO: 13703 - RNA, 20 nt, synthetic construct
  source 1..20: mol_type = other RNA
accgttggttacaggccctg

SEQ ID NO: 13704 - RNA, 20 nt, synthetic construct
  source 1..20: mol_type = other RNA
agggcctgtaaccaacggta

SEQ ID NO: 13705 - RNA, 20 nt, synthetic construct
  source 1..20: mol_type = other RNA
accacagggcctgtaaccaa

SEQ ID NO: 13706 - RNA, 20 nt, synthetic construct
  source 1..20: mol_type = other RNA
ttacaggccctgtggtcacc

SEQ ID NO: 13707 - RNA, 20 nt, synthetic construct
  source 1..20: mol_type = other RNA
gagacagcctggtgaccaca

SEQ ID NO: 13708 - RNA, 20 nt, synthetic construct
  source 1..20: mol_type = other RNA
ggagacagcctggtgaccac

SEQ ID NO: 13709 - RNA, 20 nt, synthetic construct
  source 1..20: mol_type = other RNA
accaggctgtctccccatga

SEQ ID NO: 13710 - RNA, 20 nt, synthetic construct
  source 1..20: mol_type = other RNA
ccaggctgtctccccatgat

SEQ ID NO: 13711 - RNA, 20 nt, synthetic construct
  source 1..20: mol_type = other RNA
caggctgtctccccatgatg

SEQ ID NO: 13712 - RNA, 20 nt, synthetic construct
  source 1..20: mol_type = other RNA
ctgtctccccatgatgggga

SEQ ID NO: 13713 - RNA, 20 nt, synthetic construct
  source 1..20: mol_type = other RNA
cccatgatggggatggagag

SEQ ID NO: 13714 - RNA, 20 nt, synthetic construct
  source 1..20: mol_type = other RNA
cactctccatccccatcatg

SEQ ID NO: 13715 - RNA, 20 nt, synthetic construct
  source 1..20: mol_type = other RNA
ccactctccatccccatcat

SEQ ID NO: 13716 - RNA, 20 nt, synthetic construct
  source 1..20: mol_type = other RNA
accactctccatccccatca

SEQ ID NO: 13717 - RNA, 20 nt, synthetic construct
  source 1..20: mol_type = other RNA
cattcaacaagctggagggg

SEQ ID NO: 13718 - RNA, 20 nt, synthetic construct
  source 1..20: mol_type = other RNA
gggcattcaacaagctggag

SEQ ID NO: 13719 - RNA, 20 nt, synthetic construct
  source 1..20: mol_type = other RNA
agggcattcaacaagctgga

SEQ ID NO: 13720 - RNA, 20 nt, synthetic construct
  source 1..20: mol_type = other RNA
cagggcattcaacaagctgg

SEQ ID NO: 13721 - RNA, 20 nt, synthetic construct
  source 1..20: mol_type = other RNA
cttcagggcattcaacaagc

SEQ ID NO: 13722 - RNA, 20 nt, synthetic construct
  source 1..20: mol_type = other RNA
tgccctgaagtttatctaga

SEQ ID NO: 13723 - RNA, 20 nt, synthetic construct
  source 1..20: mol_type = other RNA
gccctgaagtttatctagaa

SEQ ID NO: 13724 - RNA, 20 nt, synthetic construct
  source 1..20: mol_type = other RNA
tcccttctagataaacttca

SEQ ID NO: 13725 - RNA, 20 nt, synthetic construct
  source 1..20: mol_type = other RNA
ttcccttctagataaacttc

SEQ ID NO: 13726 - RNA, 20 nt, synthetic construct
  source 1..20: mol_type = other RNA
aagggaagatactcaagcgt

SEQ ID NO: 13727 - RNA, 20 nt, synthetic construct
  source 1..20: mol_type = other RNA
taggatttcagtgatgcatt

SEQ ID NO: 13728 - RNA, 20 nt, synthetic construct
  source 1..20: mol_type = other RNA
cagcgtcaaaaacgtcactt

SEQ ID NO: 13729 - RNA, 20 nt, synthetic construct
  source 1..20: mol_type = other RNA
agcgtcaaaaacgtcacttt

SEQ ID NO: 13730 - RNA, 20 nt, synthetic construct
  source 1..20: mol_type = other RNA
tcaaaaacgtcactttgggt

SEQ ID NO: 13731 - RNA, 20 nt, synthetic construct
  source 1..20: mol_type = other RNA
taggaacaatacataatgcg

SEQ ID NO: 13732 - RNA, 20 nt, synthetic construct
  source 1..20: mol_type = other RNA
gccttttgtgacacctgttc

SEQ ID NO: 13733 - RNA, 20 nt, synthetic construct
  source 1..20: mol_type = other RNA
tcctgaacaggtgtcacaaa

SEQ ID NO: 13734 - RNA, 20 nt, synthetic construct
  source 1..20: mol_type = other RNA
cctgttcaggagattcccat

SEQ ID NO: 13735 - RNA, 20 nt, synthetic construct
  source 1..20: mol_type = other RNA
cctatgggaatctcctgaac

SEQ ID NO: 13736 - RNA, 20 nt, synthetic construct
  source 1..20: mol_type = other RNA
attcccataggaagcttctg

SEQ ID NO: 13737 - RNA, 20 nt, synthetic construct
  source 1..20: mol_type = other RNA
ctgcctcagaagcttcctat

SEQ ID NO: 13738 - RNA, 20 nt, synthetic construct
  source 1..20: mol_type = other RNA
tctgcctcagaagcttccta

SEQ ID NO: 13739 - RNA, 20 nt, synthetic construct
  source 1..20: mol_type = other RNA
gcttctgaggcagagtcctc

SEQ ID NO: 13740 - RNA, 20 nt, synthetic construct
  source 1..20: mol_type = other RNA
tgaggcagagtcctcaggtg

SEQ ID NO: 13741 - RNA, 20 nt, synthetic construct
  source 1..20: mol_type = other RNA
ggcagagtcctcaggtgagg

SEQ ID NO: 13742 - RNA, 20 nt, synthetic construct
  source 1..20: mol_type = other RNA
gcagagtcctcaggtgagga

SEQ ID NO: 13743 - RNA, 20 nt, synthetic construct
  source 1..20: mol_type = other RNA
cagagtcctcaggtgaggag

SEQ ID NO: 13744 - RNA, 20 nt, synthetic construct
  source 1..20: mol_type = other RNA
agagtcctcaggtgaggagg

SEQ ID NO: 13745 - RNA, 20 nt, synthetic construct
  source 1..20: mol_type = other RNA
cctcaggtgaggagggggac

SEQ ID NO: 13746 - RNA, 20 nt, synthetic construct
  source 1..20: mol_type = other RNA
ggtgaggagggggacaggcc

SEQ ID NO: 13747 - RNA, 20 nt, synthetic construct
  source 1..20: mol_type = other RNA
gtgaggagggggacaggcct

SEQ ID NO: 13748 - RNA, 20 nt, synthetic construct
  source 1..20: mol_type = other RNA
agggggacaggcctgggtct

SEQ ID NO: 13749 - RNA, 20 nt, synthetic construct
  source 1..20: mol_type = other RNA
gggggacaggcctgggtctt

SEQ ID NO: 13750 - RNA, 20 nt, synthetic construct
  source 1..20: mol_type = other RNA
ggggacaggcctgggtcttg

SEQ ID NO: 13751 - RNA, 20 nt, synthetic construct
  source 1..20: mol_type = other RNA
gggacaggcctgggtcttgg

SEQ ID NO: 13752 - RNA, 20 nt, synthetic construct
  source 1..20: mol_type = other RNA
caggcctgggtcttggggga

SEQ ID NO: 13753 - RNA, 20 nt, synthetic construct
  source 1..20: mol_type = other RNA
gcctgggtcttgggggaagg

SEQ ID NO: 13754 - RNA, 20 nt, synthetic construct
  source 1..20: mol_type = other RNA
tccaccttcccccaagaccc

SEQ ID NO: 13755 - RNA, 20 nt, synthetic construct
  source 1..20: mol_type = other RNA
cctcatgcctctctccccag

SEQ ID NO: 13756 - RNA, 20 nt, synthetic construct
  source 1..20: mol_type = other RNA
tggggagagaggcatgaggc

SEQ ID NO: 13757 - RNA, 20 nt, synthetic construct
  source 1..20: mol_type = other RNA
ccactggggagagaggcatg

SEQ ID NO: 13758 - RNA, 20 nt, synthetic construct
  source 1..20: mol_type = other RNA
actgaggccactggggagag

SEQ ID NO: 13759 - RNA, 20 nt, synthetic construct
  source 1..20: mol_type = other RNA
cagtggcctcagtctccatc

SEQ ID NO: 13760 - RNA, 20 nt, synthetic construct
  source 1..20: mol_type = other RNA
gatggagactgaggccactg

SEQ ID NO: 13761 - RNA, 20 nt, synthetic construct
  source 1..20: mol_type = other RNA
tgatggagactgaggccact

SEQ ID NO: 13762 - RNA, 20 nt, synthetic construct
  source 1..20: mol_type = other RNA
ctgatggagactgaggccac

SEQ ID NO: 13763 - RNA, 20 nt, synthetic construct
  source 1..20: mol_type = other RNA
gatttgcctgatggagactg

SEQ ID NO: 13764 - RNA, 20 nt, synthetic construct
  source 1..20: mol_type = other RNA
gcttctcaagatttgcctga

SEQ ID NO: 13765 - RNA, 20 nt, synthetic construct
  source 1..20: mol_type = other RNA
agaagcctcctccattctgc

SEQ ID NO: 13766 - RNA, 20 nt, synthetic construct
  source 1..20: mol_type = other RNA
atttgcctgcagaatggagg

SEQ ID NO: 13767 - RNA, 20 nt, synthetic construct
  source 1..20: mol_type = other RNA
gtcatttgcctgcagaatgg

SEQ ID NO: 13768 - RNA, 20 nt, synthetic construct
  source 1..20: mol_type = other RNA
tcagtcatttgcctgcagaa

SEQ ID NO: 13769 - RNA, 20 nt, synthetic construct
  source 1..20: mol_type = other RNA
tgtgagctctgcttcccaac

SEQ ID NO: 13770 - RNA, 20 nt, synthetic construct
  source 1..20: mol_type = other RNA
gagctctgcttcccaacagg

SEQ ID NO: 13771 - RNA, 20 nt, synthetic construct
  source 1..20: mol_type = other RNA
ccaacaggcggaaattcaca

SEQ ID NO: 13772 - RNA, 20 nt, synthetic construct
  source 1..20: mol_type = other RNA
caacaggcggaaattcacat

SEQ ID NO: 13773 - RNA, 20 nt, synthetic construct
  source 1..20: mol_type = other RNA
aacaggcggaaattcacatg

SEQ ID NO: 13774 - RNA, 20 nt, synthetic construct
  source 1..20: mol_type = other RNA
catgtgaatttccgcctgtt

SEQ ID NO: 13775 - RNA, 20 nt, synthetic construct
  source 1..20: mol_type = other RNA
ccatgtgaatttccgcctgt

SEQ ID NO: 13776 - RNA, 20 nt, synthetic construct
  source 1..20: mol_type = other RNA
ggcggaaattcacatgggga

SEQ ID NO: 13777 - RNA, 20 nt, synthetic construct
  source 1..20: mol_type = other RNA
gcggaaattcacatggggaa

SEQ ID NO: 13778 - RNA, 20 nt, synthetic construct
  source 1..20: mol_type = other RNA
tggggaagggcacctgtgaa

SEQ ID NO: 13779 - RNA, 20 nt, synthetic construct
  source 1..20: mol_type = other RNA
agttctagaaggccattcac

SEQ ID NO: 13780 - RNA, 20 nt, synthetic construct
  source 1..20: mol_type = other RNA
aatggccttctagaactatc

SEQ ID NO: 13781 - RNA, 20 nt, synthetic construct
  source 1..20: mol_type = other RNA
ctagaactatcaggaagttc

SEQ ID NO: 13782 - RNA, 20 nt, synthetic construct
  source 1..20: mol_type = other RNA
aacttcctgatagttctaga

SEQ ID NO: 13783 - RNA, 20 nt, synthetic construct
  source 1..20: mol_type = other RNA
tagtaccctgtgagagcaga

SEQ ID NO: 13784 - RNA, 20 nt, synthetic construct
  source 1..20: mol_type = other RNA
cctgtgagagcagatggtcc

SEQ ID NO: 13785 - RNA, 20 nt, synthetic construct
  source 1..20: mol_type = other RNA
ctgtgagagcagatggtcct

SEQ ID NO: 13786 - RNA, 20 nt, synthetic construct
  source 1..20: mol_type = other RNA
caggaccatctgctctcaca

SEQ ID NO: 13787 - RNA, 20 nt, synthetic construct
  source 1..20: mol_type = other RNA
ccaggaccatctgctctcac

SEQ ID NO: 13788 - RNA, 20 nt, synthetic construct
  source 1..20: mol_type = other RNA
cagatggtcctgggtgcact

SEQ ID NO: 13789 - RNA, 20 nt, synthetic construct
  source 1..20: mol_type = other RNA
aggatcatccgagtgcaccc

SEQ ID NO: 13790 - RNA, 20 nt, synthetic construct
  source 1..20: mol_type = other RNA
gatgatcctgcctagccagc

SEQ ID NO: 13791 - RNA, 20 nt, synthetic construct
  source 1..20: mol_type = other RNA
tgcaatccagctggctaggc

SEQ ID NO: 13792 - RNA, 20 nt, synthetic construct
  source 1..20: mol_type = other RNA
tagccagctggattgcagag

SEQ ID NO: 13793 - RNA, 20 nt, synthetic construct
  source 1..20: mol_type = other RNA
actctgcaatccagctggct

SEQ ID NO: 13794 - RNA, 20 nt, synthetic construct
  source 1..20: mol_type = other RNA
tgaccactctgcaatccagc

SEQ ID NO: 13795 - RNA, 20 nt, synthetic construct
  source 1..20: mol_type = other RNA
tcattatcagtgagctattg

SEQ ID NO: 13796 - RNA, 20 nt, synthetic construct
  source 1..20: mol_type = other RNA
cattatcagtgagctattga

SEQ ID NO: 13797 - RNA, 20 nt, synthetic construct
  source 1..20: mol_type = other RNA
attatcagtgagctattgag

SEQ ID NO: 13798 - RNA, 20 nt, synthetic construct
  source 1..20: mol_type = other RNA
agcagtcagtgtcatgtata

SEQ ID NO: 13799 - RNA, 20 nt, synthetic construct
  source 1..20: mol_type = other RNA
gtcagtgtcatgtataagga

SEQ ID NO: 13800 - RNA, 20 nt, synthetic construct
  source 1..20: mol_type = other RNA
tcagtgtcatgtataaggat

SEQ ID NO: 13801 - RNA, 20 nt, synthetic construct
  source 1..20: mol_type = other RNA
tgtcatgtataaggatgggt

SEQ ID NO: 13802 - RNA, 20 nt, synthetic construct
  source 1..20: mol_type = other RNA
gtcatgtataaggatgggtt

SEQ ID NO: 13803 - RNA, 20 nt, synthetic construct
  source 1..20: mol_type = other RNA
tcatgtataaggatgggttg

SEQ ID NO: 13804 - RNA, 20 nt, synthetic construct
  source 1..20: mol_type = other RNA
ataaggatgggttggggtac

SEQ ID NO: 13805 - RNA, 20 nt, synthetic construct
  source 1..20: mol_type = other RNA
accggccaacgcccgccttg

SEQ ID NO: 13806 - RNA, 20 nt, synthetic construct
  source 1..20: mol_type = other RNA
ccaacgcccgccttgaggcc

SEQ ID NO: 13807 - RNA, 20 nt, synthetic construct
  source 1..20: mol_type = other RNA
gcctcaaggcgggcgttggc

SEQ ID NO: 13808 - RNA, 20 nt, synthetic construct
  source 1..20: mol_type = other RNA
ccaggcctcaaggcgggcgt

SEQ ID NO: 13809 - RNA, 20 nt, synthetic construct
  source 1..20: mol_type = other RNA
ccgccttgaggcctggccgc

SEQ ID NO: 13810 - RNA, 20 nt, synthetic construct
  source 1..20: mol_type = other RNA
cttgaggcctggccgccgga

SEQ ID NO: 13811 - RNA, 20 nt, synthetic construct
  source 1..20: mol_type = other RNA
ttgaggcctggccgccggat

SEQ ID NO: 13812 - RNA, 20 nt, synthetic construct
  source 1..20: mol_type = other RNA
aggcctggccgccggatggg

SEQ ID NO: 13813 - RNA, 20 nt, synthetic construct
  source 1..20: mol_type = other RNA
tcgcctcccatccggcggcc

SEQ ID NO: 13814 - RNA, 20 nt, synthetic construct
  source 1..20: mol_type = other RNA
tgctctcgcctcccatccgg

SEQ ID NO: 13815 - RNA, 20 nt, synthetic construct
  source 1..20: mol_type = other RNA
ttgtgctctcgcctcccatc

SEQ ID NO: 13816 - RNA, 20 nt, synthetic construct
  source 1..20: mol_type = other RNA
gcgagagcacaagagagtcc

SEQ ID NO: 13817 - RNA, 20 nt, synthetic construct
  source 1..20: mol_type = other RNA
agcacaagagagtcctggct

SEQ ID NO: 13818 - RNA, 20 nt, synthetic construct
  source 1..20: mol_type = other RNA
ctaggtgtgccccgctctgc

SEQ ID NO: 13819 - RNA, 20 nt, synthetic construct
  source 1..20: mol_type = other RNA
taggtgtgccccgctctgca

SEQ ID NO: 13820 - RNA, 20 nt, synthetic construct
  source 1..20: mol_type = other RNA
tggtgtggccctgcagagcg

SEQ ID NO: 13821 - RNA, 20 nt, synthetic construct
  source 1..20: mol_type = other RNA
atggtgtggccctgcagagc

SEQ ID NO: 13822 - RNA, 20 nt, synthetic construct
  source 1..20: mol_type = other RNA
gatggtgtggccctgcagag

SEQ ID NO: 13823 - RNA, 20 nt, synthetic construct
  source 1..20: mol_type = other RNA
tgcagggccacaccatccac

SEQ ID NO: 13824 - RNA, 20 nt, synthetic construct
  source 1..20: mol_type = other RNA
agggtttccagtggatggtg

SEQ ID NO: 13825 - RNA, 20 nt, synthetic construct
  source 1..20: mol_type = other RNA
ggcacagggtttccagtgga

SEQ ID NO: 13826 - RNA, 20 nt, synthetic construct
  source 1..20: mol_type = other RNA
actggaaaccctgtgcccac

SEQ ID NO: 13827 - RNA, 20 nt, synthetic construct
  source 1..20: mol_type = other RNA
ctggaaaccctgtgcccact

SEQ ID NO: 13828 - RNA, 20 nt, synthetic construct
  source 1..20: mol_type = other RNA
agtgggcacagggtttccag

SEQ ID NO: 13829 - RNA, 20 nt, synthetic construct
  source 1..20: mol_type = other RNA
cacgcagcccagtgggcaca

SEQ ID NO: 13830 - RNA, 20 nt, synthetic construct
  source 1..20: mol_type = other RNA
gcacgcagcccagtgggcac

SEQ ID NO: 13831 - RNA, 20 nt, synthetic construct
  source 1..20: mol_type = other RNA
ccactgggctgcgtgctaag

SEQ ID NO: 13832 - RNA, 20 nt, synthetic construct
  source 1..20: mol_type = other RNA
ctcttagcacgcagcccagt

SEQ ID NO: 13833 - RNA, 20 nt, synthetic construct
  source 1..20: mol_type = other RNA
cctcttagcacgcagcccag

SEQ ID NO: 13834 - RNA, 20 nt, synthetic construct
  source 1..20: mol_type = other RNA
ggctgcgtgctaagaggctg

SEQ ID NO: 13835 - RNA, 20 nt, synthetic construct
  source 1..20: mol_type = other RNA
taaaatttggacaagagcat

SEQ ID NO: 13836 - RNA, 20 nt, synthetic construct
  source 1..20: mol_type = other RNA
actgcagattcagtaaaatt

SEQ ID NO: 13837 - RNA, 20 nt, synthetic construct
  source 1..20: mol_type = other RNA
caagctaacacattaaactt

SEQ ID NO: 13838 - RNA, 20 nt, synthetic construct
  source 1..20: mol_type = other RNA
taaataaataaataaataaa

SEQ ID NO: 13839 - RNA, 20 nt, synthetic construct
  source 1..20: mol_type = other RNA
aatttgactgggactttctg

SEQ ID NO: 13840 - RNA, 20 nt, synthetic construct
  source 1..20: mol_type = other RNA
gttggaattaaaatttgact

SEQ ID NO: 13841 - RNA, 20 nt, synthetic construct
  source 1..20: mol_type = other RNA
tgttggaattaaaatttgac

SEQ ID NO: 13842 - RNA, 20 nt, synthetic construct
  source 1..20: mol_type = other RNA
ggaaactgctgaatatctgt

SEQ ID NO: 13843 - RNA, 20 nt, synthetic construct
  source 1..20: mol_type = other RNA
tctaagaacaatgagagttc

SEQ ID NO: 13844 - RNA, 20 nt, synthetic construct
  source 1..20: mol_type = other RNA
ctaagaacaatgagagttct

SEQ ID NO: 13845 - RNA, 20 nt, synthetic construct
  source 1..20: mol_type = other RNA
taagaacaatgagagttctg

SEQ ID NO: 13846 - RNA, 20 nt, synthetic construct
  source 1..20: mol_type = other RNA
agaactctcattgttcttag

SEQ ID NO: 13847 - RNA, 20 nt, synthetic construct
  source 1..20: mol_type = other RNA
gggctagccagtgtttctct

SEQ ID NO: 13848 - RNA, 20 nt, synthetic construct
  source 1..20: mol_type = other RNA
agtgtttctcttggaaaata

SEQ ID NO: 13849 - RNA, 20 nt, synthetic construct
  source 1..20: mol_type = other RNA
ttattttccaagagaaacac

SEQ ID NO: 13850 - RNA, 20 nt, synthetic construct
  source 1..20: mol_type = other RNA
tctcttggaaaataaggaag

SEQ ID NO: 13851 - RNA, 20 nt, synthetic construct
  source 1..20: mol_type = other RNA
ctcttggaaaataaggaaga

SEQ ID NO: 13852 - RNA, 20 nt, synthetic construct
  source 1..20: mol_type = other RNA
aaaataaggaagagggaaag

SEQ ID NO: 13853 - RNA, 20 nt, synthetic construct
  source 1..20: mol_type = other RNA
ttcatttaaaaacctgccct

SEQ ID NO: 13854 - RNA, 20 nt, synthetic construct
  source 1..20: mol_type = other RNA
tcatttaaaaacctgcccta

SEQ ID NO: 13855 - RNA, 20 nt, synthetic construct
  source 1..20: mol_type = other RNA
tttaaaaacctgccctaggg

SEQ ID NO: 13856 - RNA, 20 nt, synthetic construct
  source 1..20: mol_type = other RNA
gaacgctgcctccctagggc

SEQ ID NO: 13857 - RNA, 20 nt, synthetic construct
  source 1..20: mol_type = other RNA
cagggaacgctgcctcccta

SEQ ID NO: 13858 - RNA, 20 nt, synthetic construct
  source 1..20: mol_type = other RNA
acagggaacgctgcctccct

SEQ ID NO: 13859 - RNA, 20 nt, synthetic construct
  source 1..20: mol_type = other RNA
agcgttccctgtgaactccg

SEQ ID NO: 13860 - RNA, 20 nt, synthetic construct
  source 1..20: mol_type = other RNA
ctgtggcctcggagttcaca

SEQ ID NO: 13861 - RNA, 20 nt, synthetic construct
  source 1..20: mol_type = other RNA
actgtggcctcggagttcac

SEQ ID NO: 13862 - RNA, 20 nt, synthetic construct
  source 1..20: mol_type = other RNA
gaggccacagtgagcagagc

SEQ ID NO: 13863 - RNA, 20 nt, synthetic construct
  source 1..20: mol_type = other RNA
tgctctgctcactgtggcct

SEQ ID NO: 13864 - RNA, 20 nt, synthetic construct
  source 1..20: mol_type = other RNA
ccacagtgagcagagcaggc

SEQ ID NO: 13865 - RNA, 20 nt, synthetic construct
  source 1..20: mol_type = other RNA
cagtgagcagagcaggctgg

SEQ ID NO: 13866 - RNA, 20 nt, synthetic construct
  source 1..20: mol_type = other RNA
ccagcctgctctgctcactg

SEQ ID NO: 13867 - RNA, 20 nt, synthetic construct
  source 1..20: mol_type = other RNA
agagcaggctggaggcctcc

SEQ ID NO: 13868 - RNA, 20 nt, synthetic construct
  source 1..20: mol_type = other RNA
ggaggggcaggacagccggg

SEQ ID NO: 13869 - RNA, 20 nt, synthetic construct
  source 1..20: mol_type = other RNA
gcaggaggggcaggacagcc

SEQ ID NO: 13870 - RNA, 20 nt, synthetic construct
  source 1..20: mol_type = other RNA
ggcaggaggggcaggacagc

SEQ ID NO: 13871 - RNA, 20 nt, synthetic construct
  source 1..20: mol_type = other RNA
aggcatgtggcaggaggggc

SEQ ID NO: 13872 - RNA, 20 nt, synthetic construct
  source 1..20: mol_type = other RNA
tcacaggcatgtggcaggag

SEQ ID NO: 13873 - RNA, 20 nt, synthetic construct
  source 1..20: mol_type = other RNA
ttcacaggcatgtggcagga

SEQ ID NO: 13874 - RNA, 20 nt, synthetic construct
  source 1..20: mol_type = other RNA
tttcacaggcatgtggcagg

SEQ ID NO: 13875 - RNA, 20 nt, synthetic construct
  source 1..20: mol_type = other RNA
cattttcacaggcatgtggc

SEQ ID NO: 13876 - RNA, 20 nt, synthetic construct
  source 1..20: mol_type = other RNA
ctagcattttcacaggcatg

SEQ ID NO: 13877 - RNA, 20 nt, synthetic construct
  source 1..20: mol_type = other RNA
gcctgtgaaaatgctagata

SEQ ID NO: 13878 - RNA, 20 nt, synthetic construct
  source 1..20: mol_type = other RNA
tccttatctagcattttcac

SEQ ID NO: 13879 - RNA, 20 nt, synthetic construct
  source 1..20: mol_type = other RNA
caacttccacgctccttcag

SEQ ID NO: 13880 - RNA, 20 nt, synthetic construct
  source 1..20: mol_type = other RNA
aacttccacgctccttcagt

SEQ ID NO: 13881 - RNA, 20 nt, synthetic construct
  source 1..20: mol_type = other RNA
acttccacgctccttcagtg

SEQ ID NO: 13882 - RNA, 20 nt, synthetic construct
  source 1..20: mol_type = other RNA
acatccccactgaaggagcg

SEQ ID NO: 13883 - RNA, 20 nt, synthetic construct
  source 1..20: mol_type = other RNA
gtcaaagacatccccactga

SEQ ID NO: 13884 - RNA, 20 nt, synthetic construct
  source 1..20: mol_type = other RNA
ttgactcagagctctgccac

SEQ ID NO: 13885 - RNA, 20 nt, synthetic construct
  source 1..20: mol_type = other RNA
ctgttcgtggagataaccag

SEQ ID NO: 13886 - RNA, 20 nt, synthetic construct
  source 1..20: mol_type = other RNA
cgaacagaaaatgccacaga

SEQ ID NO: 13887 - RNA, 20 nt, synthetic construct
  source 1..20: mol_type = other RNA
gaacagaaaatgccacagat

SEQ ID NO: 13888 - RNA, 20 nt, synthetic construct
  source 1..20: mol_type = other RNA
tctgtggcattttctgttcg

SEQ ID NO: 13889 - RNA, 20 nt, synthetic construct
  source 1..20: mol_type = other RNA
acagtgaattaacccatctg

SEQ ID NO: 13890 - RNA, 20 nt, synthetic construct
  source 1..20: mol_type = other RNA
tctcattttccctcagtttc

SEQ ID NO: 13891 - RNA, 20 nt, synthetic construct
  source 1..20: mol_type = other RNA
agagaaaagcctgaaactga

SEQ ID NO: 13892 - RNA, 20 nt, synthetic construct
  source 1..20: mol_type = other RNA
gagagaaaagcctgaaactg

SEQ ID NO: 13893 - RNA, 20 nt, synthetic construct
  source 1..20: mol_type = other RNA
ttaagcgaggaaaacaggca

SEQ ID NO: 13894 - RNA, 20 nt, synthetic construct
  source 1..20: mol_type = other RNA
attttttaagcgaggaaaac

SEQ ID NO: 13895 - RNA, 20 nt, synthetic construct
  source 1..20: mol_type = other RNA
tcctcgcttaaaaaatgatg

SEQ ID NO: 13896 - RNA, 20 nt, synthetic construct
  source 1..20: mol_type = other RNA
cctcgcttaaaaaatgatgt

SEQ ID NO: 13897 - RNA, 20 nt, synthetic construct
  source 1..20: mol_type = other RNA
ctcgcttaaaaaatgatgtg

SEQ ID NO: 13898 - RNA, 20 nt, synthetic construct
  source 1..20: mol_type = other RNA
tcgcttaaaaaatgatgtgg

SEQ ID NO: 13899 - RNA, 20 nt, synthetic construct
  source 1..20: mol_type = other RNA
cccacatcattttttaagcg

SEQ ID NO: 13900 - RNA, 20 nt, synthetic construct
  source 1..20: mol_type = other RNA
tatcggggtagatgcgttta

SEQ ID NO: 13901 - RNA, 20 nt, synthetic construct
  source 1..20: mol_type = other RNA
ctatcggggtagatgcgttt

SEQ ID NO: 13902 - RNA, 20 nt, synthetic construct
  source 1..20: mol_type = other RNA
aagaaaacataaatctatcg

SEQ ID NO: 13903 - RNA, 20 nt, synthetic construct
  source 1..20: mol_type = other RNA
aaagaaaacataaatctatc

SEQ ID NO: 13904 - RNA, 20 nt, synthetic construct
  source 1..20: mol_type = other RNA
aaaagaaaacataaatctat

SEQ ID NO: 13905 - RNA, 20 nt, synthetic construct
  source 1..20: mol_type = other RNA
tgagacgcaaagtggactaa

SEQ ID NO: 13906 - RNA, 20 nt, synthetic construct
  source 1..20: mol_type = other RNA
tttagggctgagacgcaaag

SEQ ID NO: 13907 - RNA, 20 nt, synthetic construct
  source 1..20: mol_type = other RNA
taatcaaaaacttaatttta

SEQ ID NO: 13908 - RNA, 20 nt, synthetic construct
  source 1..20: mol_type = other RNA
ataatcaaaaacttaatttt

SEQ ID NO: 13909 - RNA, 20 nt, synthetic construct
  source 1..20: mol_type = other RNA
aagtttttgattataatgta

SEQ ID NO: 13910 - RNA, 20 nt, synthetic construct
  source 1..20: mol_type = other RNA
gttttaccatattttaactc

SEQ ID NO: 13911 - RNA, 20 nt, synthetic construct
  source 1..20: mol_type = other RNA
aaaaagccagagttaaaata

SEQ ID NO: 13912 - RNA, 20 nt, synthetic construct
  source 1..20: mol_type = other RNA
acaaaagaaaaataacagaa

SEQ ID NO: 13913 - RNA, 20 nt, synthetic construct
  source 1..20: mol_type = other RNA
aatggccttctagaactatc

SEQ ID NO: 13914 - RNA, 20 nt, synthetic construct
  source 1..20: mol_type = other RNA
ctagaactatcaggaacttc

SEQ ID NO: 13915 - RNA, 20 nt, synthetic construct
  source 1..20: mol_type = other RNA
aagttcctgatagttctaga

SEQ ID NO: 13916 - RNA, 20 nt, synthetic construct
  source 1..20: mol_type = other RNA
cttctggatctagtaccctg

SEQ ID NO: 13917 - RNA, 20 nt, synthetic construct
  source 1..20: mol_type = other RNA
ttctggatctagtaccctgt

SEQ ID NO: 13918 - RNA, 20 nt, synthetic construct
  source 1..20: mol_type = other RNA
tctggatctagtaccctgtg

SEQ ID NO: 13919 - RNA, 20 nt, synthetic construct
  source 1..20: mol_type = other RNA
tagtaccctgtggggacaga

SEQ ID NO: 13920 - RNA, 20 nt, synthetic construct
  source 1..20: mol_type = other RNA
ccctgtggggacagatggtc

SEQ ID NO: 13921 - RNA, 20 nt, synthetic construct
  source 1..20: mol_type = other RNA
ccagaccatctgtccccaca

SEQ ID NO: 13922 - RNA, 20 nt, synthetic construct
  source 1..20: mol_type = other RNA
tccagaccatctgtccccac

SEQ ID NO: 13923 - RNA, 20 nt, synthetic construct
  source 1..20: mol_type = other RNA
tggtctggagccagcgcact

SEQ ID NO: 13924 - RNA, 20 nt, synthetic construct
  source 1..20: mol_type = other RNA
gagagatcatccaagtgcgc

SEQ ID NO: 13925 - RNA, 20 nt, synthetic construct
  source 1..20: mol_type = other RNA
gatgatctctctcagccatc

SEQ ID NO: 13926 - RNA, 20 nt, synthetic construct
  source 1..20: mol_type = other RNA
agttcactctatggtccaga

SEQ ID NO: 13927 - RNA, 20 nt, synthetic construct
  source 1..20: mol_type = other RNA
acagtaacaagttcactcta

SEQ ID NO: 13928 - RNA, 20 nt, synthetic construct
  source 1..20: mol_type = other RNA
aacttgttactgtccctcca

SEQ ID NO: 13929 - RNA, 20 nt, synthetic construct
  source 1..20: mol_type = other RNA
tcatagttgtcagccttgga

SEQ ID NO: 13930 - RNA, 20 nt, synthetic construct
  source 1..20: mol_type = other RNA
ctcatagttgtcagccttgg

SEQ ID NO: 13931 - RNA, 20 nt, synthetic construct
  source 1..20: mol_type = other RNA
gagctcatagttgtcagcct

SEQ ID NO: 13932 - RNA, 20 nt, synthetic construct
  source 1..20: mol_type = other RNA
gtttaatttagacccaagaa

SEQ ID NO: 13933 - RNA, 20 nt, synthetic construct
  source 1..20: mol_type = other RNA
acacacacacagcctttctt

SEQ ID NO: 13934 - RNA, 20 nt, synthetic construct
  source 1..20: mol_type = other RNA
cacacacacacagcctttct

SEQ ID NO: 13935 - RNA, 20 nt, synthetic construct
  source 1..20: mol_type = other RNA
acagacacacacagaaacac

SEQ ID NO: 13936 - RNA, 20 nt, synthetic construct
  source 1..20: mol_type = other RNA
tgtgtgtacatgtgtgtctg

SEQ ID NO: 13937 - RNA, 20 nt, synthetic construct
  source 1..20: mol_type = other RNA
gtgtgtacatgtgtgtctgt

SEQ ID NO: 13938 - RNA, 20 nt, synthetic construct
  source 1..20: mol_type = other RNA
tgtgtacatgtgtgtctgtg

SEQ ID NO: 13939 - RNA, 20 nt, synthetic construct
  source 1..20: mol_type = other RNA
ggggtgtgtctgtgtgtgca

SEQ ID NO: 13940 - RNA, 20 nt, synthetic construct
  source 1..20: mol_type = other RNA
tgtgtgtctgtgcgtgtgca

SEQ ID NO: 13941 - RNA, 20 nt, synthetic construct
  source 1..20: mol_type = other RNA
cagaaagggaagtaagagta

SEQ ID NO: 13942 - RNA, 20 nt, synthetic construct
  source 1..20: mol_type = other RNA
ttatggagaagtgacagaaa

SEQ ID NO: 13943 - RNA, 20 nt, synthetic construct
  source 1..20: mol_type = other RNA
attatggagaagtgacagaa

SEQ ID NO: 13944 - RNA, 20 nt, synthetic construct
  source 1..20: mol_type = other RNA
ctccataattctttgtattt

SEQ ID NO: 13945 - RNA, 20 nt, synthetic construct
  source 1..20: mol_type = other RNA
ataattctttgtatttcggt

SEQ ID NO: 13946 - RNA, 20 nt, synthetic construct
  source 1..20: mol_type = other RNA
taattctttgtatttcggtt

SEQ ID NO: 13947 - RNA, 20 nt, synthetic construct
  source 1..20: mol_type = other RNA
aaccgaaatacaaagaatta

SEQ ID NO: 13948 - RNA, 20 nt, synthetic construct
  source 1..20: mol_type = other RNA
tctttgtatttcggttgggc

SEQ ID NO: 13949 - RNA, 20 nt, synthetic construct
  source 1..20: mol_type = other RNA
tcggttgggctggtatctcg

SEQ ID NO: 13950 - RNA, 20 nt, synthetic construct
  source 1..20: mol_type = other RNA
gttgggctggtatctcgcgg

SEQ ID NO: 13951 - RNA, 20 nt, synthetic construct
  source 1..20: mol_type = other RNA
atataggaatgcaggaaaag

SEQ ID NO: 13952 - RNA, 20 nt, synthetic construct
  source 1..20: mol_type = other RNA
ataatgaaatataggaatgc

SEQ ID NO: 13953 - RNA, 20 nt, synthetic construct
  source 1..20: mol_type = other RNA
aagagcaaataatgaaatat

SEQ ID NO: 13954 - RNA, 20 nt, synthetic construct
  source 1..20: mol_type = other RNA
tttgctcttgttcctcttct

SEQ ID NO: 13955 - RNA, 20 nt, synthetic construct
  source 1..20: mol_type = other RNA
ttgctcttgttcctcttcta

SEQ ID NO: 13956 - RNA, 20 nt, synthetic construct
  source 1..20: mol_type = other RNA
tattgtaaaagccctagaag

SEQ ID NO: 13957 - RNA, 20 nt, synthetic construct
  source 1..20: mol_type = other RNA
agggcttttacaatatagcc

SEQ ID NO: 13958 - RNA, 20 nt, synthetic construct
  source 1..20: mol_type = other RNA
gcttttacaatatagccagg

SEQ ID NO: 13959 - RNA, 20 nt, synthetic construct
  source 1..20: mol_type = other RNA
acaatatagccaggaggatg

SEQ ID NO: 13960 - RNA, 20 nt, synthetic construct
  source 1..20: mol_type = other RNA
actgggtttccacatcctcc

SEQ ID NO: 13961 - RNA, 20 nt, synthetic construct
  source 1..20: mol_type = other RNA
ttgtgtgtcatcttgtaact

SEQ ID NO: 13962 - RNA, 20 nt, synthetic construct
  source 1..20: mol_type = other RNA
cttgtgtgtcatcttgtaac

SEQ ID NO: 13963 - RNA, 20 nt, synthetic construct
  source 1..20: mol_type = other RNA
agtgtcacaatcgctgtgct

SEQ ID NO: 13964 - RNA, 20 nt, synthetic construct
  source 1..20: mol_type = other RNA
gtgtcacaatcgctgtgctt

SEQ ID NO: 13965 - RNA, 20 nt, synthetic construct
  source 1..20: mol_type = other RNA
tgtgcttgggccctacctcc

SEQ ID NO: 13966 - RNA, 20 nt, synthetic construct
  source 1..20: mol_type = other RNA
ggccctacctcctggagacc

SEQ ID NO: 13967 - RNA, 20 nt, synthetic construct
  source 1..20: mol_type = other RNA
gccctacctcctggagacca

SEQ ID NO: 13968 - RNA, 20 nt, synthetic construct
  source 1..20: mol_type = other RNA
ctacctcctggagaccaggg

SEQ ID NO: 13969 - RNA, 20 nt, synthetic construct
  source 1..20: mol_type = other RNA
tacctcctggagaccagggt

SEQ ID NO: 13970 - RNA, 20 nt, synthetic construct
  source 1..20: mol_type = other RNA
accctggtctccaggaggta

SEQ ID NO: 13971 - RNA, 20 nt, synthetic construct
  source 1..20: mol_type = other RNA
caccctggtctccaggaggt

SEQ ID NO: 13972 - RNA, 20 nt, synthetic construct
  source 1..20: mol_type = other RNA
tcctggagaccagggtggga

SEQ ID NO: 13973 - RNA, 20 nt, synthetic construct
  source 1..20: mol_type = other RNA
gtcccaccctggtctccagg

SEQ ID NO: 13974 - RNA, 20 nt, synthetic construct
  source 1..20: mol_type = other RNA
accgtcccaccctggtctcc

SEQ ID NO: 13975 - RNA, 20 nt, synthetic construct
  source 1..20: mol_type = other RNA
ccagggtgggacggtgtctc

SEQ ID NO: 13976 - RNA, 20 nt, synthetic construct
  source 1..20: mol_type = other RNA
ccagagacaccgtcccaccc

SEQ ID NO: 13977 - RNA, 20 nt, synthetic construct
  source 1..20: mol_type = other RNA
tgggacggtgtctctggata

SEQ ID NO: 13978 - RNA, 20 nt, synthetic construct
  source 1..20: mol_type = other RNA
gacggtgtctctggatatgg

SEQ ID NO: 13979 - RNA, 20 nt, synthetic construct
  source 1..20: mol_type = other RNA
acggtgtctctggatatgga

SEQ ID NO: 13980 - RNA, 20 nt, synthetic construct
  source 1..20: mol_type = other RNA
tgtctctggatatggaggga

SEQ ID NO: 13981 - RNA, 20 nt, synthetic construct
  source 1..20: mol_type = other RNA
gtctctggatatggagggaa

SEQ ID NO: 13982 - RNA, 20 nt, synthetic construct
  source 1..20: mol_type = other RNA
tctggatatggagggaaggg

SEQ ID NO: 13983 - RNA, 20 nt, synthetic construct
  source 1..20: mol_type = other RNA
gagggaagggcggaagatca

SEQ ID NO: 13984 - RNA, 20 nt, synthetic construct
  source 1..20: mol_type = other RNA
agggaagggcggaagatcac

SEQ ID NO: 13985 - RNA, 20 nt, synthetic construct
  source 1..20: mol_type = other RNA
gggaagggcggaagatcacg

SEQ ID NO: 13986 - RNA, 20 nt, synthetic construct
  source 1..20: mol_type = other RNA
aagggcggaagatcacgggg

SEQ ID NO: 13987 - RNA, 20 nt, synthetic construct
  source 1..20: mol_type = other RNA
gaagatcacggggtggcaga

SEQ ID NO: 13988 - RNA, 20 nt, synthetic construct
  source 1..20: mol_type = other RNA
tggcagaaggcccgactgtc

SEQ ID NO: 13989 - RNA, 20 nt, synthetic construct
  source 1..20: mol_type = other RNA
ggcccgactgtccggtcttc

SEQ ID NO: 13990 - RNA, 20 nt, synthetic construct
  source 1..20: mol_type = other RNA
ctgtccggtcttctggaagc

SEQ ID NO: 13991 - RNA, 20 nt, synthetic construct
  source 1..20: mol_type = other RNA
tgtccggtcttctggaagct

SEQ ID NO: 13992 - RNA, 20 nt, synthetic construct
  source 1..20: mol_type = other RNA
gtccggtcttctggaagctg

SEQ ID NO: 13993 - RNA, 20 nt, synthetic construct
  source 1..20: mol_type = other RNA
gaccccagcttccagaagac

SEQ ID NO: 13994 - RNA, 20 nt, synthetic construct
  source 1..20: mol_type = other RNA
ttctggaagctggggtctcg

SEQ ID NO: 13995 - RNA, 20 nt, synthetic construct
  source 1..20: mol_type = other RNA
agctggggtctcgtggtcgc

SEQ ID NO: 13996 - RNA, 20 nt, synthetic construct
  source 1..20: mol_type = other RNA
gctggggtctcgtggtcgct

SEQ ID NO: 13997 - RNA, 20 nt, synthetic construct
  source 1..20: mol_type = other RNA
gggtctcgtggtcgctgggc

SEQ ID NO: 13998 - RNA, 20 nt, synthetic construct
  source 1..20: mol_type = other RNA
tctcgtggtcgctgggctgg

SEQ ID NO: 13999 - RNA, 20 nt, synthetic construct
  source 1..20: mol_type = other RNA
aacctagagtaaccgagagc

SEQ ID NO: 14000 - RNA, 20 nt, synthetic construct
  source 1..20: mol_type = other RNA
atcctgctctcggttactct

SEQ ID NO: 14001 - RNA, 20 nt, synthetic construct
  source 1..20: mol_type = other RNA
gggtgcagtcatcctgctct

SEQ ID NO: 14002 - RNA, 20 nt, synthetic construct
  source 1..20: mol_type = other RNA
acccctgactgccgactcac

SEQ ID NO: 14003 - RNA, 20 nt, synthetic construct
  source 1..20: mol_type = other RNA
cccctgactgccgactcacc

SEQ ID NO: 14004 - RNA, 20 nt, synthetic construct
  source 1..20: mol_type = other RNA
cccggtgagtcggcagtcag

SEQ ID NO: 14005 - RNA, 20 nt, synthetic construct
  source 1..20: mol_type = other RNA
actgccgactcaccgggctt

SEQ ID NO: 14006 - RNA, 20 nt, synthetic construct
  source 1..20: mol_type = other RNA
agcccggtgagtcggcagtc

SEQ ID NO: 14007 - RNA, 20 nt, synthetic construct
  source 1..20: mol_type = other RNA
gccgactcaccgggcttcgg

SEQ ID NO: 14008 - RNA, 20 nt, synthetic construct
  source 1..20: mol_type = other RNA
ccgactcaccgggcttcgga

SEQ ID NO: 14009 - RNA, 20 nt, synthetic construct
  source 1..20: mol_type = other RNA
ccctccgaagcccggtgagt

SEQ ID NO: 14010 - RNA, 20 nt, synthetic construct
  source 1..20: mol_type = other RNA
caccgggcttcggagggcca

SEQ ID NO: 14011 - RNA, 20 nt, synthetic construct
  source 1..20: mol_type = other RNA
accgggcttcggagggccat

SEQ ID NO: 14012 - RNA, 20 nt, synthetic construct
  source 1..20: mol_type = other RNA
acccatggccctccgaagcc

SEQ ID NO: 14013 - RNA, 20 nt, synthetic construct
  source 1..20: mol_type = other RNA
caagtggaatcacacaccca

SEQ ID NO: 14014 - RNA, 20 nt, synthetic construct
  source 1..20: mol_type = other RNA
ggaagtaggaggatcacaag

SEQ ID NO: 14015 - RNA, 20 nt, synthetic construct
  source 1..20: mol_type = other RNA
cctacttccccagcccaccc

SEQ ID NO: 14016 - RNA, 20 nt, synthetic construct
  source 1..20: mol_type = other RNA
gggtgggctggggaagtagg

SEQ ID NO: 14017 - RNA, 20 nt, synthetic construct
  source 1..20: mol_type = other RNA
acttccccagcccaccctgg

SEQ ID NO: 14018 - RNA, 20 nt, synthetic construct
  source 1..20: mol_type = other RNA
ccagggtgggctggggaagt

SEQ ID NO: 14019 - RNA, 20 nt, synthetic construct
  source 1..20: mol_type = other RNA
gagaccaccagggtgggctg

SEQ ID NO: 14020 - RNA, 20 nt, synthetic construct
  source 1..20: mol_type = other RNA
ggagaccaccagggtgggct

SEQ ID NO: 14021 - RNA, 20 nt, synthetic construct
  source 1..20: mol_type = other RNA
gggagaccaccagggtgggc

SEQ ID NO: 14022 - RNA, 20 nt, synthetic construct
  source 1..20: mol_type = other RNA
aagtgggagaccaccagggt

SEQ ID NO: 14023 - RNA, 20 nt, synthetic construct
  source 1..20: mol_type = other RNA
gaagtgggagaccaccaggg

SEQ ID NO: 14024 - RNA, 20 nt, synthetic construct
  source 1..20: mol_type = other RNA
agagaagtgggagaccacca

SEQ ID NO: 14025 - RNA, 20 nt, synthetic construct
  source 1..20: mol_type = other RNA
gagagaagtgggagaccacc

SEQ ID NO: 14026 - RNA, 20 nt, synthetic construct
  source 1..20: mol_type = other RNA
cacttctctctctctgcctg

SEQ ID NO: 14027 - RNA, 20 nt, synthetic construct
  source 1..20: mol_type = other RNA
acaggcagagagagagaagt

SEQ ID NO: 14028 - RNA, 20 nt, synthetic construct
  source 1..20: mol_type = other RNA
cacaggcagagagagagaag

SEQ ID NO: 14029 - RNA, 20 nt, synthetic construct
  source 1..20: mol_type = other RNA
agtcggttataacactccac

SEQ ID NO: 14030 - RNA, 20 nt, synthetic construct
  source 1..20: mol_type = other RNA
tataaccgactccttcttct

SEQ ID NO: 14031 - RNA, 20 nt, synthetic construct
  source 1..20: mol_type = other RNA
agatgcctagaagaaggagt

SEQ ID NO: 14032 - RNA, 20 nt, synthetic construct
  source 1..20: mol_type = other RNA
ggatggagatgcctagaaga

SEQ ID NO: 14033 - RNA, 20 nt, synthetic construct
  source 1..20: mol_type = other RNA
gaactggtctggggttggga

SEQ ID NO: 14034 - RNA, 20 nt, synthetic construct
  source 1..20: mol_type = other RNA
aagggaactggtctggggtt

SEQ ID NO: 14035 - RNA, 20 nt, synthetic construct
  source 1..20: mol_type = other RNA
taagggaactggtctggggt

SEQ ID NO: 14036 - RNA, 20 nt, synthetic construct
  source 1..20: mol_type = other RNA
ggtttaagggaactggtctg

SEQ ID NO: 14037 - RNA, 20 nt, synthetic construct
  source 1..20: mol_type = other RNA
tggtttaagggaactggtct

SEQ ID NO: 14038 - RNA, 20 nt, synthetic construct
  source 1..20: mol_type = other RNA
gtggtttaagggaactggtc

SEQ ID NO: 14039 - RNA, 20 nt, synthetic construct
  source 1..20: mol_type = other RNA
gggaggtggtttaagggaac

SEQ ID NO: 14040 - RNA, 20 nt, synthetic construct
  source 1..20: mol_type = other RNA
cttaaaccacctcccaccac

SEQ ID NO: 14041 - RNA, 20 nt, synthetic construct
  source 1..20: mol_type = other RNA
tgtggtgggaggtggtttaa

SEQ ID NO: 14042 - RNA, 20 nt, synthetic construct
  source 1..20: mol_type = other RNA
ctgtggtgggaggtggttta

SEQ ID NO: 14043 - RNA, 20 nt, synthetic construct
  source 1..20: mol_type = other RNA
gggggtcctgtggtgggagg

SEQ ID NO: 14044 - RNA, 20 nt, synthetic construct
  source 1..20: mol_type = other RNA
tgtgggggtcctgtggtggg

SEQ ID NO: 14045 - RNA, 20 nt, synthetic construct
  source 1..20: mol_type = other RNA
accacaggacccccacaagc

SEQ ID NO: 14046 - RNA, 20 nt, synthetic construct
  source 1..20: mol_type = other RNA
ccacaggacccccacaagca

SEQ ID NO: 14047 - RNA, 20 nt, synthetic construct
  source 1..20: mol_type = other RNA
gcttgtgggggtcctgtggt

SEQ ID NO: 14048 - RNA, 20 nt, synthetic construct
  source 1..20: mol_type = other RNA
tgcttgtgggggtcctgtgg

SEQ ID NO: 14049 - RNA, 20 nt, synthetic construct
  source 1..20: mol_type = other RNA
ccctgcttgtgggggtcctg

SEQ ID NO: 14050 - RNA, 20 nt, synthetic construct
  source 1..20: mol_type = other RNA
tgagaggtccctgcttgtgg

SEQ ID NO: 14051 - RNA, 20 nt, synthetic construct
  source 1..20: mol_type = other RNA
gtgagaggtccctgcttgtg

SEQ ID NO: 14052 - RNA, 20 nt, synthetic construct
  source 1..20: mol_type = other RNA
tgtgagaggtccctgcttgt

SEQ ID NO: 14053 - RNA, 20 nt, synthetic construct
  source 1..20: mol_type = other RNA
ctgtgagaggtccctgcttg

SEQ ID NO: 14054 - RNA, 20 nt, synthetic construct
  source 1..20: mol_type = other RNA
ctctcacagttcctgttgcc

SEQ ID NO: 14055 - RNA, 20 nt, synthetic construct
  source 1..20: mol_type = other RNA
tctcacagttcctgttgcct

SEQ ID NO: 14056 - RNA, 20 nt, synthetic construct
  source 1..20: mol_type = other RNA
ctcacagttcctgttgcctg

SEQ ID NO: 14057 - RNA, 20 nt, synthetic construct
  source 1..20: mol_type = other RNA
caggcaacaggaactgtgag

SEQ ID NO: 14058 - RNA, 20 nt, synthetic construct
  source 1..20: mol_type = other RNA
agatgaagtccccaggcaac

SEQ ID NO: 14059 - RNA, 20 nt, synthetic construct
  source 1..20: mol_type = other RNA
ggacttcatctcagcttcca

SEQ ID NO: 14060 - RNA, 20 nt, synthetic construct
  source 1..20: mol_type = other RNA
atctcagcttccaaggcctc

SEQ ID NO: 14061 - RNA, 20 nt, synthetic construct
  source 1..20: mol_type = other RNA
cttccaaggcctctggaacc

SEQ ID NO: 14062 - RNA, 20 nt, synthetic construct
  source 1..20: mol_type = other RNA
gggcctggttccagaggcct

SEQ ID NO: 14063 - RNA, 20 nt, synthetic construct
  source 1..20: mol_type = other RNA
tggaaccaggccctgcatcc

SEQ ID NO: 14064 - RNA, 20 nt, synthetic construct
  source 1..20: mol_type = other RNA
ggaaccaggccctgcatcct

SEQ ID NO: 14065 - RNA, 20 nt, synthetic construct
  source 1..20: mol_type = other RNA
catgcccaggatgcagggcc

SEQ ID NO: 14066 - RNA, 20 nt, synthetic construct
  source 1..20: mol_type = other RNA
acagtcatgcccaggatgca

SEQ ID NO: 14067 - RNA, 20 nt, synthetic construct
  source 1..20: mol_type = other RNA
gacagtcatgcccaggatgc

SEQ ID NO: 14068 - RNA, 20 nt, synthetic construct
  source 1..20: mol_type = other RNA
tcatggggacagtcatgccc

SEQ ID NO: 14069 - RNA, 20 nt, synthetic construct
  source 1..20: mol_type = other RNA
ggctggctcagagaatcatg

SEQ ID NO: 14070 - RNA, 20 nt, synthetic construct
  source 1..20: mol_type = other RNA
tggctggctcagagaatcat

SEQ ID NO: 14071 - RNA, 20 nt, synthetic construct
  source 1..20: mol_type = other RNA
gtggctggctcagagaatca

SEQ ID NO: 14072 - RNA, 20 nt, synthetic construct
  source 1..20: mol_type = other RNA
gggggtggtggggtggtggc

SEQ ID NO: 14073 - RNA, 20 nt, synthetic construct
  source 1..20: mol_type = other RNA
gtgggggggtggtggggtgg

SEQ ID NO: 14074 - RNA, 20 nt, synthetic construct
  source 1..20: mol_type = other RNA
gcggtgggggggtggtgggg

SEQ ID NO: 14075 - RNA, 20 nt, synthetic construct
  source 1..20: mol_type = other RNA
ttggcggtgggggggtggtg

SEQ ID NO: 14076 - RNA, 20 nt, synthetic construct
  source 1..20: mol_type = other RNA
cttggcggtgggggggtggt

SEQ ID NO: 14077 - RNA, 20 nt, synthetic construct
  source 1..20: mol_type = other RNA
acttggcggtgggggggtgg

SEQ ID NO: 14078 - RNA, 20 nt, synthetic construct
  source 1..20: mol_type = other RNA
tggacttggcggtggggggg

SEQ ID NO: 14079 - RNA, 20 nt, synthetic construct
  source 1..20: mol_type = other RNA
cagtggacttggcggtgggg

SEQ ID NO: 14080 - RNA, 20 nt, synthetic construct
  source 1..20: mol_type = other RNA
gcagtggacttggcggtggg

SEQ ID NO: 14081 - RNA, 20 nt, synthetic construct
  source 1..20: mol_type = other RNA
agcagtggacttggcggtgg

SEQ ID NO: 14082 - RNA, 20 nt, synthetic construct
  source 1..20: mol_type = other RNA
cagcagtggacttggcggtg

SEQ ID NO: 14083 - RNA, 20 nt, synthetic construct
  source 1..20: mol_type = other RNA
tcagcagtggacttggcggt

SEQ ID NO: 14084 - RNA, 20 nt, synthetic construct
  source 1..20: mol_type = other RNA
gtcagcagtggacttggcgg

SEQ ID NO: 14085 - RNA, 20 nt, synthetic construct
  source 1..20: mol_type = other RNA
agggtcagcagtggacttgg

SEQ ID NO: 14086 - RNA, 20 nt, synthetic construct
  source 1..20: mol_type = other RNA
agcagggtcagcagtggact

SEQ ID NO: 14087 - RNA, 20 nt, synthetic construct
  source 1..20: mol_type = other RNA
ggctacagcagggtcagcag

SEQ ID NO: 14088 - RNA, 20 nt, synthetic construct
  source 1..20: mol_type = other RNA
ggaggtggggggctacagca

SEQ ID NO: 14089 - RNA, 20 nt, synthetic construct
  source 1..20: mol_type = other RNA
tggaggtggggggctacagc

SEQ ID NO: 14090 - RNA, 20 nt, synthetic construct
  source 1..20: mol_type = other RNA
tctcaacaagtggaggtggg

SEQ ID NO: 14091 - RNA, 20 nt, synthetic construct
  source 1..20: mol_type = other RNA
atctcaacaagtggaggtgg

SEQ ID NO: 14092 - RNA, 20 nt, synthetic construct
  source 1..20: mol_type = other RNA
aatctcaacaagtggaggtg

SEQ ID NO: 14093 - RNA, 20 nt, synthetic construct
  source 1..20: mol_type = other RNA
gaatctcaacaagtggaggt

SEQ ID NO: 14094 - RNA, 20 nt, synthetic construct
  source 1..20: mol_type = other RNA
ggaatctcaacaagtggagg

SEQ ID NO: 14095 - RNA, 20 nt, synthetic construct
  source 1..20: mol_type = other RNA
gagggaatctcaacaagtgg

SEQ ID NO: 14096 - RNA, 20 nt, synthetic construct
  source 1..20: mol_type = other RNA
gaagagggaatctcaacaag

SEQ ID NO: 14097 - RNA, 20 nt, synthetic construct
  source 1..20: mol_type = other RNA
caaaatgagaagcaggaaga

SEQ ID NO: 14098 - RNA, 20 nt, synthetic construct
  source 1..20: mol_type = other RNA
tcaaaatgagaagcaggaag

SEQ ID NO: 14099 - RNA, 20 nt, synthetic construct
  source 1..20: mol_type = other RNA
tgacattcaaaatgagaagc

SEQ ID NO: 14100 - RNA, 20 nt, synthetic construct
  source 1..20: mol_type = other RNA
ggttgtgagaagtcacagaa

SEQ ID NO: 14101 - RNA, 20 nt, synthetic construct
  source 1..20: mol_type = other RNA
gggttgtgagaagtcacaga

SEQ ID NO: 14102 - RNA, 20 nt, synthetic construct
  source 1..20: mol_type = other RNA
ctgccacccctccctccagt

SEQ ID NO: 14103 - RNA, 20 nt, synthetic construct
  source 1..20: mol_type = other RNA
ctggagggaggggtggcagg

SEQ ID NO: 14104 - RNA, 20 nt, synthetic construct
  source 1..20: mol_type = other RNA
actggagggaggggtggcag

SEQ ID NO: 14105 - RNA, 20 nt, synthetic construct
  source 1..20: mol_type = other RNA
aactggagggaggggtggca

SEQ ID NO: 14106 - RNA, 20 nt, synthetic construct
  source 1..20: mol_type = other RNA
caactggagggaggggtggc

SEQ ID NO: 14107 - RNA, 20 nt, synthetic construct
  source 1..20: mol_type = other RNA
acccctccctccagttggca

SEQ ID NO: 14108 - RNA, 20 nt, synthetic construct
  source 1..20: mol_type = other RNA
atgccaactggagggagggg

SEQ ID NO: 14109 - RNA, 20 nt, synthetic construct
  source 1..20: mol_type = other RNA
gccatgccaactggagggag

SEQ ID NO: 14110 - RNA, 20 nt, synthetic construct
  source 1..20: mol_type = other RNA
agccatgccaactggaggga

SEQ ID NO: 14111 - RNA, 20 nt, synthetic construct
  source 1..20: mol_type = other RNA
aagccatgccaactggaggg

SEQ ID NO: 14112 - RNA, 20 nt, synthetic construct
  source 1..20: mol_type = other RNA
actaagccatgccaactgga

SEQ ID NO: 14113 - RNA, 20 nt, synthetic construct
  source 1..20: mol_type = other RNA
gactaagccatgccaactgg

SEQ ID NO: 14114 - RNA, 20 nt, synthetic construct
  source 1..20: mol_type = other RNA
gaagactaagccatgccaac

SEQ ID NO: 14115 - RNA, 20 nt, synthetic construct
  source 1..20: mol_type = other RNA
gggaagcagcacatgttctt

SEQ ID NO: 14116 - RNA, 20 nt, synthetic construct
  source 1..20: mol_type = other RNA
tgtgctgcttcccagtaccc

SEQ ID NO: 14117 - RNA, 20 nt, synthetic construct
  source 1..20: mol_type = other RNA
gtgctgcttcccagtaccca

SEQ ID NO: 14118 - RNA, 20 nt, synthetic construct
  source 1..20: mol_type = other RNA
gcacagcagccctgggtact

SEQ ID NO: 14119 - RNA, 20 nt, synthetic construct
  source 1..20: mol_type = other RNA
tgcacagcagccctgggtac

SEQ ID NO: 14120 - RNA, 20 nt, synthetic construct
  source 1..20: mol_type = other RNA
cccagggctgctgtgcaccg

SEQ ID NO: 14121 - RNA, 20 nt, synthetic construct
  source 1..20: mol_type = other RNA
ccacggtgcacagcagccct

SEQ ID NO: 14122 - RNA, 20 nt, synthetic construct
  source 1..20: mol_type = other RNA
gccacggtgcacagcagccc

SEQ ID NO: 14123 - RNA, 20 nt, synthetic construct
  source 1..20: mol_type = other RNA
gcaccgtggcacgtgagttt

SEQ ID NO: 14124 - RNA, 20 nt, synthetic construct
  source 1..20: mol_type = other RNA
gcaccgaaactcacgtgcca

SEQ ID NO: 14125 - RNA, 20 nt, synthetic construct
  source 1..20: mol_type = other RNA
tgcaatttataaacagcagg

SEQ ID NO: 14126 - RNA, 20 nt, synthetic construct
  source 1..20: mol_type = other RNA
tgttgcaatttataaacagc

SEQ ID NO: 14127 - RNA, 20 nt, synthetic construct
  source 1..20: mol_type = other RNA
tttataaattgcaacatccc

SEQ ID NO: 14128 - RNA, 20 nt, synthetic construct
  source 1..20: mol_type = other RNA
caacatccctggacagatct

SEQ ID NO: 14129 - RNA, 20 nt, synthetic construct
  source 1..20: mol_type = other RNA
gaaaatccaagatctgtcca

SEQ ID NO: 14130 - RNA, 20 nt, synthetic construct
  source 1..20: mol_type = other RNA
ggaaaatccaagatctgtcc

SEQ ID NO: 14131 - RNA, 20 nt, synthetic construct
  source 1..20: mol_type = other RNA
ttttccctctataatttctc

SEQ ID NO: 14132 - RNA, 20 nt, synthetic construct
  source 1..20: mol_type = other RNA
gtctccagagaaattataga

SEQ ID NO: 14133 - RNA, 20 nt, synthetic construct
  source 1..20: mol_type = other RNA
agtctccagagaaattatag

SEQ ID NO: 14134 - RNA, 20 nt, synthetic construct
  source 1..20: mol_type = other RNA
aatttctctggagactccct

SEQ ID NO: 14135 - RNA, 20 nt, synthetic construct
  source 1..20: mol_type = other RNA
atttctctggagactccctc

SEQ ID NO: 14136 - RNA, 20 nt, synthetic construct
  source 1..20: mol_type = other RNA
tttctctggagactccctcg

SEQ ID NO: 14137 - RNA, 20 nt, synthetic construct
  source 1..20: mol_type = other RNA
ggggtttgcacacacatctg

SEQ ID NO: 14138 - RNA, 20 nt, synthetic construct
  source 1..20: mol_type = other RNA
agatgtgtgtgcaaaccccg

SEQ ID NO: 14139 - RNA, 20 nt, synthetic construct
  source 1..20: mol_type = other RNA
catctgtggaatgcccaagt

SEQ ID NO: 14140 - RNA, 20 nt, synthetic construct
  source 1..20: mol_type = other RNA
tggaatgcccaagttggaga

SEQ ID NO: 14141 - RNA, 20 nt, synthetic construct
  source 1..20: mol_type = other RNA
gggaggaccatctccaactt

SEQ ID NO: 14142 - RNA, 20 nt, synthetic construct
  source 1..20: mol_type = other RNA
agggaggaccatctccaact

SEQ ID NO: 14143 - RNA, 20 nt, synthetic construct
  source 1..20: mol_type = other RNA
gtcctccctgatgtgtagtg

SEQ ID NO: 14144 - RNA, 20 nt, synthetic construct
  source 1..20: mol_type = other RNA
tcctccctgatgtgtagtgt

SEQ ID NO: 14145 - RNA, 20 nt, synthetic construct
  source 1..20: mol_type = other RNA
gcccacactacacatcaggg

SEQ ID NO: 14146 - RNA, 20 nt, synthetic construct
  source 1..20: mol_type = other RNA
atagcccacactacacatca

SEQ ID NO: 14147 - RNA, 20 nt, synthetic construct
  source 1..20: mol_type = other RNA
aatagcccacactacacatc

SEQ ID NO: 14148 - RNA, 20 nt, synthetic construct
  source 1..20: mol_type = other RNA
gtgtagtgtgggctattcag

SEQ ID NO: 14149 - RNA, 20 nt, synthetic construct
  source 1..20: mol_type = other RNA
tgtagtgtgggctattcaga

SEQ ID NO: 14150 - RNA, 20 nt, synthetic construct
  source 1..20: mol_type = other RNA
gttaatgagtttatgaaatg

SEQ ID NO: 14151 - RNA, 20 nt, synthetic construct
  source 1..20: mol_type = other RNA
tcataaactcattaacagct

SEQ ID NO: 14152 - RNA, 20 nt, synthetic construct
  source 1..20: mol_type = other RNA
acagctaggacgcgaagact

SEQ ID NO: 14153 - RNA, 20 nt, synthetic construct
  source 1..20: mol_type = other RNA
agacttggagaagttagctc

SEQ ID NO: 14154 - RNA, 20 nt, synthetic construct
  source 1..20: mol_type = other RNA
agaagttagctcaggacaca

SEQ ID NO: 14155 - RNA, 20 nt, synthetic construct
  source 1..20: mol_type = other RNA
ttagctcaggacacacggag

SEQ ID NO: 14156 - RNA, 20 nt, synthetic construct
  source 1..20: mol_type = other RNA
tagctcaggacacacggagt

SEQ ID NO: 14157 - RNA, 20 nt, synthetic construct
  source 1..20: mol_type = other RNA
ctcaggacacacggagtggg

SEQ ID NO: 14158 - RNA, 20 nt, synthetic construct
  source 1..20: mol_type = other RNA
tcaggacacacggagtggga

SEQ ID NO: 14159 - RNA, 20 nt, synthetic construct
  source 1..20: mol_type = other RNA
ggacacacggagtgggaggg

SEQ ID NO: 14160 - RNA, 20 nt, synthetic construct
  source 1..20: mol_type = other RNA
ggaggcaacgagttaagaaa

SEQ ID NO: 14161 - RNA, 20 nt, synthetic construct
  source 1..20: mol_type = other RNA
gaggcaacgagttaagaaat

SEQ ID NO: 14162 - RNA, 20 nt, synthetic construct
  source 1..20: mol_type = other RNA
acgagttaagaaatgggctt

SEQ ID NO: 14163 - RNA, 20 nt, synthetic construct
  source 1..20: mol_type = other RNA
gctttggagtgcctcgaatt

SEQ ID NO: 14164 - RNA, 20 nt, synthetic construct
  source 1..20: mol_type = other RNA
aaaagtggaggccaaattcg

SEQ ID NO: 14165 - RNA, 20 nt, synthetic construct
  source 1..20: mol_type = other RNA
acagtagaaaagaaaagtgg

SEQ ID NO: 14166 - RNA, 20 nt, synthetic construct
  source 1..20: mol_type = other RNA
aagacagtagaaaagaaaag

SEQ ID NO: 14167 - RNA, 20 nt, synthetic construct
  source 1..20: mol_type = other RNA
ttcttttctactgtcttacc

SEQ ID NO: 14168 - RNA, 20 nt, synthetic construct
  source 1..20: mol_type = other RNA
ctactgtcttacctggtctt

SEQ ID NO: 14169 - RNA, 20 nt, synthetic construct
  source 1..20: mol_type = other RNA
tgtcttacctggtcttaggc

SEQ ID NO: 14170 - RNA, 20 nt, synthetic construct
  source 1..20: mol_type = other RNA
ttacctggtcttaggcaggt

SEQ ID NO: 14171 - RNA, 20 nt, synthetic construct
  source 1..20: mol_type = other RNA
tacctggtcttaggcaggtc

SEQ ID NO: 14172 - RNA, 20 nt, synthetic construct
  source 1..20: mol_type = other RNA
cacccgacctgcctaagacc

SEQ ID NO: 14173 - RNA, 20 nt, synthetic construct
  source 1..20: mol_type = other RNA
aggcaggtcgggtgaccatc

SEQ ID NO: 14174 - RNA, 20 nt, synthetic construct
  source 1..20: mol_type = other RNA
gtcgggtgaccatctggagt

SEQ ID NO: 14175 - RNA, 20 nt, synthetic construct
  source 1..20: mol_type = other RNA
agagaaactccgactccaga

SEQ ID NO: 14176 - RNA, 20 nt, synthetic construct
  source 1..20: mol_type = other RNA
agtttctctcatttgtaaag

SEQ ID NO: 14177 - RNA, 20 nt, synthetic construct
  source 1..20: mol_type = other RNA
gtttctctcatttgtaaagc

SEQ ID NO: 14178 - RNA, 20 nt, synthetic construct
  source 1..20: mol_type = other RNA
tttctctcatttgtaaagcg

SEQ ID NO: 14179 - RNA, 20 nt, synthetic construct
  source 1..20: mol_type = other RNA
ttctctcatttgtaaagcgg

SEQ ID NO: 14180 - RNA, 20 nt, synthetic construct
  source 1..20: mol_type = other RNA
gggggtgatatttttctcac

SEQ ID NO: 14181 - RNA, 20 nt, synthetic construct
  source 1..20: mol_type = other RNA
ggggtgatatttttctcaca

SEQ ID NO: 14182 - RNA, 20 nt, synthetic construct
  source 1..20: mol_type = other RNA
tttctcacagggctgcttca

SEQ ID NO: 14183 - RNA, 20 nt, synthetic construct
  source 1..20: mol_type = other RNA
ttctcacagggctgcttcaa

SEQ ID NO: 14184 - RNA, 20 nt, synthetic construct
  source 1..20: mol_type = other RNA
ggttaacaaagttaatgtct

SEQ ID NO: 14185 - RNA, 20 nt, synthetic construct
  source 1..20: mol_type = other RNA
aacaaagttaatgtctagga

SEQ ID NO: 14186 - RNA, 20 nt, synthetic construct
  source 1..20: mol_type = other RNA
catagcatagcaccttcacc

SEQ ID NO: 14187 - RNA, 20 nt, synthetic construct
  source 1..20: mol_type = other RNA
ttcacctggttgcaagcccc

SEQ ID NO: 14188 - RNA, 20 nt, synthetic construct
  source 1..20: mol_type = other RNA
aggggcttgcaaccaggtga

SEQ ID NO: 14189 - RNA, 20 nt, synthetic construct
  source 1..20: mol_type = other RNA
gactccaggggcttgcaacc

SEQ ID NO: 14190 - RNA, 20 nt, synthetic construct
  source 1..20: mol_type = other RNA
tgcaagcccctggagtcaca

SEQ ID NO: 14191 - RNA, 20 nt, synthetic construct
  source 1..20: mol_type = other RNA
ctgttgccatgtgactccag

SEQ ID NO: 14192 - RNA, 20 nt, synthetic construct
  source 1..20: mol_type = other RNA
gagtcacatggcaacagctg

SEQ ID NO: 14193 - RNA, 20 nt, synthetic construct
  source 1..20: mol_type = other RNA
agctgttgccatgtgactcc

SEQ ID NO: 14194 - RNA, 20 nt, synthetic construct
  source 1..20: mol_type = other RNA
atggcaacagctgtggaacc

SEQ ID NO: 14195 - RNA, 20 nt, synthetic construct
  source 1..20: mol_type = other RNA
tgtaagtcaagtcatttacc

SEQ ID NO: 14196 - RNA, 20 nt, synthetic construct
  source 1..20: mol_type = other RNA
ttagttgttcgatttgtaaa

SEQ ID NO: 14197 - RNA, 20 nt, synthetic construct
  source 1..20: mol_type = other RNA
tagttgttcgatttgtaaat

SEQ ID NO: 14198 - RNA, 20 nt, synthetic construct
  source 1..20: mol_type = other RNA
tatctggaaacgactaattt

SEQ ID NO: 14199 - RNA, 20 nt, synthetic construct
  source 1..20: mol_type = other RNA
atatctggaaacgactaatt

SEQ ID NO: 14200 - RNA, 20 nt, synthetic construct
  source 1..20: mol_type = other RNA
agtcgtttccagatatttcc

SEQ ID NO: 14201 - RNA, 20 nt, synthetic construct
  source 1..20: mol_type = other RNA
tccagatatttcctggtaaa

SEQ ID NO: 14202 - RNA, 20 nt, synthetic construct
  source 1..20: mol_type = other RNA
accatttaccaggaaatatc

SEQ ID NO: 14203 - RNA, 20 nt, synthetic construct
  source 1..20: mol_type = other RNA
tgattcaacaaccatttacc

SEQ ID NO: 14204 - RNA, 20 nt, synthetic construct
  source 1..20: mol_type = other RNA
gaatcataaaactagaaaga

SEQ ID NO: 14205 - RNA, 20 nt, synthetic construct
  source 1..20: mol_type = other RNA
aatcataaaactagaaagat

SEQ ID NO: 14206 - RNA, 20 nt, synthetic construct
  source 1..20: mol_type = other RNA
actagaaagatgggaaagaa

SEQ ID NO: 14207 - RNA, 20 nt, synthetic construct
  source 1..20: mol_type = other RNA
ctagaaagatgggaaagaaa

SEQ ID NO: 14208 - RNA, 20 nt, synthetic construct
  source 1..20: mol_type = other RNA
gaaagatgggaaagaaaggg

SEQ ID NO: 14209 - RNA, 20 nt, synthetic construct
  source 1..20: mol_type = other RNA
acacttcttcgaagtaaggg

SEQ ID NO: 14210 - RNA, 20 nt, synthetic construct
  source 1..20: mol_type = other RNA
aacacttcttcgaagtaagg

SEQ ID NO: 14211 - RNA, 20 nt, synthetic construct
  source 1..20: mol_type = other RNA
caacacttcttcgaagtaag

SEQ ID NO: 14212 - RNA, 20 nt, synthetic construct
  source 1..20: mol_type = other RNA
acaacacttcttcgaagtaa

SEQ ID NO: 14213 - RNA, 20 nt, synthetic construct
  source 1..20: mol_type = other RNA
aacaacacttcttcgaagta

SEQ ID NO: 14214 - RNA, 20 nt, synthetic construct
  source 1..20: mol_type = other RNA
aagaagtgttgttgatgtga

SEQ ID NO: 14215 - RNA, 20 nt, synthetic construct
  source 1..20: mol_type = other RNA
gtgttgttgatgtgaaggac

SEQ ID NO: 14216 - RNA, 20 nt, synthetic construct
  source 1..20: mol_type = other RNA
agaaacagctgatatctact

SEQ ID NO: 14217 - RNA, 20 nt, synthetic construct
  source 1..20: mol_type = other RNA
gtagatatcagctgtttctt

SEQ ID NO: 14218 - RNA, 20 nt, synthetic construct
  source 1..20: mol_type = other RNA
gtttcttcctaagagatgtg

SEQ ID NO: 14219 - RNA, 20 nt, synthetic construct
  source 1..20: mol_type = other RNA
gtcaaaacctcacatctctt

SEQ ID NO: 14220 - RNA, 20 nt, synthetic construct
  source 1..20: mol_type = other RNA
gaggttttgacagaagtgcc

SEQ ID NO: 14221 - RNA, 20 nt, synthetic construct
  source 1..20: mol_type = other RNA
cagaagtgccaggaagccag

SEQ ID NO: 14222 - RNA, 20 nt, synthetic construct
  source 1..20: mol_type = other RNA
ctcacacacctctggcttcc

SEQ ID NO: 14223 - RNA, 20 nt, synthetic construct
  source 1..20: mol_type = other RNA
agccagaggtgtgtgagtag

SEQ ID NO: 14224 - RNA, 20 nt, synthetic construct
  source 1..20: mol_type = other RNA
gccagaggtgtgtgagtagt

SEQ ID NO: 14225 - RNA, 20 nt, synthetic construct
  source 1..20: mol_type = other RNA
gcccactactcacacacctc

SEQ ID NO: 14226 - RNA, 20 nt, synthetic construct
  source 1..20: mol_type = other RNA
agtgggccaatctcgcgtga

SEQ ID NO: 14227 - RNA, 20 nt, synthetic construct
  source 1..20: mol_type = other RNA
ccaatctcgcgtgaaggctg

SEQ ID NO: 14228 - RNA, 20 nt, synthetic construct
  source 1..20: mol_type = other RNA
caatctcgcgtgaaggctgt

SEQ ID NO: 14229 - RNA, 20 nt, synthetic construct
  source 1..20: mol_type = other RNA
ctcgcgtgaaggctgtggga

SEQ ID NO: 14230 - RNA, 20 nt, synthetic construct
  source 1..20: mol_type = other RNA
tcgcgtgaaggctgtgggac

SEQ ID NO: 14231 - RNA, 20 nt, synthetic construct
  source 1..20: mol_type = other RNA
cgcgtgaaggctgtgggacg

SEQ ID NO: 14232 - RNA, 20 nt, synthetic construct
  source 1..20: mol_type = other RNA
tgaaggctgtgggacggggc

SEQ ID NO: 14233 - RNA, 20 nt, synthetic construct
  source 1..20: mol_type = other RNA
gctgtgggacggggcaggag

SEQ ID NO: 14234 - RNA, 20 nt, synthetic construct
  source 1..20: mol_type = other RNA
ctgtgggacggggcaggaga

SEQ ID NO: 14235 - RNA, 20 nt, synthetic construct
  source 1..20: mol_type = other RNA
tgtgggacggggcaggagag

SEQ ID NO: 14236 - RNA, 20 nt, synthetic construct
  source 1..20: mol_type = other RNA
atttcctgagcgccagctaa

SEQ ID NO: 14237 - RNA, 20 nt, synthetic construct
  source 1..20: mol_type = other RNA
tcctgagcgccagctaatgg

SEQ ID NO: 14238 - RNA, 20 nt, synthetic construct
  source 1..20: mol_type = other RNA
cctgagcgccagctaatggc

SEQ ID NO: 14239 - RNA, 20 nt, synthetic construct
  source 1..20: mol_type = other RNA
ctgagcgccagctaatggcg

SEQ ID NO: 14240 - RNA, 20 nt, synthetic construct
  source 1..20: mol_type = other RNA
cccgccattagctggcgctc

SEQ ID NO: 14241 - RNA, 20 nt, synthetic construct
  source 1..20: mol_type = other RNA
gccagctaatggcggggacc

SEQ ID NO: 14242 - RNA, 20 nt, synthetic construct
  source 1..20: mol_type = other RNA
gccaggtccccgccattagc

SEQ ID NO: 14243 - RNA, 20 nt, synthetic construct
  source 1..20: mol_type = other RNA
agtcacagagcaaaggtgcc

SEQ ID NO: 14244 - RNA, 20 nt, synthetic construct
  source 1..20: mol_type = other RNA
gctggagagtcacagagcaa

SEQ ID NO: 14245 - RNA, 20 nt, synthetic construct
  source 1..20: mol_type = other RNA
tctgtgactctccagctgta

SEQ ID NO: 14246 - RNA, 20 nt, synthetic construct
  source 1..20: mol_type = other RNA
tccagctgtatggtgacatg

SEQ ID NO: 14247 - RNA, 20 nt, synthetic construct
  source 1..20: mol_type = other RNA
gctgtatggtgacatgaggc

SEQ ID NO: 14248 - RNA, 20 nt, synthetic construct
  source 1..20: mol_type = other RNA
gcctcatgtcaccatacagc

SEQ ID NO: 14249 - RNA, 20 nt, synthetic construct
  source 1..20: mol_type = other RNA
catgaggctggcgttttctt

SEQ ID NO: 14250 - RNA, 20 nt, synthetic construct
  source 1..20: mol_type = other RNA
tttctttggtttcatacgtg

SEQ ID NO: 14251 - RNA, 20 nt, synthetic construct
  source 1..20: mol_type = other RNA
tttcatacgtgaggaagctg

SEQ ID NO: 14252 - RNA, 20 nt, synthetic construct
  source 1..20: mol_type = other RNA
tacgtgaggaagctgaggct

SEQ ID NO: 14253 - RNA, 20 nt, synthetic construct
  source 1..20: mol_type = other RNA
gcttggtgatgtcctgtgca

SEQ ID NO: 14254 - RNA, 20 nt, synthetic construct
  source 1..20: mol_type = other RNA
gtgatgtcctgtgcatggct

SEQ ID NO: 14255 - RNA, 20 nt, synthetic construct
  source 1..20: mol_type = other RNA
ctggagtccgagccatgcac

SEQ ID NO: 14256 - RNA, 20 nt, synthetic construct
  source 1..20: mol_type = other RNA
cggactccagagctactcag

SEQ ID NO: 14257 - RNA, 20 nt, synthetic construct
  source 1..20: mol_type = other RNA
ccagagctactcagaggcag

SEQ ID NO: 14258 - RNA, 20 nt, synthetic construct
  source 1..20: mol_type = other RNA
cctctgcctctgagtagctc

SEQ ID NO: 14259 - RNA, 20 nt, synthetic construct
  source 1..20: mol_type = other RNA
ggccgtctgtaaacaccttc

SEQ ID NO: 14260 - RNA, 20 nt, synthetic construct
  source 1..20: mol_type = other RNA
cgtctgtaaacaccttcagg

SEQ ID NO: 14261 - RNA, 20 nt, synthetic construct
  source 1..20: mol_type = other RNA
tgtaaacaccttcaggtggt

SEQ ID NO: 14262 - RNA, 20 nt, synthetic construct
  source 1..20: mol_type = other RNA
aaacaccttcaggtggttgg

SEQ ID NO: 14263 - RNA, 20 nt, synthetic construct
  source 1..20: mol_type = other RNA
accttcaggtggttggaggc

SEQ ID NO: 14264 - RNA, 20 nt, synthetic construct
  source 1..20: mol_type = other RNA
ccttcaggtggttggaggca

SEQ ID NO: 14265 - RNA, 20 nt, synthetic construct
  source 1..20: mol_type = other RNA
ccctgcctccaaccacctga

SEQ ID NO: 14266 - RNA, 20 nt, synthetic construct
  source 1..20: mol_type = other RNA
tgctgatcactcacaagcca

SEQ ID NO: 14267 - RNA, 20 nt, synthetic construct
  source 1..20: mol_type = other RNA
ggcttgtgagtgatcagcat

SEQ ID NO: 14268 - RNA, 20 nt, synthetic construct
  source 1..20: mol_type = other RNA
caagccaaggctttattgta

SEQ ID NO: 14269 - RNA, 20 nt, synthetic construct
  source 1..20: mol_type = other RNA
aagccaaggctttattgtaa

SEQ ID NO: 14270 - RNA, 20 nt, synthetic construct
  source 1..20: mol_type = other RNA
tagcccttacaataaagcct

SEQ ID NO: 14271 - RNA, 20 nt, synthetic construct
  source 1..20: mol_type = other RNA
tgcctagcatttatacagca

SEQ ID NO: 14272 - RNA, 20 nt, synthetic construct
  source 1..20: mol_type = other RNA
gcctagcatttatacagcac

SEQ ID NO: 14273 - RNA, 20 nt, synthetic construct
  source 1..20: mol_type = other RNA
cctagcatttatacagcacg

SEQ ID NO: 14274 - RNA, 20 nt, synthetic construct
  source 1..20: mol_type = other RNA
ccccgtgctgtataaatgct

SEQ ID NO: 14275 - RNA, 20 nt, synthetic construct
  source 1..20: mol_type = other RNA
tatacagcacggggcttttt

SEQ ID NO: 14276 - RNA, 20 nt, synthetic construct
  source 1..20: mol_type = other RNA
aggaaatagtgagacgacca

SEQ ID NO: 14277 - RNA, 20 nt, synthetic construct
  source 1..20: mol_type = other RNA
atagtgagacgaccatggag

SEQ ID NO: 14278 - RNA, 20 nt, synthetic construct
  source 1..20: mol_type = other RNA
gtgagacgaccatggagagg

SEQ ID NO: 14279 - RNA, 20 nt, synthetic construct
  source 1..20: mol_type = other RNA
agacgaccatggagaggtgg

SEQ ID NO: 14280 - RNA, 20 nt, synthetic construct
  source 1..20: mol_type = other RNA
gagaggtggaggaagagaga

SEQ ID NO: 14281 - RNA, 20 nt, synthetic construct
  source 1..20: mol_type = other RNA
agaggtggaggaagagagaa

SEQ ID NO: 14282 - RNA, 20 nt, synthetic construct
  source 1..20: mol_type = other RNA
ttctcttaagaaactcttta

SEQ ID NO: 14283 - RNA, 20 nt, synthetic construct
  source 1..20: mol_type = other RNA
actatatattacaaagtcct

SEQ ID NO: 14284 - RNA, 20 nt, synthetic construct
  source 1..20: mol_type = other RNA
tccttggagttttttttccc

SEQ ID NO: 14285 - RNA, 20 nt, synthetic construct
  source 1..20: mol_type = other RNA
accagggaaaaaaaactcca

SEQ ID NO: 14286 - RNA, 20 nt, synthetic construct
  source 1..20: mol_type = other RNA
tgtaaacttatgtctaacca

SEQ ID NO: 14287 - RNA, 20 nt, synthetic construct
  source 1..20: mol_type = other RNA
atgtaaacttatgtctaacc

SEQ ID NO: 14288 - RNA, 20 nt, synthetic construct
  source 1..20: mol_type = other RNA
agtttacatgaaacgttaaa

SEQ ID NO: 14289 - RNA, 20 nt, synthetic construct
  source 1..20: mol_type = other RNA
aagacataaggaaggagatg

SEQ ID NO: 14290 - RNA, 20 nt, synthetic construct
  source 1..20: mol_type = other RNA
gctgtgagaagacataagga

SEQ ID NO: 14291 - RNA, 20 nt, synthetic construct
  source 1..20: mol_type = other RNA
agtggctgtgagaagacata

SEQ ID NO: 14292 - RNA, 20 nt, synthetic construct
  source 1..20: mol_type = other RNA
cttgataagaaactcacaag

SEQ ID NO: 14293 - RNA, 20 nt, synthetic construct
  source 1..20: mol_type = other RNA
cttatcaagatacagaatta

SEQ ID NO: 14294 - RNA, 20 nt, synthetic construct
  source 1..20: mol_type = other RNA
tacagaattatggccaagtg

SEQ ID NO: 14295 - RNA, 20 nt, synthetic construct
  source 1..20: mol_type = other RNA
cacgtgtgagctaccgcact

SEQ ID NO: 14296 - RNA, 20 nt, synthetic construct
  source 1..20: mol_type = other RNA
cccagcactttgagagactg

SEQ ID NO: 14297 - RNA, 20 nt, synthetic construct
  source 1..20: mol_type = other RNA
agcactttgagagactgagg

SEQ ID NO: 14298 - RNA, 20 nt, synthetic construct
  source 1..20: mol_type = other RNA
cctcagtctctcaaagtgct

SEQ ID NO: 14299 - RNA, 20 nt, synthetic construct
  source 1..20: mol_type = other RNA
acctcagtctctcaaagtgc

SEQ ID NO: 14300 - RNA, 20 nt, synthetic construct
  source 1..20: mol_type = other RNA
ctttgagagactgaggtgga

SEQ ID NO: 14301 - RNA, 20 nt, synthetic construct
  source 1..20: mol_type = other RNA
tggaaggatcatgtgtgctc

SEQ ID NO: 14302 - RNA, 20 nt, synthetic construct
  source 1..20: mol_type = other RNA
caggagtttcagaccaacct

SEQ ID NO: 14303 - RNA, 20 nt, synthetic construct
  source 1..20: mol_type = other RNA
tcagaccaacctaggcaata

SEQ ID NO: 14304 - RNA, 20 nt, synthetic construct
  source 1..20: mol_type = other RNA
ttttaccatattgcctaggt

SEQ ID NO: 14305 - RNA, 20 nt, synthetic construct
  source 1..20: mol_type = other RNA
agggttttaccatattgcct

SEQ ID NO: 14306 - RNA, 20 nt, synthetic construct
  source 1..20: mol_type = other RNA
tgtatttttttgtagagaca

SEQ ID NO: 14307 - RNA, 20 nt, synthetic construct
  source 1..20: mol_type = other RNA
ttgtatttttttgtagagac

SEQ ID NO: 14308 - RNA, 20 nt, synthetic construct
  source 1..20: mol_type = other RNA
aaaaaaatacaaaaattagc

SEQ ID NO: 14309 - RNA, 20 nt, synthetic construct
  source 1..20: mol_type = other RNA
aaaaaatacaaaaattagct

SEQ ID NO: 14310 - RNA, 20 nt, synthetic construct
  source 1..20: mol_type = other RNA
atacaaaaattagctgggca

SEQ ID NO: 14311 - RNA, 20 nt, synthetic construct
  source 1..20: mol_type = other RNA
caaaaattagctgggcatgg

SEQ ID NO: 14312 - RNA, 20 nt, synthetic construct
  source 1..20: mol_type = other RNA
tggcatattccaatagttcc

SEQ ID NO: 14313 - RNA, 20 nt, synthetic construct
  source 1..20: mol_type = other RNA
ttccaatagttccaggcact

SEQ ID NO: 14314 - RNA, 20 nt, synthetic construct
  source 1..20: mol_type = other RNA
tccaatagttccaggcactc

SEQ ID NO: 14315 - RNA, 20 nt, synthetic construct
  source 1..20: mol_type = other RNA
aatagttccaggcactcggg

SEQ ID NO: 14316 - RNA, 20 nt, synthetic construct
  source 1..20: mol_type = other RNA
tcccgagtgcctggaactat

SEQ ID NO: 14317 - RNA, 20 nt, synthetic construct
  source 1..20: mol_type = other RNA
ggcactcgggaggctgagac

SEQ ID NO: 14318 - RNA, 20 nt, synthetic construct
  source 1..20: mol_type = other RNA
gtctcagcctcccgagtgcc

SEQ ID NO: 14319 - RNA, 20 nt, synthetic construct
  source 1..20: mol_type = other RNA
actcgggaggctgagacagg

SEQ ID NO: 14320 - RNA, 20 nt, synthetic construct
  source 1..20: mol_type = other RNA
gaggattgcttgagcccaag

SEQ ID NO: 14321 - RNA, 20 nt, synthetic construct
  source 1..20: mol_type = other RNA
cactgcagtcttgacctctt

SEQ ID NO: 14322 - RNA, 20 nt, synthetic construct
  source 1..20: mol_type = other RNA
tcactgcagtcttgacctct

SEQ ID NO: 14323 - RNA, 20 nt, synthetic construct
  source 1..20: mol_type = other RNA
cgagccactgcactacagcc

SEQ ID NO: 14324 - RNA, 20 nt, synthetic construct
  source 1..20: mol_type = other RNA
gagccactgcactacagcct

SEQ ID NO: 14325 - RNA, 20 nt, synthetic construct
  source 1..20: mol_type = other RNA
tggcccaggctgtagtgcag

SEQ ID NO: 14326 - RNA, 20 nt, synthetic construct
  source 1..20: mol_type = other RNA
aggatcttgctctgtggccc

SEQ ID NO: 14327 - RNA, 20 nt, synthetic construct
  source 1..20: mol_type = other RNA
tgagacaggatcttgctctg

SEQ ID NO: 14328 - RNA, 20 nt, synthetic construct
  source 1..20: mol_type = other RNA
tttattttattttttgagac

SEQ ID NO: 14329 - RNA, 20 nt, synthetic construct
  source 1..20: mol_type = other RNA
ccttgctcagaaatctctac

SEQ ID NO: 14330 - RNA, 20 nt, synthetic construct
  source 1..20: mol_type = other RNA
cctgtagagatttctgagca

SEQ ID NO: 14331 - RNA, 20 nt, synthetic construct
  source 1..20: mol_type = other RNA
tgtgcttctttgttaagaaa

SEQ ID NO: 14332 - RNA, 20 nt, synthetic construct
  source 1..20: mol_type = other RNA
gcttctttgttaagaaatgg

SEQ ID NO: 14333 - RNA, 20 nt, synthetic construct
  source 1..20: mol_type = other RNA
ctctacaagactcagaagtc

SEQ ID NO: 14334 - RNA, 20 nt, synthetic construct
  source 1..20: mol_type = other RNA
aaggctgcaggagtcagatc

SEQ ID NO: 14335 - RNA, 20 nt, synthetic construct
  source 1..20: mol_type = other RNA
cagccttctgcccacagagc

SEQ ID NO: 14336 - RNA, 20 nt, synthetic construct
  source 1..20: mol_type = other RNA
ctctgtgggcagaaggctgc

SEQ ID NO: 14337 - RNA, 20 nt, synthetic construct
  source 1..20: mol_type = other RNA
cttctgcccacagagctggc

SEQ ID NO: 14338 - RNA, 20 nt, synthetic construct
  source 1..20: mol_type = other RNA
ctgcccacagagctggcagg

SEQ ID NO: 14339 - RNA, 20 nt, synthetic construct
  source 1..20: mol_type = other RNA
tgcccacagagctggcaggc

SEQ ID NO: 14340 - RNA, 20 nt, synthetic construct
  source 1..20: mol_type = other RNA
gcccacagagctggcaggcg

SEQ ID NO: 14341 - RNA, 20 nt, synthetic construct
  source 1..20: mol_type = other RNA
cccacagagctggcaggcgg

SEQ ID NO: 14342 - RNA, 20 nt, synthetic construct
  source 1..20: mol_type = other RNA
cccccgcctgccagctctgt

SEQ ID NO: 14343 - RNA, 20 nt, synthetic construct
  source 1..20: mol_type = other RNA
tcccccgcctgccagctctg

SEQ ID NO: 14344 - RNA, 20 nt, synthetic construct
  source 1..20: mol_type = other RNA
gggggaatgtgcgcagagtg

SEQ ID NO: 14345 - RNA, 20 nt, synthetic construct
  source 1..20: mol_type = other RNA
ggaatgtgcgcagagtgagg

SEQ ID NO: 14346 - RNA, 20 nt, synthetic construct
  source 1..20: mol_type = other RNA
tgatctgacattccgaacag

SEQ ID NO: 14347 - RNA, 20 nt, synthetic construct
  source 1..20: mol_type = other RNA
aggcagcagtctccactgtt

SEQ ID NO: 14348 - RNA, 20 nt, synthetic construct
  source 1..20: mol_type = other RNA
agtggagactgctgcctatt

SEQ ID NO: 14349 - RNA, 20 nt, synthetic construct
  source 1..20: mol_type = other RNA
ggacagtggtgcggccaaat

SEQ ID NO: 14350 - RNA, 20 nt, synthetic construct
  source 1..20: mol_type = other RNA
cgcaccactgtccttctgca

SEQ ID NO: 14351 - RNA, 20 nt, synthetic construct
  source 1..20: mol_type = other RNA
catgcagaaggacagtggtg

SEQ ID NO: 14352 - RNA, 20 nt, synthetic construct
  source 1..20: mol_type = other RNA
ttttccatgcagaaggacag

SEQ ID NO: 14353 - RNA, 20 nt, synthetic construct
  source 1..20: mol_type = other RNA
ctgtgacttttccatgcaga

SEQ ID NO: 14354 - RNA, 20 nt, synthetic construct
  source 1..20: mol_type = other RNA
ggaaaagtcacagtaaataa

SEQ ID NO: 14355 - RNA, 20 nt, synthetic construct
  source 1..20: mol_type = other RNA
gctcagtaaaatcgactcac

SEQ ID NO: 14356 - RNA, 20 nt, synthetic construct
  source 1..20: mol_type = other RNA
ttttaaatatatgtgtagaa

SEQ ID NO: 14357 - RNA, 20 nt, synthetic construct
  source 1..20: mol_type = other RNA
tttaaatatatgtgtagaaa

SEQ ID NO: 14358 - RNA, 20 nt, synthetic construct
  source 1..20: mol_type = other RNA
ttctacacatatatttaaaa

SEQ ID NO: 14359 - RNA, 20 nt, synthetic construct
  source 1..20: mol_type = other RNA
catgtacacacgtgcacacg

SEQ ID NO: 14360 - RNA, 20 nt, synthetic construct
  source 1..20: mol_type = other RNA
gtgcatctggtctggtgcac

SEQ ID NO: 14361 - RNA, 20 nt, synthetic construct
  source 1..20: mol_type = other RNA
ttgggtgggtgcatctggtc

SEQ ID NO: 14362 - RNA, 20 nt, synthetic construct
  source 1..20: mol_type = other RNA
tggaattgggtgggtgcatc

SEQ ID NO: 14363 - RNA, 20 nt, synthetic construct
  source 1..20: mol_type = other RNA
tgaggagcgtggaattgggt

SEQ ID NO: 14364 - RNA, 20 nt, synthetic construct
  source 1..20: mol_type = other RNA
ctgaggagcgtggaattggg

SEQ ID NO: 14365 - RNA, 20 nt, synthetic construct
  source 1..20: mol_type = other RNA
gggctgaggagcgtggaatt

SEQ ID NO: 14366 - RNA, 20 nt, synthetic construct
  source 1..20: mol_type = other RNA
ggggctgaggagcgtggaat

SEQ ID NO: 14367 - RNA, 20 nt, synthetic construct
  source 1..20: mol_type = other RNA
aagcaaggggctgaggagcg

SEQ ID NO: 14368 - RNA, 20 nt, synthetic construct
  source 1..20: mol_type = other RNA
cagaggaaagcaaggggctg

SEQ ID NO: 14369 - RNA, 20 nt, synthetic construct
  source 1..20: mol_type = other RNA
tgtctgcagaggaaagcaag

SEQ ID NO: 14370 - RNA, 20 nt, synthetic construct
  source 1..20: mol_type = other RNA
ctgtctgcagaggaaagcaa

SEQ ID NO: 14371 - RNA, 20 nt, synthetic construct
  source 1..20: mol_type = other RNA
gctgtctgcagaggaaagca

SEQ ID NO: 14372 - RNA, 20 nt, synthetic construct
  source 1..20: mol_type = other RNA
gctgaactggctgtctgcag

SEQ ID NO: 14373 - RNA, 20 nt, synthetic construct
  source 1..20: mol_type = other RNA
tggcataactgtagctgaac

SEQ ID NO: 14374 - RNA, 20 nt, synthetic construct
  source 1..20: mol_type = other RNA
agatcagagtgcaggcaatc

SEQ ID NO: 14375 - RNA, 20 nt, synthetic construct
  source 1..20: mol_type = other RNA
gatggtaaagatcagagtgc

SEQ ID NO: 14376 - RNA, 20 nt, synthetic construct
  source 1..20: mol_type = other RNA
tcaagctgagagtctggtga

SEQ ID NO: 14377 - RNA, 20 nt, synthetic construct
  source 1..20: mol_type = other RNA
atgagctcaagctgagagtc

SEQ ID NO: 14378 - RNA, 20 nt, synthetic construct
  source 1..20: mol_type = other RNA
tgcctgagaaatccactttc

SEQ ID NO: 14379 - RNA, 20 nt, synthetic construct
  source 1..20: mol_type = other RNA
gcctgagaaatccactttct

SEQ ID NO: 14380 - RNA, 20 nt, synthetic construct
  source 1..20: mol_type = other RNA
tgagaaatccactttctggg

SEQ ID NO: 14381 - RNA, 20 nt, synthetic construct
  source 1..20: mol_type = other RNA
tcccagaaagtggatttctc

SEQ ID NO: 14382 - RNA, 20 nt, synthetic construct
  source 1..20: mol_type = other RNA
aaatccactttctgggagga

SEQ ID NO: 14383 - RNA, 20 nt, synthetic construct
  source 1..20: mol_type = other RNA
tctgccttcctcccagaaag

SEQ ID NO: 14384 - RNA, 20 nt, synthetic construct
  source 1..20: mol_type = other RNA
gaaggcagaagaaactgcca

SEQ ID NO: 14385 - RNA, 20 nt, synthetic construct
  source 1..20: mol_type = other RNA
gcagaagaaactgccaaggc

SEQ ID NO: 14386 - RNA, 20 nt, synthetic construct
  source 1..20: mol_type = other RNA
tcaagtcttcagtcctgcct

SEQ ID NO: 14387 - RNA, 20 nt, synthetic construct
  source 1..20: mol_type = other RNA
gacttgacctccacctgtag

SEQ ID NO: 14388 - RNA, 20 nt, synthetic construct
  source 1..20: mol_type = other RNA
acttgacctccacctgtagt

SEQ ID NO: 14389 - RNA, 20 nt, synthetic construct
  source 1..20: mol_type = other RNA
cttgacctccacctgtagtg

SEQ ID NO: 14390 - RNA, 20 nt, synthetic construct
  source 1..20: mol_type = other RNA
cctccacctgtagtggggtc

SEQ ID NO: 14391 - RNA, 20 nt, synthetic construct
  source 1..20: mol_type = other RNA
cctgaccccactacaggtgg

SEQ ID NO: 14392 - RNA, 20 nt, synthetic construct
  source 1..20: mol_type = other RNA
tgacctgaccccactacagg

SEQ ID NO: 14393 - RNA, 20 nt, synthetic construct
  source 1..20: mol_type = other RNA
tagtggggtcaggtcaccag

SEQ ID NO: 14394 - RNA, 20 nt, synthetic construct
  source 1..20: mol_type = other RNA
tggtgacctgaccccactac

SEQ ID NO: 14395 - RNA, 20 nt, synthetic construct
  source 1..20: mol_type = other RNA
ggggtcaggtcaccagaggc

SEQ ID NO: 14396 - RNA, 20 nt, synthetic construct
  source 1..20: mol_type = other RNA
cagaggctggctgactcccc

SEQ ID NO: 14397 - RNA, 20 nt, synthetic construct
  source 1..20: mol_type = other RNA
ctggggagtcagccagcctc

SEQ ID NO: 14398 - RNA, 20 nt, synthetic construct
  source 1..20: mol_type = other RNA
tactctgctgagaaatcctg

SEQ ID NO: 14399 - RNA, 20 nt, synthetic construct
  source 1..20: mol_type = other RNA
atactctgctgagaaatcct

SEQ ID NO: 14400 - RNA, 20 nt, synthetic construct
  source 1..20: mol_type = other RNA
aatactctgctgagaaatcc

SEQ ID NO: 14401 - RNA, 20 nt, synthetic construct
  source 1..20: mol_type = other RNA
gttgctaatctttaaggaag

SEQ ID NO: 14402 - RNA, 20 nt, synthetic construct
  source 1..20: mol_type = other RNA
ggttgctaatctttaaggaa

SEQ ID NO: 14403 - RNA, 20 nt, synthetic construct
  source 1..20: mol_type = other RNA
tggttgctaatctttaagga

SEQ ID NO: 14404 - RNA, 20 nt, synthetic construct
  source 1..20: mol_type = other RNA
taagtggttgctaatcttta

SEQ ID NO: 14405 - RNA, 20 nt, synthetic construct
  source 1..20: mol_type = other RNA
cttaaagacacaaagtgtgc

SEQ ID NO: 14406 - RNA, 20 nt, synthetic construct
  source 1..20: mol_type = other RNA
gcacactttgtgtctttaag

SEQ ID NO: 14407 - RNA, 20 nt, synthetic construct
  source 1..20: mol_type = other RNA
agtgtgcaggactgtaccca

SEQ ID NO: 14408 - RNA, 20 nt, synthetic construct
  source 1..20: mol_type = other RNA
actgtacccatggccgagag

SEQ ID NO: 14409 - RNA, 20 nt, synthetic construct
  source 1..20: mol_type = other RNA
gtacccatggccgagagcgg

SEQ ID NO: 14410 - RNA, 20 nt, synthetic construct
  source 1..20: mol_type = other RNA
tacccatggccgagagcggc

SEQ ID NO: 14411 - RNA, 20 nt, synthetic construct
  source 1..20: mol_type = other RNA
atcccgccgctctcggccat

SEQ ID NO: 14412 - RNA, 20 nt, synthetic construct
  source 1..20: mol_type = other RNA
aatcccgccgctctcggcca

SEQ ID NO: 14413 - RNA, 20 nt, synthetic construct
  source 1..20: mol_type = other RNA
ccgagagcggcgggattaag

SEQ ID NO: 14414 - RNA, 20 nt, synthetic construct
  source 1..20: mol_type = other RNA
cgagagcggcgggattaaga

SEQ ID NO: 14415 - RNA, 20 nt, synthetic construct
  source 1..20: mol_type = other RNA
cctcttaatcccgccgctct

SEQ ID NO: 14416 - RNA, 20 nt, synthetic construct
  source 1..20: mol_type = other RNA
cagcacagaggaggagggat

SEQ ID NO: 14417 - RNA, 20 nt, synthetic construct
  source 1..20: mol_type = other RNA
tcagcacagaggaggaggga

SEQ ID NO: 14418 - RNA, 20 nt, synthetic construct
  source 1..20: mol_type = other RNA
tgactcagcacagaggagga

SEQ ID NO: 14419 - RNA, 20 nt, synthetic construct
  source 1..20: mol_type = other RNA
gtgactcagcacagaggagg

SEQ ID NO: 14420 - RNA, 20 nt, synthetic construct
  source 1..20: mol_type = other RNA
aaggtgactcagcacagagg

SEQ ID NO: 14421 - RNA, 20 nt, synthetic construct
  source 1..20: mol_type = other RNA
gtgctgagtcaccttctgct

SEQ ID NO: 14422 - RNA, 20 nt, synthetic construct
  source 1..20: mol_type = other RNA
cttctgcttggaattctgac

SEQ ID NO: 14423 - RNA, 20 nt, synthetic construct
  source 1..20: mol_type = other RNA
ttctgcttggaattctgaca

SEQ ID NO: 14424 - RNA, 20 nt, synthetic construct
  source 1..20: mol_type = other RNA
ctgtcagaattccaagcaga

SEQ ID NO: 14425 - RNA, 20 nt, synthetic construct
  source 1..20: mol_type = other RNA
gaattctgacagggacccgt

SEQ ID NO: 14426 - RNA, 20 nt, synthetic construct
  source 1..20: mol_type = other RNA
aattctgacagggacccgtt

SEQ ID NO: 14427 - RNA, 20 nt, synthetic construct
  source 1..20: mol_type = other RNA
acagggacccgttgggcttc

SEQ ID NO: 14428 - RNA, 20 nt, synthetic construct
  source 1..20: mol_type = other RNA
ggacccgttgggcttctgga

SEQ ID NO: 14429 - RNA, 20 nt, synthetic construct
  source 1..20: mol_type = other RNA
gacccgttgggcttctggaa

SEQ ID NO: 14430 - RNA, 20 nt, synthetic construct
  source 1..20: mol_type = other RNA
ccgttgggcttctggaaggg

SEQ ID NO: 14431 - RNA, 20 nt, synthetic construct
  source 1..20: mol_type = other RNA
cgttgggcttctggaaggga

SEQ ID NO: 14432 - RNA, 20 nt, synthetic construct
  source 1..20: mol_type = other RNA
ctcccttccagaagcccaac

SEQ ID NO: 14433 - RNA, 20 nt, synthetic construct
  source 1..20: mol_type = other RNA
cctcccttccagaagcccaa

SEQ ID NO: 14434 - RNA, 20 nt, synthetic construct
  source 1..20: mol_type = other RNA
ctggaagggagggacagcag

SEQ ID NO: 14435 - RNA, 20 nt, synthetic construct
  source 1..20: mol_type = other RNA
gatccaccctctgtgtgtcc

SEQ ID NO: 14436 - RNA, 20 nt, synthetic construct
  source 1..20: mol_type = other RNA
atccaccctctgtgtgtcct

SEQ ID NO: 14437 - RNA, 20 nt, synthetic construct
  source 1..20: mol_type = other RNA
tccaccctctgtgtgtcctg

SEQ ID NO: 14438 - RNA, 20 nt, synthetic construct
  source 1..20: mol_type = other RNA
ccaccctctgtgtgtcctgg

SEQ ID NO: 14439 - RNA, 20 nt, synthetic construct
  source 1..20: mol_type = other RNA
cccccaggacacacagaggg

SEQ ID NO: 14440 - RNA, 20 nt, synthetic construct
  source 1..20: mol_type = other RNA
tctcccccaggacacacaga

SEQ ID NO: 14441 - RNA, 20 nt, synthetic construct
  source 1..20: mol_type = other RNA
atctcccccaggacacacag

SEQ ID NO: 14442 - RNA, 20 nt, synthetic construct
  source 1..20: mol_type = other RNA
tgggggagattacttatctc

SEQ ID NO: 14443 - RNA, 20 nt, synthetic construct
  source 1..20: mol_type = other RNA
agagataagtaatctccccc

SEQ ID NO: 14444 - RNA, 20 nt, synthetic construct
  source 1..20: mol_type = other RNA
atctctggcctccctgaagc

SEQ ID NO: 14445 - RNA, 20 nt, synthetic construct
  source 1..20: mol_type = other RNA
tctctggcctccctgaagca

SEQ ID NO: 14446 - RNA, 20 nt, synthetic construct
  source 1..20: mol_type = other RNA
ggcctccctgaagcagggcc

SEQ ID NO: 14447 - RNA, 20 nt, synthetic construct
  source 1..20: mol_type = other RNA
gcctccctgaagcagggcct

SEQ ID NO: 14448 - RNA, 20 nt, synthetic construct
  source 1..20: mol_type = other RNA
gcccaggccctgcttcaggg

SEQ ID NO: 14449 - RNA, 20 nt, synthetic construct
  source 1..20: mol_type = other RNA
tgaagcagggcctgggcttc

SEQ ID NO: 14450 - RNA, 20 nt, synthetic construct
  source 1..20: mol_type = other RNA
gaagcccaggccctgcttca

SEQ ID NO: 14451 - RNA, 20 nt, synthetic construct
  source 1..20: mol_type = other RNA
agaagcccaggccctgcttc

SEQ ID NO: 14452 - RNA, 20 nt, synthetic construct
  source 1..20: mol_type = other RNA
ctgggcttctggaatctttg

SEQ ID NO: 14453 - RNA, 20 nt, synthetic construct
  source 1..20: mol_type = other RNA
ctcaaagattccagaagccc

SEQ ID NO: 14454 - RNA, 20 nt, synthetic construct
  source 1..20: mol_type = other RNA
ggctgacaccctgccagccc

SEQ ID NO: 14455 - RNA, 20 nt, synthetic construct
  source 1..20: mol_type = other RNA
gctgacaccctgccagccct

SEQ ID NO: 14456 - RNA, 20 nt, synthetic construct
  source 1..20: mol_type = other RNA
ctgacaccctgccagccctg

SEQ ID NO: 14457 - RNA, 20 nt, synthetic construct
  source 1..20: mol_type = other RNA
ctgccagccctggggatgag

SEQ ID NO: 14458 - RNA, 20 nt, synthetic construct
  source 1..20: mol_type = other RNA
tgccagccctggggatgaga

SEQ ID NO: 14459 - RNA, 20 nt, synthetic construct
  source 1..20: mol_type = other RNA
tctcatccccagggctggca

SEQ ID NO: 14460 - RNA, 20 nt, synthetic construct
  source 1..20: mol_type = other RNA
ctctcatccccagggctggc

SEQ ID NO: 14461 - RNA, 20 nt, synthetic construct
  source 1..20: mol_type = other RNA
gccctggggatgagagggaa

SEQ ID NO: 14462 - RNA, 20 nt, synthetic construct
  source 1..20: mol_type = other RNA
ttccctctcatccccagggc

SEQ ID NO: 14463 - RNA, 20 nt, synthetic construct
  source 1..20: mol_type = other RNA
gccattccctctcatcccca

SEQ ID NO: 14464 - RNA, 20 nt, synthetic construct
  source 1..20: mol_type = other RNA
ggccattccctctcatcccc

SEQ ID NO: 14465 - RNA, 20 nt, synthetic construct
  source 1..20: mol_type = other RNA
gtgtctgtctgcagagcctg

SEQ ID NO: 14466 - RNA, 20 nt, synthetic construct
  source 1..20: mol_type = other RNA
tctgtctgcagagcctgagg

SEQ ID NO: 14467 - RNA, 20 nt, synthetic construct
  source 1..20: mol_type = other RNA
gctgtgctcagctcctcctc

SEQ ID NO: 14468 - RNA, 20 nt, synthetic construct
  source 1..20: mol_type = other RNA
tcaactgaagagaactctgg

SEQ ID NO: 14469 - RNA, 20 nt, synthetic construct
  source 1..20: mol_type = other RNA
cgatcaactgaagagaactc

SEQ ID NO: 14470 - RNA, 20 nt, synthetic construct
  source 1..20: mol_type = other RNA
ttctcttcagttgatcgctt

SEQ ID NO: 14471 - RNA, 20 nt, synthetic construct
  source 1..20: mol_type = other RNA
tcttcagttgatcgcttagg

SEQ ID NO: 14472 - RNA, 20 nt, synthetic construct
  source 1..20: mol_type = other RNA
ttgatcgcttaggtggacaa

SEQ ID NO: 14473 - RNA, 20 nt, synthetic construct
  source 1..20: mol_type = other RNA
gtggacaaaggccacagaaa

SEQ ID NO: 14474 - RNA, 20 nt, synthetic construct
  source 1..20: mol_type = other RNA
ggagtttaaatccatttctg

SEQ ID NO: 14475 - RNA, 20 nt, synthetic construct
  source 1..20: mol_type = other RNA
aacatgcaaagaaagggctg

SEQ ID NO: 14476 - RNA, 20 nt, synthetic construct
  source 1..20: mol_type = other RNA
agaacaaacatgcaaagaaa

SEQ ID NO: 14477 - RNA, 20 nt, synthetic construct
  source 1..20: mol_type = other RNA
gagaacaaacatgcaaagaa

SEQ ID NO: 14478 - RNA, 20 nt, synthetic construct
  source 1..20: mol_type = other RNA
ttcacacgttcttgaggtgt

SEQ ID NO: 14479 - RNA, 20 nt, synthetic construct
  source 1..20: mol_type = other RNA
gtgcatttcacacgttcttg

SEQ ID NO: 14480 - RNA, 20 nt, synthetic construct
  source 1..20: mol_type = other RNA
acatacaataaccccatttc

SEQ ID NO: 14481 - RNA, 20 nt, synthetic construct
  source 1..20: mol_type = other RNA
ggacttggcttcctgaaatg

SEQ ID NO: 14482 - RNA, 20 nt, synthetic construct
  source 1..20: mol_type = other RNA
tggacttggcttcctgaaat

SEQ ID NO: 14483 - RNA, 20 nt, synthetic construct
  source 1..20: mol_type = other RNA
ctggacttggcttcctgaaa

SEQ ID NO: 14484 - RNA, 20 nt, synthetic construct
  source 1..20: mol_type = other RNA
tttgactgttaagctggact

SEQ ID NO: 14485 - RNA, 20 nt, synthetic construct
  source 1..20: mol_type = other RNA
aaatgttttgactgttaagc

SEQ ID NO: 14486 - RNA, 20 nt, synthetic construct
  source 1..20: mol_type = other RNA
agtgaaggactaaagactga

SEQ ID NO: 14487 - RNA, 20 nt, synthetic construct
  source 1..20: mol_type = other RNA
aagggagttcggcaaagtga

SEQ ID NO: 14488 - RNA, 20 nt, synthetic construct
  source 1..20: mol_type = other RNA
tgccgaactcccttttacac

SEQ ID NO: 14489 - RNA, 20 nt, synthetic construct
  source 1..20: mol_type = other RNA
tgccggtgtaaaagggagtt

SEQ ID NO: 14490 - RNA, 20 nt, synthetic construct
  source 1..20: mol_type = other RNA
ctgttgctgccggtgtaaaa

SEQ ID NO: 14491 - RNA, 20 nt, synthetic construct
  source 1..20: mol_type = other RNA
actgttgctgccggtgtaaa

SEQ ID NO: 14492 - RNA, 20 nt, synthetic construct
  source 1..20: mol_type = other RNA
acaggttaaactgttgctgc

SEQ ID NO: 14493 - RNA, 20 nt, synthetic construct
  source 1..20: mol_type = other RNA
cacactcttacagaagcaac

SEQ ID NO: 14494 - RNA, 20 nt, synthetic construct
  source 1..20: mol_type = other RNA
cttctgtaagagtgtgctac

SEQ ID NO: 14495 - RNA, 20 nt, synthetic construct
  source 1..20: mol_type = other RNA
ttctgtaagagtgtgctact

SEQ ID NO: 14496 - RNA, 20 nt, synthetic construct
  source 1..20: mol_type = other RNA
ctgcacacgtgttttagatg

SEQ ID NO: 14497 - RNA, 20 nt, synthetic construct
  source 1..20: mol_type = other RNA
catgctaaacagttgatcaa

SEQ ID NO: 14498 - RNA, 20 nt, synthetic construct
  source 1..20: mol_type = other RNA
gatcaaaggctcttgccttg

SEQ ID NO: 14499 - RNA, 20 nt, synthetic construct
  source 1..20: mol_type = other RNA
tgtctgcagcgtgggccaca

SEQ ID NO: 14500 - RNA, 20 nt, synthetic construct
  source 1..20: mol_type = other RNA
cgtcagagtgtctgcagcgt

SEQ ID NO: 14501 - RNA, 20 nt, synthetic construct
  source 1..20: mol_type = other RNA
tcgtcagagtgtctgcagcg

SEQ ID NO: 14502 - RNA, 20 nt, synthetic construct
  source 1..20: mol_type = other RNA
cgacatggggctgcggagct

SEQ ID NO: 14503 - RNA, 20 nt, synthetic construct
  source 1..20: mol_type = other RNA
gaagggacgacatggggctg

SEQ ID NO: 14504 - RNA, 20 nt, synthetic construct
  source 1..20: mol_type = other RNA
agtgcggaagggacgacatg

SEQ ID NO: 14505 - RNA, 20 nt, synthetic construct
  source 1..20: mol_type = other RNA
cagtgcggaagggacgacat

SEQ ID NO: 14506 - RNA, 20 nt, synthetic construct
  source 1..20: mol_type = other RNA
gcagtgcggaagggacgaca

SEQ ID NO: 14507 - RNA, 20 nt, synthetic construct
  source 1..20: mol_type = other RNA
gcacagcaggcagtgcggaa

SEQ ID NO: 14508 - RNA, 20 nt, synthetic construct
  source 1..20: mol_type = other RNA
ggcacagcaggcagtgcgga

SEQ ID NO: 14509 - RNA, 20 nt, synthetic construct
  source 1..20: mol_type = other RNA
gagaggcacagcaggcagtg

SEQ ID NO: 14510 - RNA, 20 nt, synthetic construct
  source 1..20: mol_type = other RNA
ctgtgcctctcctctccatg

SEQ ID NO: 14511 - RNA, 20 nt, synthetic construct
  source 1..20: mol_type = other RNA
atggagaggagaggcacagc

SEQ ID NO: 14512 - RNA, 20 nt, synthetic construct
  source 1..20: mol_type = other RNA
gcctctcctctccatgtggc

SEQ ID NO: 14513 - RNA, 20 nt, synthetic construct
  source 1..20: mol_type = other RNA
cctctcctctccatgtggca

SEQ ID NO: 14514 - RNA, 20 nt, synthetic construct
  source 1..20: mol_type = other RNA
ccctgccacatggagaggag

SEQ ID NO: 14515 - RNA, 20 nt, synthetic construct
  source 1..20: mol_type = other RNA
gtgttccctgccacatggag

SEQ ID NO: 14516 - RNA, 20 nt, synthetic construct
  source 1..20: mol_type = other RNA
tggctgtgttccctgccaca

SEQ ID NO: 14517 - RNA, 20 nt, synthetic construct
  source 1..20: mol_type = other RNA
cacagccagtcatcaccatg

SEQ ID NO: 14518 - RNA, 20 nt, synthetic construct
  source 1..20: mol_type = other RNA
catcaccatgtggctctgcc

SEQ ID NO: 14519 - RNA, 20 nt, synthetic construct
  source 1..20: mol_type = other RNA
cagcgccgggcagagccaca

SEQ ID NO: 14520 - RNA, 20 nt, synthetic construct
  source 1..20: mol_type = other RNA
ggacatgctggggcagcgcc

SEQ ID NO: 14521 - RNA, 20 nt, synthetic construct
  source 1..20: mol_type = other RNA
aggacatgctggggcagcgc

SEQ ID NO: 14522 - RNA, 20 nt, synthetic construct
  source 1..20: mol_type = other RNA
ctgccccagcatgtcctgac

SEQ ID NO: 14523 - RNA, 20 nt, synthetic construct
  source 1..20: mol_type = other RNA
tgccccagcatgtcctgaca

SEQ ID NO: 14524 - RNA, 20 nt, synthetic construct
  source 1..20: mol_type = other RNA
ggccctgtcaggacatgctg

SEQ ID NO: 14525 - RNA, 20 nt, synthetic construct
  source 1..20: mol_type = other RNA
aggccctgtcaggacatgct

SEQ ID NO: 14526 - RNA, 20 nt, synthetic construct
  source 1..20: mol_type = other RNA
taggccctgtcaggacatgc

SEQ ID NO: 14527 - RNA, 20 nt, synthetic construct
  source 1..20: mol_type = other RNA
gtcctgacagggcctagata

SEQ ID NO: 14528 - RNA, 20 nt, synthetic construct
  source 1..20: mol_type = other RNA
gacagggcctagatatggaa

SEQ ID NO: 14529 - RNA, 20 nt, synthetic construct
  source 1..20: mol_type = other RNA
ttccatatctaggccctgtc

SEQ ID NO: 14530 - RNA, 20 nt, synthetic construct
  source 1..20: mol_type = other RNA
agggcctagatatggaaagg

SEQ ID NO: 14531 - RNA, 20 nt, synthetic construct
  source 1..20: mol_type = other RNA
agagccacctttccatatct

SEQ ID NO: 14532 - RNA, 20 nt, synthetic construct
  source 1..20: mol_type = other RNA
aggggcttggggtgtgtgca

SEQ ID NO: 14533 - RNA, 20 nt, synthetic construct
  source 1..20: mol_type = other RNA
cggcgggcaggaggggcttg

SEQ ID NO: 14534 - RNA, 20 nt, synthetic construct
  source 1..20: mol_type = other RNA
acggcgggcaggaggggctt

SEQ ID NO: 14535 - RNA, 20 nt, synthetic construct
  source 1..20: mol_type = other RNA
cacggcgggcaggaggggct

SEQ ID NO: 14536 - RNA, 20 nt, synthetic construct
  source 1..20: mol_type = other RNA
ggtcacacggcgggcaggag

SEQ ID NO: 14537 - RNA, 20 nt, synthetic construct
  source 1..20: mol_type = other RNA
gggtcacacggcgggcagga

SEQ ID NO: 14538 - RNA, 20 nt, synthetic construct
  source 1..20: mol_type = other RNA
tgggtcacacggcgggcagg

SEQ ID NO: 14539 - RNA, 20 nt, synthetic construct
  source 1..20: mol_type = other RNA
gtgtgggtcacacggcgggc

SEQ ID NO: 14540 - RNA, 20 nt, synthetic construct
  source 1..20: mol_type = other RNA
ccgtgtgacccacactctta

SEQ ID NO: 14541 - RNA, 20 nt, synthetic construct
  source 1..20: mol_type = other RNA
cgtgtgacccacactcttat

SEQ ID NO: 14542 - RNA, 20 nt, synthetic construct
  source 1..20: mol_type = other RNA
taagagtgtgggtcacacgg

SEQ ID NO: 14543 - RNA, 20 nt, synthetic construct
  source 1..20: mol_type = other RNA
ccataagagtgtgggtcaca

SEQ ID NO: 14544 - RNA, 20 nt, synthetic construct
  source 1..20: mol_type = other RNA
tgggctgcccataagagtgt

SEQ ID NO: 14545 - RNA, 20 nt, synthetic construct
  source 1..20: mol_type = other RNA
ctgggctgcccataagagtg

SEQ ID NO: 14546 - RNA, 20 nt, synthetic construct
  source 1..20: mol_type = other RNA
ggaaatgctacaaaataact

SEQ ID NO: 14547 - RNA, 20 nt, synthetic construct
  source 1..20: mol_type = other RNA
gggaaatgctacaaaataac

SEQ ID NO: 14548 - RNA, 20 nt, synthetic construct
  source 1..20: mol_type = other RNA
atttcccttccttatcattt

SEQ ID NO: 14549 - RNA, 20 nt, synthetic construct
  source 1..20: mol_type = other RNA
tgggccaaaatgataaggaa

SEQ ID NO: 14550 - RNA, 20 nt, synthetic construct
  source 1..20: mol_type = other RNA
ctgggccaaaatgataagga

SEQ ID NO: 14551 - RNA, 20 nt, synthetic construct
  source 1..20: mol_type = other RNA
atcactgggccaaaatgata

SEQ ID NO: 14552 - RNA, 20 nt, synthetic construct
  source 1..20: mol_type = other RNA
gagatttgtgctggatcact

SEQ ID NO: 14553 - RNA, 20 nt, synthetic construct
  source 1..20: mol_type = other RNA
ggagatttgtgctggatcac

SEQ ID NO: 14554 - RNA, 20 nt, synthetic construct
  source 1..20: mol_type = other RNA
ctaataagggagatttgtgc

SEQ ID NO: 14555 - RNA, 20 nt, synthetic construct
  source 1..20: mol_type = other RNA
tcccttattagaataaaatt

SEQ ID NO: 14556 - RNA, 20 nt, synthetic construct
  source 1..20: mol_type = other RNA
tccaaattttattctaataa

SEQ ID NO: 14557 - RNA, 20 nt, synthetic construct
  source 1..20: mol_type = other RNA
ttccaaattttattctaata

SEQ ID NO: 14558 - RNA, 20 nt, synthetic construct
  source 1..20: mol_type = other RNA
ttcatttttcacttatattg

SEQ ID NO: 14559 - RNA, 20 nt, synthetic construct
  source 1..20: mol_type = other RNA
tggcaggggtgaagagtgtg

SEQ ID NO: 14560 - RNA, 20 nt, synthetic construct
  source 1..20: mol_type = other RNA
cttgtcagggatcgtggcag

SEQ ID NO: 14561 - RNA, 20 nt, synthetic construct
  source 1..20: mol_type = other RNA
tcttgtcagggatcgtggca

SEQ ID NO: 14562 - RNA, 20 nt, synthetic construct
  source 1..20: mol_type = other RNA
ctcttgtcagggatcgtggc

SEQ ID NO: 14563 - RNA, 20 nt, synthetic construct
  source 1..20: mol_type = other RNA
aaggctcttgtcagggatcg

SEQ ID NO: 14564 - RNA, 20 nt, synthetic construct
  source 1..20: mol_type = other RNA
agataggaaggctcttgtca

SEQ ID NO: 14565 - RNA, 20 nt, synthetic construct
  source 1..20: mol_type = other RNA
tagataggaaggctcttgtc

SEQ ID NO: 14566 - RNA, 20 nt, synthetic construct
  source 1..20: mol_type = other RNA
ggaacaatgattagatagga

SEQ ID NO: 14567 - RNA, 20 nt, synthetic construct
  source 1..20: mol_type = other RNA
tggaggaacaatgattagat

SEQ ID NO: 14568 - RNA, 20 nt, synthetic construct
  source 1..20: mol_type = other RNA
aagaaaactaagagggctgg

SEQ ID NO: 14569 - RNA, 20 nt, synthetic construct
  source 1..20: mol_type = other RNA
ctgaagaaaactaagagggc

SEQ ID NO: 14570 - RNA, 20 nt, synthetic construct
  source 1..20: mol_type = other RNA
aaggctgaagaaaactaaga

SEQ ID NO: 14571 - RNA, 20 nt, synthetic construct
  source 1..20: mol_type = other RNA
aaaggctgaagaaaactaag

SEQ ID NO: 14572 - RNA, 20 nt, synthetic construct
  source 1..20: mol_type = other RNA
gacattcaggcaatcaagaa

SEQ ID NO: 14573 - RNA, 20 nt, synthetic construct
  source 1..20: mol_type = other RNA
gagaagggaaagggacattc

SEQ ID NO: 14574 - RNA, 20 nt, synthetic construct
  source 1..20: mol_type = other RNA
ctttaaaaggagaagggaaa

SEQ ID NO: 14575 - RNA, 20 nt, synthetic construct
  source 1..20: mol_type = other RNA
gctttaaaaggagaagggaa

SEQ ID NO: 14576 - RNA, 20 nt, synthetic construct
  source 1..20: mol_type = other RNA
ttcatgctttaaaaggagaa

SEQ ID NO: 14577 - RNA, 20 nt, synthetic construct
  source 1..20: mol_type = other RNA
gttcatgctttaaaaggaga

SEQ ID NO: 14578 - RNA, 20 nt, synthetic construct
  source 1..20: mol_type = other RNA
agcttggttcatgctttaaa

SEQ ID NO: 14579 - RNA, 20 nt, synthetic construct
  source 1..20: mol_type = other RNA
gagaacggggtaagaaagct

SEQ ID NO: 14580 - RNA, 20 nt, synthetic construct
  source 1..20: mol_type = other RNA
caaaaatgataatgagaacg

SEQ ID NO: 14581 - RNA, 20 nt, synthetic construct
  source 1..20: mol_type = other RNA
gcaaaaatgataatgagaac

SEQ ID NO: 14582 - RNA, 20 nt, synthetic construct
  source 1..20: mol_type = other RNA
tgcaaaaatgataatgagaa

SEQ ID NO: 14583 - RNA, 20 nt, synthetic construct
  source 1..20: mol_type = other RNA
tctccttaaattataaaact

SEQ ID NO: 14584 - RNA, 20 nt, synthetic construct
  source 1..20: mol_type = other RNA
ctccttaaattataaaactt

SEQ ID NO: 14585 - RNA, 20 nt, synthetic construct
  source 1..20: mol_type = other RNA
tccttaaattataaaacttg

SEQ ID NO: 14586 - RNA, 20 nt, synthetic construct
  source 1..20: mol_type = other RNA
ccttaaattataaaacttgg

SEQ ID NO: 14587 - RNA, 20 nt, synthetic construct
  source 1..20: mol_type = other RNA
cccccaagttttataattta

SEQ ID NO: 14588 - RNA, 20 nt, synthetic construct
  source 1..20: mol_type = other RNA
aacttgggggtaatttctag

SEQ ID NO: 14589 - RNA, 20 nt, synthetic construct
  source 1..20: mol_type = other RNA
agtagacagaagcactatga

SEQ ID NO: 14590 - RNA, 20 nt, synthetic construct
  source 1..20: mol_type = other RNA
ccaaaaaagagtaagcaaga

SEQ ID NO: 14591 - RNA, 20 nt, synthetic construct
  source 1..20: mol_type = other RNA
ccttcttgcttactcttttt

SEQ ID NO: 14592 - RNA, 20 nt, synthetic construct
  source 1..20: mol_type = other RNA
aagcaagaaggttacaacac

SEQ ID NO: 14593 - RNA, 20 nt, synthetic construct
  source 1..20: mol_type = other RNA
agcaagaaggttacaacact

SEQ ID NO: 14594 - RNA, 20 nt, synthetic construct
  source 1..20: mol_type = other RNA
caggttgaagaacaggctta

SEQ ID NO: 14595 - RNA, 20 nt, synthetic construct
  source 1..20: mol_type = other RNA
acaggttgaagaacaggctt

SEQ ID NO: 14596 - RNA, 20 nt, synthetic construct
  source 1..20: mol_type = other RNA
cattcaacaggttgaagaac

SEQ ID NO: 14597 - RNA, 20 nt, synthetic construct
  source 1..20: mol_type = other RNA
tttaggggaaaacattcaac

SEQ ID NO: 14598 - RNA, 20 nt, synthetic construct
  source 1..20: mol_type = other RNA
ttttcccctaaattgttata

SEQ ID NO: 14599 - RNA, 20 nt, synthetic construct
  source 1..20: mol_type = other RNA
aaattgttatatggagatcc

SEQ ID NO: 14600 - RNA, 20 nt, synthetic construct
  source 1..20: mol_type = other RNA
gatctccatataacaattta

SEQ ID NO: 14601 - RNA, 20 nt, synthetic construct
  source 1..20: mol_type = other RNA
ggatctccatataacaattt

SEQ ID NO: 14602 - RNA, 20 nt, synthetic construct
  source 1..20: mol_type = other RNA
ttatatggagatcctggacc

SEQ ID NO: 14603 - RNA, 20 nt, synthetic construct
  source 1..20: mol_type = other RNA
gagatcctggacccggaagt

SEQ ID NO: 14604 - RNA, 20 nt, synthetic construct
  source 1..20: mol_type = other RNA
gtcagccaacttccgggtcc

SEQ ID NO: 14605 - RNA, 20 nt, synthetic construct
  source 1..20: mol_type = other RNA
gaagttggctgacatgaaac

SEQ ID NO: 14606 - RNA, 20 nt, synthetic construct
  source 1..20: mol_type = other RNA
tttcatgtcagccaacttcc

SEQ ID NO: 14607 - RNA, 20 nt, synthetic construct
  source 1..20: mol_type = other RNA
gtttcatgtcagccaacttc

SEQ ID NO: 14608 - RNA, 20 nt, synthetic construct
  source 1..20: mol_type = other RNA
tgacatgaaacaggcctagc

SEQ ID NO: 14609 - RNA, 20 nt, synthetic construct
  source 1..20: mol_type = other RNA
gacatgaaacaggcctagca

SEQ ID NO: 14610 - RNA, 20 nt, synthetic construct
  source 1..20: mol_type = other RNA
caggcctagcagggcagctg

SEQ ID NO: 14611 - RNA, 20 nt, synthetic construct
  source 1..20: mol_type = other RNA
atttcctcagctgccctgct

SEQ ID NO: 14612 - RNA, 20 nt, synthetic construct
  source 1..20: mol_type = other RNA
tgaggaaatgctccaacctc

SEQ ID NO: 14613 - RNA, 20 nt, synthetic construct
  source 1..20: mol_type = other RNA
atgctccaacctcaggatcc

SEQ ID NO: 14614 - RNA, 20 nt, synthetic construct
  source 1..20: mol_type = other RNA
atcttcctggatcctgaggt

SEQ ID NO: 14615 - RNA, 20 nt, synthetic construct
  source 1..20: mol_type = other RNA
ggatccaggaagattgcaca

SEQ ID NO: 14616 - RNA, 20 nt, synthetic construct
  source 1..20: mol_type = other RNA
ggtgccatgtgcaatcttcc

SEQ ID NO: 14617 - RNA, 20 nt, synthetic construct
  source 1..20: mol_type = other RNA
tagcttttaaatgattgttt

SEQ ID NO: 14618 - RNA, 20 nt, synthetic construct
  source 1..20: mol_type = other RNA
aatcatttaaaagctaatcc

SEQ ID NO: 14619 - RNA, 20 nt, synthetic construct
  source 1..20: mol_type = other RNA
tttaaaagctaatcctggcc

SEQ ID NO: 14620 - RNA, 20 nt, synthetic construct
  source 1..20: mol_type = other RNA
ctaatcctggccaggcacag

SEQ ID NO: 14621 - RNA, 20 nt, synthetic construct
  source 1..20: mol_type = other RNA
gtgagccactgtgcctggcc

SEQ ID NO: 14622 - RNA, 20 nt, synthetic construct
  source 1..20: mol_type = other RNA
caggcgtgagccactgtgcc

SEQ ID NO: 14623 - RNA, 20 nt, synthetic construct
  source 1..20: mol_type = other RNA
cgcctgtaatcccagcactt

SEQ ID NO: 14624 - RNA, 20 nt, synthetic construct
  source 1..20: mol_type = other RNA
gcctgtaatcccagcacttt

SEQ ID NO: 14625 - RNA, 20 nt, synthetic construct
  source 1..20: mol_type = other RNA
tgtaatcccagcactttggg

SEQ ID NO: 14626 - RNA, 20 nt, synthetic construct
  source 1..20: mol_type = other RNA
tcccaaagtgctgggattac

SEQ ID NO: 14627 - RNA, 20 nt, synthetic construct
  source 1..20: mol_type = other RNA
cccagcactttgggaggccg

SEQ ID NO: 14628 - RNA, 20 nt, synthetic construct
  source 1..20: mol_type = other RNA
agcactttgggaggccgagg

SEQ ID NO: 14629 - RNA, 20 nt, synthetic construct
  source 1..20: mol_type = other RNA
gcactttgggaggccgaggt

SEQ ID NO: 14630 - RNA, 20 nt, synthetic construct
  source 1..20: mol_type = other RNA
cctcggcctcccaaagtgct

SEQ ID NO: 14631 - RNA, 20 nt, synthetic construct
  source 1..20: mol_type = other RNA
acctcggcctcccaaagtgc

SEQ ID NO: 14632 - RNA, 20 nt, synthetic construct
  source 1..20: mol_type = other RNA
gccgaggtgggctgatcaca

SEQ ID NO: 14633 - RNA, 20 nt, synthetic construct
  source 1..20: mol_type = other RNA
accttgtgatcagcccacct

SEQ ID NO: 14634 - RNA, 20 nt, synthetic construct
  source 1..20: mol_type = other RNA
cgagaccatcctgaccaaca

SEQ ID NO: 14635 - RNA, 20 nt, synthetic construct
  source 1..20: mol_type = other RNA
tttcaccatgttggtcagga

SEQ ID NO: 14636 - RNA, 20 nt, synthetic construct
  source 1..20: mol_type = other RNA
ggggtttcaccatgttggtc

SEQ ID NO: 14637 - RNA, 20 nt, synthetic construct
  source 1..20: mol_type = other RNA
gagatggggtttcaccatgt

SEQ ID NO: 14638 - RNA, 20 nt, synthetic construct
  source 1..20: mol_type = other RNA
ttgtacttttggtagagatg

SEQ ID NO: 14639 - RNA, 20 nt, synthetic construct
  source 1..20: mol_type = other RNA
tttgtacttttggtagagat

SEQ ID NO: 14640 - RNA, 20 nt, synthetic construct
  source 1..20: mol_type = other RNA
atttgtacttttggtagaga

SEQ ID NO: 14641 - RNA, 20 nt, synthetic construct
  source 1..20: mol_type = other RNA
ccaaaagtacaaatattagc

SEQ ID NO: 14642 - RNA, 20 nt, synthetic construct
  source 1..20: mol_type = other RNA
caaaagtacaaatattagct

SEQ ID NO: 14643 - RNA, 20 nt, synthetic construct
  source 1..20: mol_type = other RNA
ccagctaatatttgtacttt

SEQ ID NO: 14644 - RNA, 20 nt, synthetic construct
  source 1..20: mol_type = other RNA
gtacaaatattagctgggca

SEQ ID NO: 14645 - RNA, 20 nt, synthetic construct
  source 1..20: mol_type = other RNA
caaatattagctgggcatgg

SEQ ID NO: 14646 - RNA, 20 nt, synthetic construct
  source 1..20: mol_type = other RNA
cgcctgtagtcccagctacc

SEQ ID NO: 14647 - RNA, 20 nt, synthetic construct
  source 1..20: mol_type = other RNA
gcctgtagtcccagctaccc

SEQ ID NO: 14648 - RNA, 20 nt, synthetic construct
  source 1..20: mol_type = other RNA
tgtagtcccagctacccggg

SEQ ID NO: 14649 - RNA, 20 nt, synthetic construct
  source 1..20: mol_type = other RNA
tcccgggtagctgggactac

SEQ ID NO: 14650 - RNA, 20 nt, synthetic construct
  source 1..20: mol_type = other RNA
cccagctacccgggaggctg

SEQ ID NO: 14651 - RNA, 20 nt, synthetic construct
  source 1..20: mol_type = other RNA
gctacccgggaggctgaggc

SEQ ID NO: 14652 - RNA, 20 nt, synthetic construct
  source 1..20: mol_type = other RNA
cctcagcctcccgggtagct

SEQ ID NO: 14653 - RNA, 20 nt, synthetic construct
  source 1..20: mol_type = other RNA
gcctcagcctcccgggtagc

SEQ ID NO: 14654 - RNA, 20 nt, synthetic construct
  source 1..20: mol_type = other RNA
ttctcctgcctcagcctccc

SEQ ID NO: 14655 - RNA, 20 nt, synthetic construct
  source 1..20: mol_type = other RNA
attctcctgcctcagcctcc

SEQ ID NO: 14656 - RNA, 20 nt, synthetic construct
  source 1..20: mol_type = other RNA
gcaggagaatcacttgaacc

SEQ ID NO: 14657 - RNA, 20 nt, synthetic construct
  source 1..20: mol_type = other RNA
caggagaatcacttgaaccc

SEQ ID NO: 14658 - RNA, 20 nt, synthetic construct
  source 1..20: mol_type = other RNA
gagaatcacttgaacccggg

SEQ ID NO: 14659 - RNA, 20 nt, synthetic construct
  source 1..20: mol_type = other RNA
aatcacttgaacccgggagg

SEQ ID NO: 14660 - RNA, 20 nt, synthetic construct
  source 1..20: mol_type = other RNA
cacttgaacccgggaggagg

SEQ ID NO: 14661 - RNA, 20 nt, synthetic construct
  source 1..20: mol_type = other RNA
cactgcaacctcctcctccc

SEQ ID NO: 14662 - RNA, 20 nt, synthetic construct
  source 1..20: mol_type = other RNA
tcactgcaacctcctcctcc

SEQ ID NO: 14663 - RNA, 20 nt, synthetic construct
  source 1..20: mol_type = other RNA
ggagtgcagtggcatgatct

SEQ ID NO: 14664 - RNA, 20 nt, synthetic construct
  source 1..20: mol_type = other RNA
catgccactgcactccagcc

SEQ ID NO: 14665 - RNA, 20 nt, synthetic construct
  source 1..20: mol_type = other RNA
gtcaccaggctggagtgcag

SEQ ID NO: 14666 - RNA, 20 nt, synthetic construct
  source 1..20: mol_type = other RNA
gtcttgctctgtcaccaggc

SEQ ID NO: 14667 - RNA, 20 nt, synthetic construct
  source 1..20: mol_type = other RNA
tggagtcttgctctgtcacc

SEQ ID NO: 14668 - RNA, 20 nt, synthetic construct
  source 1..20: mol_type = other RNA
tttttttttcttttttgaga

SEQ ID NO: 14669 - RNA, 20 nt, synthetic construct
  source 1..20: mol_type = other RNA
caaaatgatggttcttttat

SEQ ID NO: 14670 - RNA, 20 nt, synthetic construct
  source 1..20: mol_type = other RNA
tcaaaatgatggttctttta

SEQ ID NO: 14671 - RNA, 20 nt, synthetic construct
  source 1..20: mol_type = other RNA
aaacagcaggttcaaaatga

SEQ ID NO: 14672 - RNA, 20 nt, synthetic construct
  source 1..20: mol_type = other RNA
agtacaagaaaggaaacagc

SEQ ID NO: 14673 - RNA, 20 nt, synthetic construct
  source 1..20: mol_type = other RNA
acttctaaagagtacaagaa

SEQ ID NO: 14674 - RNA, 20 nt, synthetic construct
  source 1..20: mol_type = other RNA
tttctccctttctaagccat

SEQ ID NO: 14675 - RNA, 20 nt, synthetic construct
  source 1..20: mol_type = other RNA
tggcttagaaagggagaaat

SEQ ID NO: 14676 - RNA, 20 nt, synthetic construct
  source 1..20: mol_type = other RNA
atggcttagaaagggagaaa

SEQ ID NO: 14677 - RNA, 20 nt, synthetic construct
  source 1..20: mol_type = other RNA
atacacctatggcttagaaa

SEQ ID NO: 14678 - RNA, 20 nt, synthetic construct
  source 1..20: mol_type = other RNA
aatacacctatggcttagaa

SEQ ID NO: 14679 - RNA, 20 nt, synthetic construct
  source 1..20: mol_type = other RNA
taagccataggtgtattaat

SEQ ID NO: 14680 - RNA, 20 nt, synthetic construct
  source 1..20: mol_type = other RNA
agctccaattaatacaccta

SEQ ID NO: 14681 - RNA, 20 nt, synthetic construct
  source 1..20: mol_type = other RNA
aataaaacaaaaacaaaaat

SEQ ID NO: 14682 - RNA, 20 nt, synthetic construct
  source 1..20: mol_type = other RNA
aacaaaaacaaaaataggac

SEQ ID NO: 14683 - RNA, 20 nt, synthetic construct
  source 1..20: mol_type = other RNA
tctcttcatgtagtacaact

SEQ ID NO: 14684 - RNA, 20 nt, synthetic construct
  source 1..20: mol_type = other RNA
tgtactacatgaagagagaa

SEQ ID NO: 14685 - RNA, 20 nt, synthetic construct
  source 1..20: mol_type = other RNA
gtactacatgaagagagaaa

SEQ ID NO: 14686 - RNA, 20 nt, synthetic construct
  source 1..20: mol_type = other RNA
agagagaaagggccagacat

SEQ ID NO: 14687 - RNA, 20 nt, synthetic construct
  source 1..20: mol_type = other RNA
gattaggaaaaaccaatgtc

SEQ ID NO: 14688 - RNA, 20 nt, synthetic construct
  source 1..20: mol_type = other RNA
ggagaacttgacagaagatt

SEQ ID NO: 14689 - RNA, 20 nt, synthetic construct
  source 1..20: mol_type = other RNA
gttctccaaatcatctgctc

SEQ ID NO: 14690 - RNA, 20 nt, synthetic construct
  source 1..20: mol_type = other RNA
tccaaatcatctgctctgga

SEQ ID NO: 14691 - RNA, 20 nt, synthetic construct
  source 1..20: mol_type = other RNA
accttccagagcagatgatt

SEQ ID NO: 14692 - RNA, 20 nt, synthetic construct
  source 1..20: mol_type = other RNA
tggaaggtagctccaacagc

SEQ ID NO: 14693 - RNA, 20 nt, synthetic construct
  source 1..20: mol_type = other RNA
ggaaggtagctccaacagct

SEQ ID NO: 14694 - RNA, 20 nt, synthetic construct
  source 1..20: mol_type = other RNA
ttacttcaaatcccagctgt

SEQ ID NO: 14695 - RNA, 20 nt, synthetic construct
  source 1..20: mol_type = other RNA
gaagtaaagcatagtgactt

SEQ ID NO: 14696 - RNA, 20 nt, synthetic construct
  source 1..20: mol_type = other RNA
caaatgggacatgtcagtga

SEQ ID NO: 14697 - RNA, 20 nt, synthetic construct
  source 1..20: mol_type = other RNA
cagttttggttgcttcaaat

SEQ ID NO: 14698 - RNA, 20 nt, synthetic construct
  source 1..20: mol_type = other RNA
acagttttggttgcttcaaa

SEQ ID NO: 14699 - RNA, 20 nt, synthetic construct
  source 1..20: mol_type = other RNA
gtcaggtcgagggacagttt

SEQ ID NO: 14700 - RNA, 20 nt, synthetic construct
  source 1..20: mol_type = other RNA
agggatgagtgtcaggtcga

SEQ ID NO: 14701 - RNA, 20 nt, synthetic construct
  source 1..20: mol_type = other RNA
cagggatgagtgtcaggtcg

SEQ ID NO: 14702 - RNA, 20 nt, synthetic construct
  source 1..20: mol_type = other RNA
gtgtttcagggatgagtgtc

SEQ ID NO: 14703 - RNA, 20 nt, synthetic construct
  source 1..20: mol_type = other RNA
ctcatccctgaaacaccatg

SEQ ID NO: 14704 - RNA, 20 nt, synthetic construct
  source 1..20: mol_type = other RNA
tcatccctgaaacaccatga

SEQ ID NO: 14705 - RNA, 20 nt, synthetic construct
  source 1..20: mol_type = other RNA
aaacaccatgagggtaagtg

SEQ ID NO: 14706 - RNA, 20 nt, synthetic construct
  source 1..20: mol_type = other RNA
acttaccctcatggtgtttc

SEQ ID NO: 14707 - RNA, 20 nt, synthetic construct
  source 1..20: mol_type = other RNA
tgagggtaagtgaggcgctt

SEQ ID NO: 14708 - RNA, 20 nt, synthetic construct
  source 1..20: mol_type = other RNA
aagcgcctcacttaccctca

SEQ ID NO: 14709 - RNA, 20 nt, synthetic construct
  source 1..20: mol_type = other RNA
ggtaagtgaggcgcttcgga

SEQ ID NO: 14710 - RNA, 20 nt, synthetic construct
  source 1..20: mol_type = other RNA
tatctggcaatggggttgag

SEQ ID NO: 14711 - RNA, 20 nt, synthetic construct
  source 1..20: mol_type = other RNA
acttactctatctggcaatg

SEQ ID NO: 14712 - RNA, 20 nt, synthetic construct
  source 1..20: mol_type = other RNA
cacttactctatctggcaat

SEQ ID NO: 14713 - RNA, 20 nt, synthetic construct
  source 1..20: mol_type = other RNA
acacttactctatctggcaa

SEQ ID NO: 14714 - RNA, 20 nt, synthetic construct
  source 1..20: mol_type = other RNA
agatagagtaagtgtctgcc

SEQ ID NO: 14715 - RNA, 20 nt, synthetic construct
  source 1..20: mol_type = other RNA
gatagagtaagtgtctgcca

SEQ ID NO: 14716 - RNA, 20 nt, synthetic construct
  source 1..20: mol_type = other RNA
atagagtaagtgtctgccag

SEQ ID NO: 14717 - RNA, 20 nt, synthetic construct
  source 1..20: mol_type = other RNA
tggcagacacttactctatc

SEQ ID NO: 14718 - RNA, 20 nt, synthetic construct
  source 1..20: mol_type = other RNA
aagtgtctgccaggggcatt

SEQ ID NO: 14719 - RNA, 20 nt, synthetic construct
  source 1..20: mol_type = other RNA
ccaggggcatttggagctga

SEQ ID NO: 14720 - RNA, 20 nt, synthetic construct
  source 1..20: mol_type = other RNA
caggggcatttggagctgaa

SEQ ID NO: 14721 - RNA, 20 nt, synthetic construct
  source 1..20: mol_type = other RNA
ccttcagctccaaatgcccc

SEQ ID NO: 14722 - RNA, 20 nt, synthetic construct
  source 1..20: mol_type = other RNA
gggaagactgtacagactca

SEQ ID NO: 14723 - RNA, 20 nt, synthetic construct
  source 1..20: mol_type = other RNA
tgtacagactcacggtttgc

SEQ ID NO: 14724 - RNA, 20 nt, synthetic construct
  source 1..20: mol_type = other RNA
tcacggtttgcaggcactga

SEQ ID NO: 14725 - RNA, 20 nt, synthetic construct
  source 1..20: mol_type = other RNA
gccttctttttcaccttcag

SEQ ID NO: 14726 - RNA, 20 nt, synthetic construct
  source 1..20: mol_type = other RNA
ctgaaggtgaaaaagaaggc

SEQ ID NO: 14727 - RNA, 20 nt, synthetic construct
  source 1..20: mol_type = other RNA
tccactgaaggtgaaaaaga

SEQ ID NO: 14728 - RNA, 20 nt, synthetic construct
  source 1..20: mol_type = other RNA
gtgctttgcaagtccactga

SEQ ID NO: 14729 - RNA, 20 nt, synthetic construct
  source 1..20: mol_type = other RNA
gccctattgtttttcccatc

SEQ ID NO: 14730 - RNA, 20 nt, synthetic construct
  source 1..20: mol_type = other RNA
ccctattgtttttcccatct

SEQ ID NO: 14731 - RNA, 20 nt, synthetic construct
  source 1..20: mol_type = other RNA
cccagatgggaaaaacaata

SEQ ID NO: 14732 - RNA, 20 nt, synthetic construct
  source 1..20: mol_type = other RNA
tcccagatgggaaaaacaat

SEQ ID NO: 14733 - RNA, 20 nt, synthetic construct
  source 1..20: mol_type = other RNA
tttttcccatctgggaaaca

SEQ ID NO: 14734 - RNA, 20 nt, synthetic construct
  source 1..20: mol_type = other RNA
ctgggaaacatggtgaatgt

SEQ ID NO: 14735 - RNA, 20 nt, synthetic construct
  source 1..20: mol_type = other RNA
cattcaccatgtttcccaga

SEQ ID NO: 14736 - RNA, 20 nt, synthetic construct
  source 1..20: mol_type = other RNA
gaaacatggtgaatgttggt

SEQ ID NO: 14737 - RNA, 20 nt, synthetic construct
  source 1..20: mol_type = other RNA
gttggttgtagctaatccta

SEQ ID NO: 14738 - RNA, 20 nt, synthetic construct
  source 1..20: mol_type = other RNA
ttggttgtagctaatcctat

SEQ ID NO: 14739 - RNA, 20 nt, synthetic construct
  source 1..20: mol_type = other RNA
agctaatcctatgggtcttg

SEQ ID NO: 14740 - RNA, 20 nt, synthetic construct
  source 1..20: mol_type = other RNA
acaaagacctcaagacccat

SEQ ID NO: 14741 - RNA, 20 nt, synthetic construct
  source 1..20: mol_type = other RNA
tgaggtctttgttgacaaga

SEQ ID NO: 14742 - RNA, 20 nt, synthetic construct
  source 1..20: mol_type = other RNA
atgttatctttatctgcgtg

SEQ ID NO: 14743 - RNA, 20 nt, synthetic construct
  source 1..20: mol_type = other RNA
tctactaaaacatgagctac

SEQ ID NO: 14744 - RNA, 20 nt, synthetic construct
  source 1..20: mol_type = other RNA
ctactaaaacatgagctaca

SEQ ID NO: 14745 - RNA, 20 nt, synthetic construct
  source 1..20: mol_type = other RNA
ttttaaagcatttttccata

SEQ ID NO: 14746 - RNA, 20 nt, synthetic construct
  source 1..20: mol_type = other RNA
aatagtaagggtgaacctta

SEQ ID NO: 14747 - RNA, 20 nt, synthetic construct
  source 1..20: mol_type = other RNA
attcagataagcaatagtaa

SEQ ID NO: 14748 - RNA, 20 nt, synthetic construct
  source 1..20: mol_type = other RNA
tattcagataagcaatagta

SEQ ID NO: 14749 - RNA, 20 nt, synthetic construct
  source 1..20: mol_type = other RNA
caatgaataaacttctcagc

SEQ ID NO: 14750 - RNA, 20 nt, synthetic construct
  source 1..20: mol_type = other RNA
attcattgctcaccagttgt

SEQ ID NO: 14751 - RNA, 20 nt, synthetic construct
  source 1..20: mol_type = other RNA
ttcattgctcaccagttgta

SEQ ID NO: 14752 - RNA, 20 nt, synthetic construct
  source 1..20: mol_type = other RNA
ttgtagggagattttgacac

SEQ ID NO: 14753 - RNA, 20 nt, synthetic construct
  source 1..20: mol_type = other RNA
tgtcaaaatctccctacaac

SEQ ID NO: 14754 - RNA, 20 nt, synthetic construct
  source 1..20: mol_type = other RNA
gggagattttgacacaggac

SEQ ID NO: 14755 - RNA, 20 nt, synthetic construct
  source 1..20: mol_type = other RNA
agattttgacacaggactgg

SEQ ID NO: 14756 - RNA, 20 nt, synthetic construct
  source 1..20: mol_type = other RNA
atcgtaacagtgcagaccca

SEQ ID NO: 14757 - RNA, 20 nt, synthetic construct
  source 1..20: mol_type = other RNA
gtgcagacccatggaaagct

SEQ ID NO: 14758 - RNA, 20 nt, synthetic construct
  source 1..20: mol_type = other RNA
actgcttccaagctttccat

SEQ ID NO: 14759 - RNA, 20 nt, synthetic construct
  source 1..20: mol_type = other RNA
aactgcttccaagctttcca

SEQ ID NO: 14760 - RNA, 20 nt, synthetic construct
  source 1..20: mol_type = other RNA
agcttggaagcagttgtgac

SEQ ID NO: 14761 - RNA, 20 nt, synthetic construct
  source 1..20: mol_type = other RNA
agttgtgaccggataagagc

SEQ ID NO: 14762 - RNA, 20 nt, synthetic construct
  source 1..20: mol_type = other RNA
gaccggataagagcaggttg

SEQ ID NO: 14763 - RNA, 20 nt, synthetic construct
  source 1..20: mol_type = other RNA
atcctcaacctgctcttatc

SEQ ID NO: 14764 - RNA, 20 nt, synthetic construct
  source 1..20: mol_type = other RNA
aggttgaggatgataatctt

SEQ ID NO: 14765 - RNA, 20 nt, synthetic construct
  source 1..20: mol_type = other RNA
ggttgaggatgataatctta

SEQ ID NO: 14766 - RNA, 20 nt, synthetic construct
  source 1..20: mol_type = other RNA
ataatcttagggcaatgagc

SEQ ID NO: 14767 - RNA, 20 nt, synthetic construct
  source 1..20: mol_type = other RNA
caatgagcaggttgattgag

SEQ ID NO: 14768 - RNA, 20 nt, synthetic construct
  source 1..20: mol_type = other RNA
aatgagcaggttgattgaga

SEQ ID NO: 14769 - RNA, 20 nt, synthetic construct
  source 1..20: mol_type = other RNA
atgagcaggttgattgagag

SEQ ID NO: 14770 - RNA, 20 nt, synthetic construct
  source 1..20: mol_type = other RNA
gagaggggtgcctgaaagca

SEQ ID NO: 14771 - RNA, 20 nt, synthetic construct
  source 1..20: mol_type = other RNA
atcatggggaccttgctttc

SEQ ID NO: 14772 - RNA, 20 nt, synthetic construct
  source 1..20: mol_type = other RNA
gtttgtttgcttgcatcatg

SEQ ID NO: 14773 - RNA, 20 nt, synthetic construct
  source 1..20: mol_type = other RNA
agtttgtttgcttgcatcat

SEQ ID NO: 14774 - RNA, 20 nt, synthetic construct
  source 1..20: mol_type = other RNA
gagtttgtttgcttgcatca

SEQ ID NO: 14775 - RNA, 20 nt, synthetic construct
  source 1..20: mol_type = other RNA
aaacaaactcacatgccaga

SEQ ID NO: 14776 - RNA, 20 nt, synthetic construct
  source 1..20: mol_type = other RNA
caaactcacatgccagacgg

SEQ ID NO: 14777 - RNA, 20 nt, synthetic construct
  source 1..20: mol_type = other RNA
tcacatgccagacggtggac

SEQ ID NO: 14778 - RNA, 20 nt, synthetic construct
  source 1..20: mol_type = other RNA
agacggtggacaggaaacac

SEQ ID NO: 14779 - RNA, 20 nt, synthetic construct
  source 1..20: mol_type = other RNA
tgtgtttcctgtccaccgtc

SEQ ID NO: 14780 - RNA, 20 nt, synthetic construct
  source 1..20: mol_type = other RNA
ggtggacaggaaacacaggc

SEQ ID NO: 14781 - RNA, 20 nt, synthetic construct
  source 1..20: mol_type = other RNA
caggaaacacaggcaggatg

SEQ ID NO: 14782 - RNA, 20 nt, synthetic construct
  source 1..20: mol_type = other RNA
acacaggcaggatgtggtgc

SEQ ID NO: 14783 - RNA, 20 nt, synthetic construct
  source 1..20: mol_type = other RNA
aggcaggatgtggtgcaggc

SEQ ID NO: 14784 - RNA, 20 nt, synthetic construct
  source 1..20: mol_type = other RNA
ggcaggatgtggtgcaggct

SEQ ID NO: 14785 - RNA, 20 nt, synthetic construct
  source 1..20: mol_type = other RNA
tggtgcaggctgggctgcct

SEQ ID NO: 14786 - RNA, 20 nt, synthetic construct
  source 1..20: mol_type = other RNA
gcaggctgggctgccttggc

SEQ ID NO: 14787 - RNA, 20 nt, synthetic construct
  source 1..20: mol_type = other RNA
caggctgggctgccttggct

SEQ ID NO: 14788 - RNA, 20 nt, synthetic construct
  source 1..20: mol_type = other RNA
gggctgccttggctgggcaa

SEQ ID NO: 14789 - RNA, 20 nt, synthetic construct
  source 1..20: mol_type = other RNA
tgccttggctgggcaaaggc

SEQ ID NO: 14790 - RNA, 20 nt, synthetic construct
  source 1..20: mol_type = other RNA
gccttggctgggcaaaggca

SEQ ID NO: 14791 - RNA, 20 nt, synthetic construct
  source 1..20: mol_type = other RNA
ccttggctgggcaaaggcag

SEQ ID NO: 14792 - RNA, 20 nt, synthetic construct
  source 1..20: mol_type = other RNA
cccctgcctttgcccagcca

SEQ ID NO: 14793 - RNA, 20 nt, synthetic construct
  source 1..20: mol_type = other RNA
gggcaaaggcaggggcttca

SEQ ID NO: 14794 - RNA, 20 nt, synthetic construct
  source 1..20: mol_type = other RNA
caggggcttcatggccatgc

SEQ ID NO: 14795 - RNA, 20 nt, synthetic construct
  source 1..20: mol_type = other RNA
aggggcttcatggccatgct

SEQ ID NO: 14796 - RNA, 20 nt, synthetic construct
  source 1..20: mol_type = other RNA
ggccatgctgggatgtgacg

SEQ ID NO: 14797 - RNA, 20 nt, synthetic construct
  source 1..20: mol_type = other RNA
atgctgggatgtgacgtggt

SEQ ID NO: 14798 - RNA, 20 nt, synthetic construct
  source 1..20: mol_type = other RNA
aaccacgtcacatcccagca

SEQ ID NO: 14799 - RNA, 20 nt, synthetic construct
  source 1..20: mol_type = other RNA
tggttggaaaacaataagaa

SEQ ID NO: 14800 - RNA, 20 nt, synthetic construct
  source 1..20: mol_type = other RNA
tatgtctgaggtctttggag

SEQ ID NO: 14801 - RNA, 20 nt, synthetic construct
  source 1..20: mol_type = other RNA
caaagacctcagacataatt

SEQ ID NO: 14802 - RNA, 20 nt, synthetic construct
  source 1..20: mol_type = other RNA
caaattatgtctgaggtctt

SEQ ID NO: 14803 - RNA, 20 nt, synthetic construct
  source 1..20: mol_type = other RNA
agacataatttggccatgag

SEQ ID NO: 14804 - RNA, 20 nt, synthetic construct
  source 1..20: mol_type = other RNA
tcatggccaaattatgtctg

SEQ ID NO: 14805 - RNA, 20 nt, synthetic construct
  source 1..20: mol_type = other RNA
taatttggccatgagaggca

SEQ ID NO: 14806 - RNA, 20 nt, synthetic construct
  source 1..20: mol_type = other RNA
aatttggccatgagaggcaa

SEQ ID NO: 14807 - RNA, 20 nt, synthetic construct
  source 1..20: mol_type = other RNA
gccatgagaggcaagggtag

SEQ ID NO: 14808 - RNA, 20 nt, synthetic construct
  source 1..20: mol_type = other RNA
gcctctacccttgcctctca

SEQ ID NO: 14809 - RNA, 20 nt, synthetic construct
  source 1..20: mol_type = other RNA
gggtagaggcgagccccctg

SEQ ID NO: 14810 - RNA, 20 nt, synthetic construct
  source 1..20: mol_type = other RNA
ggtagaggcgagccccctgt

SEQ ID NO: 14811 - RNA, 20 nt, synthetic construct
  source 1..20: mol_type = other RNA
gaggcgagccccctgtgggt

SEQ ID NO: 14812 - RNA, 20 nt, synthetic construct
  source 1..20: mol_type = other RNA
cccctgtgggttggaatgta

SEQ ID NO: 14813 - RNA, 20 nt, synthetic construct
  source 1..20: mol_type = other RNA
catacattccaacccacagg

SEQ ID NO: 14814 - RNA, 20 nt, synthetic construct
  source 1..20: mol_type = other RNA
ccatacattccaacccacag

SEQ ID NO: 14815 - RNA, 20 nt, synthetic construct
  source 1..20: mol_type = other RNA
tccatacattccaacccaca

SEQ ID NO: 14816 - RNA, 20 nt, synthetic construct
  source 1..20: mol_type = other RNA
ttccatacattccaacccac

SEQ ID NO: 14817 - RNA, 20 nt, synthetic construct
  source 1..20: mol_type = other RNA
tgaagcaccatcaacatgca

SEQ ID NO: 14818 - RNA, 20 nt, synthetic construct
  source 1..20: mol_type = other RNA
gaagcaccatcaacatgcat

SEQ ID NO: 14819 - RNA, 20 nt, synthetic construct
  source 1..20: mol_type = other RNA
tcaacatgcatgggctacat

SEQ ID NO: 14820 - RNA, 20 nt, synthetic construct
  source 1..20: mol_type = other RNA
atgtagcccatgcatgttga

SEQ ID NO: 14821 - RNA, 20 nt, synthetic construct
  source 1..20: mol_type = other RNA
catgggctacataggagagc

SEQ ID NO: 14822 - RNA, 20 nt, synthetic construct
  source 1..20: mol_type = other RNA
atgggctacataggagagct

SEQ ID NO: 14823 - RNA, 20 nt, synthetic construct
  source 1..20: mol_type = other RNA
ctacataggagagctgggtc

SEQ ID NO: 14824 - RNA, 20 nt, synthetic construct
  source 1..20: mol_type = other RNA
tacataggagagctgggtct

SEQ ID NO: 14825 - RNA, 20 nt, synthetic construct
  source 1..20: mol_type = other RNA
acataggagagctgggtctg

SEQ ID NO: 14826 - RNA, 20 nt, synthetic construct
  source 1..20: mol_type = other RNA
cataggagagctgggtctgg

SEQ ID NO: 14827 - RNA, 20 nt, synthetic construct
  source 1..20: mol_type = other RNA
gctgggtctgggggaaaaga

SEQ ID NO: 14828 - RNA, 20 nt, synthetic construct
  source 1..20: mol_type = other RNA
ctgggtctgggggaaaagat

SEQ ID NO: 14829 - RNA, 20 nt, synthetic construct
  source 1..20: mol_type = other RNA
ctgggggaaaagatgggatt

SEQ ID NO: 14830 - RNA, 20 nt, synthetic construct
  source 1..20: mol_type = other RNA
tgggggaaaagatgggattt

SEQ ID NO: 14831 - RNA, 20 nt, synthetic construct
  source 1..20: mol_type = other RNA
gaaaagatgggatttgggtt

SEQ ID NO: 14832 - RNA, 20 nt, synthetic construct
  source 1..20: mol_type = other RNA
aaaagatgggatttgggttt

SEQ ID NO: 14833 - RNA, 20 nt, synthetic construct
  source 1..20: mol_type = other RNA
ggtttgggtgtgcatgttcc

SEQ ID NO: 14834 - RNA, 20 nt, synthetic construct
  source 1..20: mol_type = other RNA
gggtgtgcatgttccaggca

SEQ ID NO: 14835 - RNA, 20 nt, synthetic construct
  source 1..20: mol_type = other RNA
tgtgcatgttccaggcatgg

SEQ ID NO: 14836 - RNA, 20 nt, synthetic construct
  source 1..20: mol_type = other RNA
gtgcatgttccaggcatgga

SEQ ID NO: 14837 - RNA, 20 nt, synthetic construct
  source 1..20: mol_type = other RNA
tccaggcatggagggaagaa

SEQ ID NO: 14838 - RNA, 20 nt, synthetic construct
  source 1..20: mol_type = other RNA
ccaggcatggagggaagaat

SEQ ID NO: 14839 - RNA, 20 nt, synthetic construct
  source 1..20: mol_type = other RNA
cccattcttccctccatgcc

SEQ ID NO: 14840 - RNA, 20 nt, synthetic construct
  source 1..20: mol_type = other RNA
gaagaatgggcagaatgacg

SEQ ID NO: 14841 - RNA, 20 nt, synthetic construct
  source 1..20: mol_type = other RNA
gaatgacgaggatcaagccc

SEQ ID NO: 14842 - RNA, 20 nt, synthetic construct
  source 1..20: mol_type = other RNA
tgacgaggatcaagccctgg

SEQ ID NO: 14843 - RNA, 20 nt, synthetic construct
  source 1..20: mol_type = other RNA
cctggtggagcccccagacc

SEQ ID NO: 14844 - RNA, 20 nt, synthetic construct
  source 1..20: mol_type = other RNA
ctggtggagcccccagacca

SEQ ID NO: 14845 - RNA, 20 nt, synthetic construct
  source 1..20: mol_type = other RNA
ctggtctgggggctccacca

SEQ ID NO: 14846 - RNA, 20 nt, synthetic construct
  source 1..20: mol_type = other RNA
cctggtctgggggctccacc

SEQ ID NO: 14847 - RNA, 20 nt, synthetic construct
  source 1..20: mol_type = other RNA
gagcccccagaccagggccc

SEQ ID NO: 14848 - RNA, 20 nt, synthetic construct
  source 1..20: mol_type = other RNA
agcccccagaccagggccct

SEQ ID NO: 14849 - RNA, 20 nt, synthetic construct
  source 1..20: mol_type = other RNA
tgcccagggccctggtctgg

SEQ ID NO: 14850 - RNA, 20 nt, synthetic construct
  source 1..20: mol_type = other RNA
atgcccagggccctggtctg

SEQ ID NO: 14851 - RNA, 20 nt, synthetic construct
  source 1..20: mol_type = other RNA
tatgcccagggccctggtct

SEQ ID NO: 14852 - RNA, 20 nt, synthetic construct
  source 1..20: mol_type = other RNA
atatgcccagggccctggtc

SEQ ID NO: 14853 - RNA, 20 nt, synthetic construct
  source 1..20: mol_type = other RNA
tggaaatatgcccagggccc

SEQ ID NO: 14854 - RNA, 20 nt, synthetic construct
  source 1..20: mol_type = other RNA
ggcaagtggaaatatgccca

SEQ ID NO: 14855 - RNA, 20 nt, synthetic construct
  source 1..20: mol_type = other RNA
aggcaagtggaaatatgccc

SEQ ID NO: 14856 - RNA, 20 nt, synthetic construct
  source 1..20: mol_type = other RNA
agtttgcagaagaaggcaag

SEQ ID NO: 14857 - RNA, 20 nt, synthetic construct
  source 1..20: mol_type = other RNA
acacaaaagtttgcagaaga

SEQ ID NO: 14858 - RNA, 20 nt, synthetic construct
  source 1..20: mol_type = other RNA
gcaaacttttgtgtgcctgt

SEQ ID NO: 14859 - RNA, 20 nt, synthetic construct
  source 1..20: mol_type = other RNA
caaacttttgtgtgcctgtt

SEQ ID NO: 14860 - RNA, 20 nt, synthetic construct
  source 1..20: mol_type = other RNA
acttttgtgtgcctgttggg

SEQ ID NO: 14861 - RNA, 20 nt, synthetic construct
  source 1..20: mol_type = other RNA
ttgtgtgcctgttgggtgga

SEQ ID NO: 14862 - RNA, 20 nt, synthetic construct
  source 1..20: mol_type = other RNA
ttgggtggaaggtactatgc

SEQ ID NO: 14863 - RNA, 20 nt, synthetic construct
  source 1..20: mol_type = other RNA
tgggtggaaggtactatgct

SEQ ID NO: 14864 - RNA, 20 nt, synthetic construct
  source 1..20: mol_type = other RNA
gggtggaaggtactatgctg

SEQ ID NO: 14865 - RNA, 20 nt, synthetic construct
  source 1..20: mol_type = other RNA
gtactatgctggggccatcc

SEQ ID NO: 14866 - RNA, 20 nt, synthetic construct
  source 1..20: mol_type = other RNA
tgctggggccatccaggatc

SEQ ID NO: 14867 - RNA, 20 nt, synthetic construct
  source 1..20: mol_type = other RNA
acactgctccggatcctgga

SEQ ID NO: 14868 - RNA, 20 nt, synthetic construct
  source 1..20: mol_type = other RNA
tcttacactgctccggatcc

SEQ ID NO: 14869 - RNA, 20 nt, synthetic construct
  source 1..20: mol_type = other RNA
cggagcagtgtaagacatca

SEQ ID NO: 14870 - RNA, 20 nt, synthetic construct
  source 1..20: mol_type = other RNA
catgatgtcttacactgctc

SEQ ID NO: 14871 - RNA, 20 nt, synthetic construct
  source 1..20: mol_type = other RNA
gtaagacatcatggcctgca

SEQ ID NO: 14872 - RNA, 20 nt, synthetic construct
  source 1..20: mol_type = other RNA
tgtcaagggtcacaccatgc

SEQ ID NO: 14873 - RNA, 20 nt, synthetic construct
  source 1..20: mol_type = other RNA
gacatctgaaaagaacgagc

SEQ ID NO: 14874 - RNA, 20 nt, synthetic construct
  source 1..20: mol_type = other RNA
ctcgttcttttcagatgtca

SEQ ID NO: 14875 - RNA, 20 nt, synthetic construct
  source 1..20: mol_type = other RNA
atctgaaaagaacgagctgg

SEQ ID NO: 14876 - RNA, 20 nt, synthetic construct
  source 1..20: mol_type = other RNA
aaaagaacgagctggtggag

SEQ ID NO: 14877 - RNA, 20 nt, synthetic construct
  source 1..20: mol_type = other RNA
aaagaacgagctggtggagt

SEQ ID NO: 14878 - RNA, 20 nt, synthetic construct
  source 1..20: mol_type = other RNA
aacgagctggtggagtggga

SEQ ID NO: 14879 - RNA, 20 nt, synthetic construct
  source 1..20: mol_type = other RNA
tggagtgggaaggagacaag

SEQ ID NO: 14880 - RNA, 20 nt, synthetic construct
  source 1..20: mol_type = other RNA
gcagcagagttgacatcatc

SEQ ID NO: 14881 - RNA, 20 nt, synthetic construct
  source 1..20: mol_type = other RNA
acatcatcaggactgactgc

SEQ ID NO: 14882 - RNA, 20 nt, synthetic construct
  source 1..20: mol_type = other RNA
atcaggactgactgcaggac

SEQ ID NO: 14883 - RNA, 20 nt, synthetic construct
  source 1..20: mol_type = other RNA
aggactgactgcaggacagg

SEQ ID NO: 14884 - RNA, 20 nt, synthetic construct
  source 1..20: mol_type = other RNA
ggcggtgaaacgagccactg

SEQ ID NO: 14885 - RNA, 20 nt, synthetic construct
  source 1..20: mol_type = other RNA
tgaggagttacccagtgccc

SEQ ID NO: 14886 - RNA, 20 nt, synthetic construct
  source 1..20: mol_type = other RNA
gaggagttacccagtgccct

SEQ ID NO: 14887 - RNA, 20 nt, synthetic construct
  source 1..20: mol_type = other RNA
aggagttacccagtgccctg

SEQ ID NO: 14888 - RNA, 20 nt, synthetic construct
  source 1..20: mol_type = other RNA
tctaagctccccagggcact

SEQ ID NO: 14889 - RNA, 20 nt, synthetic construct
  source 1..20: mol_type = other RNA
atctaagctccccagggcac

SEQ ID NO: 14890 - RNA, 20 nt, synthetic construct
  source 1..20: mol_type = other RNA
tctcacatctaagctcccca

SEQ ID NO: 14891 - RNA, 20 nt, synthetic construct
  source 1..20: mol_type = other RNA
gtctcacatctaagctcccc

SEQ ID NO: 14892 - RNA, 20 nt, synthetic construct
  source 1..20: mol_type = other RNA
cagagctggggagtgctggg

SEQ ID NO: 14893 - RNA, 20 nt, synthetic construct
  source 1..20: mol_type = other RNA
acacagagctggggagtgct

SEQ ID NO: 14894 - RNA, 20 nt, synthetic construct
  source 1..20: mol_type = other RNA
actccccagctctgtgtccc

SEQ ID NO: 14895 - RNA, 20 nt, synthetic construct
  source 1..20: mol_type = other RNA
ctccccagctctgtgtccct

SEQ ID NO: 14896 - RNA, 20 nt, synthetic construct
  source 1..20: mol_type = other RNA
gacccagggacacagagctg

SEQ ID NO: 14897 - RNA, 20 nt, synthetic construct
  source 1..20: mol_type = other RNA
ggacccagggacacagagct

SEQ ID NO: 14898 - RNA, 20 nt, synthetic construct
  source 1..20: mol_type = other RNA
gggacccagggacacagagc

SEQ ID NO: 14899 - RNA, 20 nt, synthetic construct
  source 1..20: mol_type = other RNA
atcaagttcagtgggaccca

SEQ ID NO: 14900 - RNA, 20 nt, synthetic construct
  source 1..20: mol_type = other RNA
aatcaagttcagtgggaccc

SEQ ID NO: 14901 - RNA, 20 nt, synthetic construct
  source 1..20: mol_type = other RNA
aaaatacaatcaagttcagt

SEQ ID NO: 14902 - RNA, 20 nt, synthetic construct
  source 1..20: mol_type = other RNA
taaaatacaatcaagttcag

SEQ ID NO: 14903 - RNA, 20 nt, synthetic construct
  source 1..20: mol_type = other RNA
agttgcctcttttctaagac

SEQ ID NO: 14904 - RNA, 20 nt, synthetic construct
  source 1..20: mol_type = other RNA
ttgctccggtcttagaaaag

SEQ ID NO: 14905 - RNA, 20 nt, synthetic construct
  source 1..20: mol_type = other RNA
caaggaaggtattgttgctc

SEQ ID NO: 14906 - RNA, 20 nt, synthetic construct
  source 1..20: mol_type = other RNA
tgcacatgcacactcaagga

SEQ ID NO: 14907 - RNA, 20 nt, synthetic construct
  source 1..20: mol_type = other RNA
ggactgcacatgcacactca

SEQ ID NO: 14908 - RNA, 20 nt, synthetic construct
  source 1..20: mol_type = other RNA
gtgcatgtgcagtccataga

SEQ ID NO: 14909 - RNA, 20 nt, synthetic construct
  source 1..20: mol_type = other RNA
agaacactggctgccatcta

SEQ ID NO: 14910 - RNA, 20 nt, synthetic construct
  source 1..20: mol_type = other RNA
ttctcatgggaagagaacac

SEQ ID NO: 14911 - RNA, 20 nt, synthetic construct
  source 1..20: mol_type = other RNA
gaggctcagagtcttctcat

SEQ ID NO: 14912 - RNA, 20 nt, synthetic construct
  source 1..20: mol_type = other RNA
ggaggctcagagtcttctca

SEQ ID NO: 14913 - RNA, 20 nt, synthetic construct
  source 1..20: mol_type = other RNA
actctgagcctcctcactag

SEQ ID NO: 14914 - RNA, 20 nt, synthetic construct
  source 1..20: mol_type = other RNA
ctctgagcctcctcactaga

SEQ ID NO: 14915 - RNA, 20 nt, synthetic construct
  source 1..20: mol_type = other RNA
tgagcctcctcactagaggg

SEQ ID NO: 14916 - RNA, 20 nt, synthetic construct
  source 1..20: mol_type = other RNA
tagaccaccctctagtgagg

SEQ ID NO: 14917 - RNA, 20 nt, synthetic construct
  source 1..20: mol_type = other RNA
ttttagaccaccctctagtg

SEQ ID NO: 14918 - RNA, 20 nt, synthetic construct
  source 1..20: mol_type = other RNA
gagggtggtctaaaaacaaa

SEQ ID NO: 14919 - RNA, 20 nt, synthetic construct
  source 1..20: mol_type = other RNA
caaatggatccatccacaga

SEQ ID NO: 14920 - RNA, 20 nt, synthetic construct
  source 1..20: mol_type = other RNA
ccatccacagaaggtctgaa

SEQ ID NO: 14921 - RNA, 20 nt, synthetic construct
  source 1..20: mol_type = other RNA
cctttcagaccttctgtgga

SEQ ID NO: 14922 - RNA, 20 nt, synthetic construct
  source 1..20: mol_type = other RNA
aaaacctttcagaccttctg

SEQ ID NO: 14923 - RNA, 20 nt, synthetic construct
  source 1..20: mol_type = other RNA
gttttcatagaatcttgact

SEQ ID NO: 14924 - RNA, 20 nt, synthetic construct
  source 1..20: mol_type = other RNA
tcttgacttggtagcacttc

SEQ ID NO: 14925 - RNA, 20 nt, synthetic construct
  source 1..20: mol_type = other RNA
actcgtgctttccagaagtg

SEQ ID NO: 14926 - RNA, 20 nt, synthetic construct
  source 1..20: mol_type = other RNA
ctttccagaagtgtggcctg

SEQ ID NO: 14927 - RNA, 20 nt, synthetic construct
  source 1..20: mol_type = other RNA
aacaccacaggccacacttc

SEQ ID NO: 14928 - RNA, 20 nt, synthetic construct
  source 1..20: mol_type = other RNA
gtggcctgtggtgttctgtc

SEQ ID NO: 14929 - RNA, 20 nt, synthetic construct
  source 1..20: mol_type = other RNA
ggtgttctgtctggagtatt

SEQ ID NO: 14930 - RNA, 20 nt, synthetic construct
  source 1..20: mol_type = other RNA
gcaaggtggaggtggatggg

SEQ ID NO: 14931 - RNA, 20 nt, synthetic construct
  source 1..20: mol_type = other RNA
acagcaaggtggaggtggat

SEQ ID NO: 14932 - RNA, 20 nt, synthetic construct
  source 1..20: mol_type = other RNA
gacagcaaggtggaggtgga

SEQ ID NO: 14933 - RNA, 20 nt, synthetic construct
  source 1..20: mol_type = other RNA
acaggacagcaaggtggagg

SEQ ID NO: 14934 - RNA, 20 nt, synthetic construct
  source 1..20: mol_type = other RNA
aggacaggacagcaaggtgg

SEQ ID NO: 14935 - RNA, 20 nt, synthetic construct
  source 1..20: mol_type = other RNA
cacaggacaggacagcaagg

SEQ ID NO: 14936 - RNA, 20 nt, synthetic construct
  source 1..20: mol_type = other RNA
agtcacaggacaggacagca

SEQ ID NO: 14937 - RNA, 20 nt, synthetic construct
  source 1..20: mol_type = other RNA
gctagtgagagtcacaggac

SEQ ID NO: 14938 - RNA, 20 nt, synthetic construct
  source 1..20: mol_type = other RNA
actgagctagtgagagtcac

SEQ ID NO: 14939 - RNA, 20 nt, synthetic construct
  source 1..20: mol_type = other RNA
actctcactagctcagtcac

SEQ ID NO: 14940 - RNA, 20 nt, synthetic construct
  source 1..20: mol_type = other RNA
ctctcactagctcagtcacc

SEQ ID NO: 14941 - RNA, 20 nt, synthetic construct
  source 1..20: mol_type = other RNA
actagctcagtcaccgggtc

SEQ ID NO: 14942 - RNA, 20 nt, synthetic construct
  source 1..20: mol_type = other RNA
catggcagggcttcctgacc

SEQ ID NO: 14943 - RNA, 20 nt, synthetic construct
  source 1..20: mol_type = other RNA
ctgccatgaaatgctagatt

SEQ ID NO: 14944 - RNA, 20 nt, synthetic construct
  source 1..20: mol_type = other RNA
ccatgaaatgctagatttgg

SEQ ID NO: 14945 - RNA, 20 nt, synthetic construct
  source 1..20: mol_type = other RNA
caaatctagcatttcatggc

SEQ ID NO: 14946 - RNA, 20 nt, synthetic construct
  source 1..20: mol_type = other RNA
cctccaaatctagcatttca

SEQ ID NO: 14947 - RNA, 20 nt, synthetic construct
  source 1..20: mol_type = other RNA
tagatttggaggcattgcca

SEQ ID NO: 14948 - RNA, 20 nt, synthetic construct
  source 1..20: mol_type = other RNA
gagtatggtttgtggtacct

SEQ ID NO: 14949 - RNA, 20 nt, synthetic construct
  source 1..20: mol_type = other RNA
ccacaaaccatactcaaaca

SEQ ID NO: 14950 - RNA, 20 nt, synthetic construct
  source 1..20: mol_type = other RNA
ccttgtttgagtatggtttg

SEQ ID NO: 14951 - RNA, 20 nt, synthetic construct
  source 1..20: mol_type = other RNA
attatgaccttgtttgagta

SEQ ID NO: 14952 - RNA, 20 nt, synthetic construct
  source 1..20: mol_type = other RNA
atagactagtgatctcactg

SEQ ID NO: 14953 - RNA, 20 nt, synthetic construct
  source 1..20: mol_type = other RNA
gtgatctcactgtggctaac

SEQ ID NO: 14954 - RNA, 20 nt, synthetic construct
  source 1..20: mol_type = other RNA
acacattcagatttgtattt

SEQ ID NO: 14955 - RNA, 20 nt, synthetic construct
  source 1..20: mol_type = other RNA
ttctgggaaaatctgtctaa

SEQ ID NO: 14956 - RNA, 20 nt, synthetic construct
  source 1..20: mol_type = other RNA
gagaacactgacaattttct

SEQ ID NO: 14957 - RNA, 20 nt, synthetic construct
  source 1..20: mol_type = other RNA
cgagaacactgacaattttc

SEQ ID NO: 14958 - RNA, 20 nt, synthetic construct
  source 1..20: mol_type = other RNA
agattttcaaaactagaggg

SEQ ID NO: 14959 - RNA, 20 nt, synthetic construct
  source 1..20: mol_type = other RNA
tagttttgaaaatctcaagt

SEQ ID NO: 14960 - RNA, 20 nt, synthetic construct
  source 1..20: mol_type = other RNA
cttgagattttcaaaactag

SEQ ID NO: 14961 - RNA, 20 nt, synthetic construct
  source 1..20: mol_type = other RNA
gcctctccccagagtgacaa

SEQ ID NO: 14962 - RNA, 20 nt, synthetic construct
  source 1..20: mol_type = other RNA
gccgttgtcactctggggag

SEQ ID NO: 14963 - RNA, 20 nt, synthetic construct
  source 1..20: mol_type = other RNA
cttgtgccgttgtcactctg

SEQ ID NO: 14964 - RNA, 20 nt, synthetic construct
  source 1..20: mol_type = other RNA
tcttgtgccgttgtcactct

SEQ ID NO: 14965 - RNA, 20 nt, synthetic construct
  source 1..20: mol_type = other RNA
ttcttgtgccgttgtcactc

SEQ ID NO: 14966 - RNA, 20 nt, synthetic construct
  source 1..20: mol_type = other RNA
taaatgcaaactgaaaagtg

SEQ ID NO: 14967 - RNA, 20 nt, synthetic construct
  source 1..20: mol_type = other RNA
aaactgaaaagtgtggtttg

SEQ ID NO: 14968 - RNA, 20 nt, synthetic construct
  source 1..20: mol_type = other RNA
aactgaaaagtgtggtttgt

SEQ ID NO: 14969 - RNA, 20 nt, synthetic construct
  source 1..20: mol_type = other RNA
tcccataatgttcatcaatt

SEQ ID NO: 14970 - RNA, 20 nt, synthetic construct
  source 1..20: mol_type = other RNA
gccaaattgatgaacattat

SEQ ID NO: 14971 - RNA, 20 nt, synthetic construct
  source 1..20: mol_type = other RNA
tgccaaattgatgaacatta

SEQ ID NO: 14972 - RNA, 20 nt, synthetic construct
  source 1..20: mol_type = other RNA
atcaatttggcaattcaaat

SEQ ID NO: 14973 - RNA, 20 nt, synthetic construct
  source 1..20: mol_type = other RNA
caaataggattcagaatcca

SEQ ID NO: 14974 - RNA, 20 nt, synthetic construct
  source 1..20: mol_type = other RNA
ataaaatgctgcgaacacct

SEQ ID NO: 14975 - RNA, 20 nt, synthetic construct
  source 1..20: mol_type = other RNA
tgaaaatgtgcctgagagtt

SEQ ID NO: 14976 - RNA, 20 nt, synthetic construct
  source 1..20: mol_type = other RNA
gaaaatgtgcctgagagttt

SEQ ID NO: 14977 - RNA, 20 nt, synthetic construct
  source 1..20: mol_type = other RNA
aaaatgtgcctgagagtttg

SEQ ID NO: 14978 - RNA, 20 nt, synthetic construct
  source 1..20: mol_type = other RNA
tttctattccccaaactctc

SEQ ID NO: 14979 - RNA, 20 nt, synthetic construct
  source 1..20: mol_type = other RNA
aagagcaaatttaacttatt

SEQ ID NO: 14980 - RNA, 20 nt, synthetic construct
  source 1..20: mol_type = other RNA
taaaaggatgcagataaaac

SEQ ID NO: 14981 - RNA, 20 nt, synthetic construct
  source 1..20: mol_type = other RNA
tgcatccttttattaaacag

SEQ ID NO: 14982 - RNA, 20 nt, synthetic construct
  source 1..20: mol_type = other RNA
tcaggccactgtttaataaa

SEQ ID NO: 14983 - RNA, 20 nt, synthetic construct
  source 1..20: mol_type = other RNA
cagtggcctgaatttactaa

SEQ ID NO: 14984 - RNA, 20 nt, synthetic construct
  source 1..20: mol_type = other RNA
ctctgtcctttagtaaattc

SEQ ID NO: 14985 - RNA, 20 nt, synthetic construct
  source 1..20: mol_type = other RNA
tttactaaaggacagagaac

SEQ ID NO: 14986 - RNA, 20 nt, synthetic construct
  source 1..20: mol_type = other RNA
ttactaaaggacagagaaca

SEQ ID NO: 14987 - RNA, 20 nt, synthetic construct
  source 1..20: mol_type = other RNA
ggacagagaacagggttgag

SEQ ID NO: 14988 - RNA, 20 nt, synthetic construct
  source 1..20: mol_type = other RNA
tcataagaagcagtcactgt

SEQ ID NO: 14989 - RNA, 20 nt, synthetic construct
  source 1..20: mol_type = other RNA
gtcataagaagcagtcactg

SEQ ID NO: 14990 - RNA, 20 nt, synthetic construct
  source 1..20: mol_type = other RNA
tgcttcttatgacaagcaag

SEQ ID NO: 14991 - RNA, 20 nt, synthetic construct
  source 1..20: mol_type = other RNA
gcttcttatgacaagcaaga

SEQ ID NO: 14992 - RNA, 20 nt, synthetic construct
  source 1..20: mol_type = other RNA
aagcaagagggtcaacttag

SEQ ID NO: 14993 - RNA, 20 nt, synthetic construct
  source 1..20: mol_type = other RNA
aagagggtcaacttagaggc

SEQ ID NO: 14994 - RNA, 20 nt, synthetic construct
  source 1..20: mol_type = other RNA
ttagaggcaggactgtcttc

SEQ ID NO: 14995 - RNA, 20 nt, synthetic construct
  source 1..20: mol_type = other RNA
tagaggcaggactgtcttca

SEQ ID NO: 14996 - RNA, 20 nt, synthetic construct
  source 1..20: mol_type = other RNA
agaggcaggactgtcttcag

SEQ ID NO: 14997 - RNA, 20 nt, synthetic construct
  source 1..20: mol_type = other RNA
actctcttggagaggtttgt

SEQ ID NO: 14998 - RNA, 20 nt, synthetic construct
  source 1..20: mol_type = other RNA
ccaagagagtgagaaaaagc

SEQ ID NO: 14999 - RNA, 20 nt, synthetic construct
  source 1..20: mol_type = other RNA
cctgctttttctcactctct

SEQ ID NO: 15000 - RNA, 20 nt, synthetic construct
  source 1..20: mol_type = other RNA
gtgagaaaaagcaggttgta

SEQ ID NO: 15001 - RNA, 20 nt, synthetic construct
  source 1..20: mol_type = other RNA
gcagcttgccagaagcaatg

SEQ ID NO: 15002 - RNA, 20 nt, synthetic construct
  source 1..20: mol_type = other RNA
cagcttgccagaagcaatgt

SEQ ID NO: 15003 - RNA, 20 nt, synthetic construct
  source 1..20: mol_type = other RNA
caatattcccacattgcttc

SEQ ID NO: 15004 - RNA, 20 nt, synthetic construct
  source 1..20: mol_type = other RNA
attgtcagactgcacagacc

SEQ ID NO: 15005 - RNA, 20 nt, synthetic construct
  source 1..20: mol_type = other RNA
ttgtcagactgcacagacct

SEQ ID NO: 15006 - RNA, 20 nt, synthetic construct
  source 1..20: mol_type = other RNA
tgtcagactgcacagacctg

SEQ ID NO: 15007 - RNA, 20 nt, synthetic construct
  source 1..20: mol_type = other RNA
tgcacagacctggggccagc

SEQ ID NO: 15008 - RNA, 20 nt, synthetic construct
  source 1..20: mol_type = other RNA
tctaggagccagctggcccc

SEQ ID NO: 15009 - RNA, 20 nt, synthetic construct
  source 1..20: mol_type = other RNA
cagctggctcctagagtgcg

SEQ ID NO: 15010 - RNA, 20 nt, synthetic construct
  source 1..20: mol_type = other RNA
ctcgcactctaggagccagc

SEQ ID NO: 15011 - RNA, 20 nt, synthetic construct
  source 1..20: mol_type = other RNA
ctgagagctcctcgcactct

SEQ ID NO: 15012 - RNA, 20 nt, synthetic construct
  source 1..20: mol_type = other RNA
actgaacaaagtcacagagc

SEQ ID NO: 15013 - RNA, 20 nt, synthetic construct
  source 1..20: mol_type = other RNA
actttgttcagtccctaccc

SEQ ID NO: 15014 - RNA, 20 nt, synthetic construct
  source 1..20: mol_type = other RNA
cagtccctaccctggatgtg

SEQ ID NO: 15015 - RNA, 20 nt, synthetic construct
  source 1..20: mol_type = other RNA
ctaccctggatgtgtggtga

SEQ ID NO: 15016 - RNA, 20 nt, synthetic construct
  source 1..20: mol_type = other RNA
taccctggatgtgtggtgaa

SEQ ID NO: 15017 - RNA, 20 nt, synthetic construct
  source 1..20: mol_type = other RNA
ttcaccacacatccagggta

SEQ ID NO: 15018 - RNA, 20 nt, synthetic construct
  source 1..20: mol_type = other RNA
cttcaccacacatccagggt

SEQ ID NO: 15019 - RNA, 20 nt, synthetic construct
  source 1..20: mol_type = other RNA
gatgtgtggtgaagggtgcc

SEQ ID NO: 15020 - RNA, 20 nt, synthetic construct
  source 1..20: mol_type = other RNA
gcacccttcaccacacatcc

SEQ ID NO: 15021 - RNA, 20 nt, synthetic construct
  source 1..20: mol_type = other RNA
agggtgccaggcttagctgc

SEQ ID NO: 15022 - RNA, 20 nt, synthetic construct
  source 1..20: mol_type = other RNA
gcttagctgctggaccagtg

SEQ ID NO: 15023 - RNA, 20 nt, synthetic construct
  source 1..20: mol_type = other RNA
actggtccagcagctaagcc

SEQ ID NO: 15024 - RNA, 20 nt, synthetic construct
  source 1..20: mol_type = other RNA
ctggaccagtgaggtccctg

SEQ ID NO: 15025 - RNA, 20 nt, synthetic construct
  source 1..20: mol_type = other RNA
tggaccagtgaggtccctga

SEQ ID NO: 15026 - RNA, 20 nt, synthetic construct
  source 1..20: mol_type = other RNA
ggaccagtgaggtccctgag

SEQ ID NO: 15027 - RNA, 20 nt, synthetic construct
  source 1..20: mol_type = other RNA
gaccagtgaggtccctgagg

SEQ ID NO: 15028 - RNA, 20 nt, synthetic construct
  source 1..20: mol_type = other RNA
agtgaggtccctgagggggc

SEQ ID NO: 15029 - RNA, 20 nt, synthetic construct
  source 1..20: mol_type = other RNA
gtgaggtccctgagggggca

SEQ ID NO: 15030 - RNA, 20 nt, synthetic construct
  source 1..20: mol_type = other RNA
tgccccctcagggacctcac

SEQ ID NO: 15031 - RNA, 20 nt, synthetic construct
  source 1..20: mol_type = other RNA
cctgagggggcagggctaag

SEQ ID NO: 15032 - RNA, 20 nt, synthetic construct
  source 1..20: mol_type = other RNA
ctcttagccctgccccctca

SEQ ID NO: 15033 - RNA, 20 nt, synthetic construct
  source 1..20: mol_type = other RNA
cctcttagccctgccccctc

SEQ ID NO: 15034 - RNA, 20 nt, synthetic construct
  source 1..20: mol_type = other RNA
ttgaccagtcattgattcac

SEQ ID NO: 15035 - RNA, 20 nt, synthetic construct
  source 1..20: mol_type = other RNA
ccagtcattgattcactggt

SEQ ID NO: 15036 - RNA, 20 nt, synthetic construct
  source 1..20: mol_type = other RNA
cagtcattgattcactggtt

SEQ ID NO: 15037 - RNA, 20 nt, synthetic construct
  source 1..20: mol_type = other RNA
ccaaccagtgaatcaatgac

SEQ ID NO: 15038 - RNA, 20 nt, synthetic construct
  source 1..20: mol_type = other RNA
ggttgggaatttgttcattg

SEQ ID NO: 15039 - RNA, 20 nt, synthetic construct
  source 1..20: mol_type = other RNA
gttgggaatttgttcattga

SEQ ID NO: 15040 - RNA, 20 nt, synthetic construct
  source 1..20: mol_type = other RNA
ttgggaatttgttcattgag

SEQ ID NO: 15041 - RNA, 20 nt, synthetic construct
  source 1..20: mol_type = other RNA
actccccatgcctcacgtgc

SEQ ID NO: 15042 - RNA, 20 nt, synthetic construct
  source 1..20: mol_type = other RNA
tcacctgcacgtgaggcatg

SEQ ID NO: 15043 - RNA, 20 nt, synthetic construct
  source 1..20: mol_type = other RNA
ctcacctgcacgtgaggcat

SEQ ID NO: 15044 - RNA, 20 nt, synthetic construct
  source 1..20: mol_type = other RNA
actcacctgcacgtgaggca

SEQ ID NO: 15045 - RNA, 20 nt, synthetic construct
  source 1..20: mol_type = other RNA
cacacactcacctgcacgtg

SEQ ID NO: 15046 - RNA, 20 nt, synthetic construct
  source 1..20: mol_type = other RNA
gtactgcagctgcacataca

SEQ ID NO: 15047 - RNA, 20 nt, synthetic construct
  source 1..20: mol_type = other RNA
ggtactgcagctgcacatac

SEQ ID NO: 15048 - RNA, 20 nt, synthetic construct
  source 1..20: mol_type = other RNA
gaggcactggaagatgtgta

SEQ ID NO: 15049 - RNA, 20 nt, synthetic construct
  source 1..20: mol_type = other RNA
ttatgatgcttgagaggcac

SEQ ID NO: 15050 - RNA, 20 nt, synthetic construct
  source 1..20: mol_type = other RNA
ctgtttttatgatgcttgag

SEQ ID NO: 15051 - RNA, 20 nt, synthetic construct
  source 1..20: mol_type = other RNA
caaaacctctactacccacc

SEQ ID NO: 15052 - RNA, 20 nt, synthetic construct
  source 1..20: mol_type = other RNA
ggtgggtagtagaggttttg

SEQ ID NO: 15053 - RNA, 20 nt, synthetic construct
  source 1..20: mol_type = other RNA
ggatgccaggtgggtagtag

SEQ ID NO: 15054 - RNA, 20 nt, synthetic construct
  source 1..20: mol_type = other RNA
gagctctgtggatgccaggt

SEQ ID NO: 15055 - RNA, 20 nt, synthetic construct
  source 1..20: mol_type = other RNA
ggagctctgtggatgccagg

SEQ ID NO: 15056 - RNA, 20 nt, synthetic construct
  source 1..20: mol_type = other RNA
ctgggagctctgtggatgcc

SEQ ID NO: 15057 - RNA, 20 nt, synthetic construct
  source 1..20: mol_type = other RNA
tccacagagctcccagtgat

SEQ ID NO: 15058 - RNA, 20 nt, synthetic construct
  source 1..20: mol_type = other RNA
gccaatcactgggagctctg

SEQ ID NO: 15059 - RNA, 20 nt, synthetic construct
  source 1..20: mol_type = other RNA
tcttttgggagccaatcact

SEQ ID NO: 15060 - RNA, 20 nt, synthetic construct
  source 1..20: mol_type = other RNA
atcttttgggagccaatcac

SEQ ID NO: 15061 - RNA, 20 nt, synthetic construct
  source 1..20: mol_type = other RNA
tcccaaaagatactgaactt

SEQ ID NO: 15062 - RNA, 20 nt, synthetic construct
  source 1..20: mol_type = other RNA
aaagatactgaactttggca

SEQ ID NO: 15063 - RNA, 20 nt, synthetic construct
  source 1..20: mol_type = other RNA
gccaaagttcagtatctttt

SEQ ID NO: 15064 - RNA, 20 nt, synthetic construct
  source 1..20: mol_type = other RNA
tgccaaagttcagtatcttt

SEQ ID NO: 15065 - RNA, 20 nt, synthetic construct
  source 1..20: mol_type = other RNA
attatgtacaacagcaaatg

SEQ ID NO: 15066 - RNA, 20 nt, synthetic construct
  source 1..20: mol_type = other RNA
gtgtactattctagctggac

SEQ ID NO: 15067 - RNA, 20 nt, synthetic construct
  source 1..20: mol_type = other RNA
gaagtgtgtactattctagc

SEQ ID NO: 15068 - RNA, 20 nt, synthetic construct
  source 1..20: mol_type = other RNA
gaagtttatgtgcctgaaca

SEQ ID NO: 15069 - RNA, 20 nt, synthetic construct
  source 1..20: mol_type = other RNA
gttcaggcacataaacttct

SEQ ID NO: 15070 - RNA, 20 nt, synthetic construct
  source 1..20: mol_type = other RNA
tgttcaggcacataaacttc

SEQ ID NO: 15071 - RNA, 20 nt, synthetic construct
  source 1..20: mol_type = other RNA
tttatgtgcctgaacacgga

SEQ ID NO: 15072 - RNA, 20 nt, synthetic construct
  source 1..20: mol_type = other RNA
tgcctgaacacggatggtac

SEQ ID NO: 15073 - RNA, 20 nt, synthetic construct
  source 1..20: mol_type = other RNA
acacggatggtacaggaaca

SEQ ID NO: 15074 - RNA, 20 nt, synthetic construct
  source 1..20: mol_type = other RNA
cacggatggtacaggaacaa

SEQ ID NO: 15075 - RNA, 20 nt, synthetic construct
  source 1..20: mol_type = other RNA
ttatcaattcagcattactc

SEQ ID NO: 15076 - RNA, 20 nt, synthetic construct
  source 1..20: mol_type = other RNA
gagacatgaaacaaactaat

SEQ ID NO: 15077 - RNA, 20 nt, synthetic construct
  source 1..20: mol_type = other RNA
aattttgtgaaccacatatt

SEQ ID NO: 15078 - RNA, 20 nt, synthetic construct
  source 1..20: mol_type = other RNA
attttgtgaaccacatattt

SEQ ID NO: 15079 - RNA, 20 nt, synthetic construct
  source 1..20: mol_type = other RNA
tgatttttgtcccaaatatg

SEQ ID NO: 15080 - RNA, 20 nt, synthetic construct
  source 1..20: mol_type = other RNA
aagtaaatttgaattacact

SEQ ID NO: 15081 - RNA, 20 nt, synthetic construct
  source 1..20: mol_type = other RNA
atttgaattacactaggcaa

SEQ ID NO: 15082 - RNA, 20 nt, synthetic construct
  source 1..20: mol_type = other RNA
tccaaaagaagacatacatg

SEQ ID NO: 15083 - RNA, 20 nt, synthetic construct
  source 1..20: mol_type = other RNA
gccacatgtatgtcttcttt

SEQ ID NO: 15084 - RNA, 20 nt, synthetic construct
  source 1..20: mol_type = other RNA
actttatttcatatgattgt

SEQ ID NO: 15085 - RNA, 20 nt, synthetic construct
  source 1..20: mol_type = other RNA
aactttatttcatatgattg

SEQ ID NO: 15086 - RNA, 20 nt, synthetic construct
  source 1..20: mol_type = other RNA
tgtgagatggtatctcattg

SEQ ID NO: 15087 - RNA, 20 nt, synthetic construct
  source 1..20: mol_type = other RNA
ccatctcacaccagtcagaa

SEQ ID NO: 15088 - RNA, 20 nt, synthetic construct
  source 1..20: mol_type = other RNA
ccattctgactggtgtgaga

SEQ ID NO: 15089 - RNA, 20 nt, synthetic construct
  source 1..20: mol_type = other RNA
ttattaataaccattctgac

SEQ ID NO: 15090 - RNA, 20 nt, synthetic construct
  source 1..20: mol_type = other RNA
agtcaaagaatgacagttgc

SEQ ID NO: 15091 - RNA, 20 nt, synthetic construct
  source 1..20: mol_type = other RNA
aagaatgacagttgctggtg

SEQ ID NO: 15092 - RNA, 20 nt, synthetic construct
  source 1..20: mol_type = other RNA
tggtgaggttgtagagaaaa

SEQ ID NO: 15093 - RNA, 20 nt, synthetic construct
  source 1..20: mol_type = other RNA
ggaacgcttatacactgttg

SEQ ID NO: 15094 - RNA, 20 nt, synthetic construct
  source 1..20: mol_type = other RNA
gaacgcttatacactgttga

SEQ ID NO: 15095 - RNA, 20 nt, synthetic construct
  source 1..20: mol_type = other RNA
aacgcttatacactgttgag

SEQ ID NO: 15096 - RNA, 20 nt, synthetic construct
  source 1..20: mol_type = other RNA
tgtaaattagttcaaccatg

SEQ ID NO: 15097 - RNA, 20 nt, synthetic construct
  source 1..20: mol_type = other RNA
caaccatgtggaagacagtg

SEQ ID NO: 15098 - RNA, 20 nt, synthetic construct
  source 1..20: mol_type = other RNA
ttgccacactgtcttccaca

SEQ ID NO: 15099 - RNA, 20 nt, synthetic construct
  source 1..20: mol_type = other RNA
aaatggtatataggtctttg

SEQ ID NO: 15100 - RNA, 20 nt, synthetic construct
  source 1..20: mol_type = other RNA
tgctgggtcaaatggtatat

SEQ ID NO: 15101 - RNA, 20 nt, synthetic construct
  source 1..20: mol_type = other RNA
aatgggattgctgggtcaaa

SEQ ID NO: 15102 - RNA, 20 nt, synthetic construct
  source 1..20: mol_type = other RNA
tatgcagtaatgggattgct

SEQ ID NO: 15103 - RNA, 20 nt, synthetic construct
  source 1..20: mol_type = other RNA
atatgcagtaatgggattgc

SEQ ID NO: 15104 - RNA, 20 nt, synthetic construct
  source 1..20: mol_type = other RNA
attactgcatatatacccaa

SEQ ID NO: 15105 - RNA, 20 nt, synthetic construct
  source 1..20: mol_type = other RNA
ttgggtatatatgcagtaat

SEQ ID NO: 15106 - RNA, 20 nt, synthetic construct
  source 1..20: mol_type = other RNA
tttgggtatatatgcagtaa

SEQ ID NO: 15107 - RNA, 20 nt, synthetic construct
  source 1..20: mol_type = other RNA
agaatgactcatattccttt

SEQ ID NO: 15108 - RNA, 20 nt, synthetic construct
  source 1..20: mol_type = other RNA
tagaatgactcatattcctt

SEQ ID NO: 15109 - RNA, 20 nt, synthetic construct
  source 1..20: mol_type = other RNA
aaatgcgtgcatgtgtctta

SEQ ID NO: 15110 - RNA, 20 nt, synthetic construct
  source 1..20: mol_type = other RNA
tattcacgatagcaaaaaca

SEQ ID NO: 15111 - RNA, 20 nt, synthetic construct
  source 1..20: mol_type = other RNA
catgcccatcaatgatagac

SEQ ID NO: 15112 - RNA, 20 nt, synthetic construct
  source 1..20: mol_type = other RNA
tctatcattgatgggcatgt

SEQ ID NO: 15113 - RNA, 20 nt, synthetic construct
  source 1..20: mol_type = other RNA
ttatccagtctatcattgat

SEQ ID NO: 15114 - RNA, 20 nt, synthetic construct
  source 1..20: mol_type = other RNA
tttatccagtctatcattga

SEQ ID NO: 15115 - RNA, 20 nt, synthetic construct
  source 1..20: mol_type = other RNA
tagactggataaagaaaatg

SEQ ID NO: 15116 - RNA, 20 nt, synthetic construct
  source 1..20: mol_type = other RNA
aatgtggtacatatacccca

SEQ ID NO: 15117 - RNA, 20 nt, synthetic construct
  source 1..20: mol_type = other RNA
tggctgcatagtattccatg

SEQ ID NO: 15118 - RNA, 20 nt, synthetic construct
  source 1..20: mol_type = other RNA
atggctgcatagtattccat

SEQ ID NO: 15119 - RNA, 20 nt, synthetic construct
  source 1..20: mol_type = other RNA
tatggctgcatagtattcca

SEQ ID NO: 15120 - RNA, 20 nt, synthetic construct
  source 1..20: mol_type = other RNA
tgatctcattctttttctta

SEQ ID NO: 15121 - RNA, 20 nt, synthetic construct
  source 1..20: mol_type = other RNA
aatgagatcatgccctttgc

SEQ ID NO: 15122 - RNA, 20 nt, synthetic construct
  source 1..20: mol_type = other RNA
tcatgccctttgcaggaaca

SEQ ID NO: 15123 - RNA, 20 nt, synthetic construct
  source 1..20: mol_type = other RNA
gccctttgcaggaacatgga

SEQ ID NO: 15124 - RNA, 20 nt, synthetic construct
  source 1..20: mol_type = other RNA
tgcaggaacatggatggagc

SEQ ID NO: 15125 - RNA, 20 nt, synthetic construct
  source 1..20: mol_type = other RNA
ctccatccatgttcctgcaa

SEQ ID NO: 15126 - RNA, 20 nt, synthetic construct
  source 1..20: mol_type = other RNA
aggaacatggatggagctgg

SEQ ID NO: 15127 - RNA, 20 nt, synthetic construct
  source 1..20: mol_type = other RNA
tatccttagcaaactaaccc

SEQ ID NO: 15128 - RNA, 20 nt, synthetic construct
  source 1..20: mol_type = other RNA
ggttagtttgctaaggataa

SEQ ID NO: 15129 - RNA, 20 nt, synthetic construct
  source 1..20: mol_type = other RNA
gttcctgggttagtttgcta

SEQ ID NO: 15130 - RNA, 20 nt, synthetic construct
  source 1..20: mol_type = other RNA
gcacttggttttctgttcct

SEQ ID NO: 15131 - RNA, 20 nt, synthetic construct
  source 1..20: mol_type = other RNA
tgcacttggttttctgttcc

SEQ ID NO: 15132 - RNA, 20 nt, synthetic construct
  source 1..20: mol_type = other RNA
aaagtgagaacatctgcact

SEQ ID NO: 15133 - RNA, 20 nt, synthetic construct
  source 1..20: mol_type = other RNA
ttttaagtgtgagctgaatg

SEQ ID NO: 15134 - RNA, 20 nt, synthetic construct
  source 1..20: mol_type = other RNA
agctgaatgaggagaataca

SEQ ID NO: 15135 - RNA, 20 nt, synthetic construct
  source 1..20: mol_type = other RNA
gctgaatgaggagaatacat

SEQ ID NO: 15136 - RNA, 20 nt, synthetic construct
  source 1..20: mol_type = other RNA
gagaatacatgggcacatag

SEQ ID NO: 15137 - RNA, 20 nt, synthetic construct
  source 1..20: mol_type = other RNA
agaatacatgggcacataga

SEQ ID NO: 15138 - RNA, 20 nt, synthetic construct
  source 1..20: mol_type = other RNA
gaatacatgggcacatagag

SEQ ID NO: 15139 - RNA, 20 nt, synthetic construct
  source 1..20: mol_type = other RNA
cacatagaggggcctatcag

SEQ ID NO: 15140 - RNA, 20 nt, synthetic construct
  source 1..20: mol_type = other RNA
acatagaggggcctatcaga

SEQ ID NO: 15141 - RNA, 20 nt, synthetic construct
  source 1..20: mol_type = other RNA
tagaggggcctatcagaggg

SEQ ID NO: 15142 - RNA, 20 nt, synthetic construct
  source 1..20: mol_type = other RNA
aggggcctatcagagggtgg

SEQ ID NO: 15143 - RNA, 20 nt, synthetic construct
  source 1..20: mol_type = other RNA
ggggcctatcagagggtgga

SEQ ID NO: 15144 - RNA, 20 nt, synthetic construct
  source 1..20: mol_type = other RNA
gcctatcagagggtggaggg

SEQ ID NO: 15145 - RNA, 20 nt, synthetic construct
  source 1..20: mol_type = other RNA
cctatcagagggtggagggt

SEQ ID NO: 15146 - RNA, 20 nt, synthetic construct
  source 1..20: mol_type = other RNA
cccaccctccaccctctgat

SEQ ID NO: 15147 - RNA, 20 nt, synthetic construct
  source 1..20: mol_type = other RNA
agagggtggagggtgggaga

SEQ ID NO: 15148 - RNA, 20 nt, synthetic construct
  source 1..20: mol_type = other RNA
agagtatcagaaaaaataac

SEQ ID NO: 15149 - RNA, 20 nt, synthetic construct
  source 1..20: mol_type = other RNA
acaggtagtagatttaatac

SEQ ID NO: 15150 - RNA, 20 nt, synthetic construct
  source 1..20: mol_type = other RNA
atacagattgttttgtcatc

SEQ ID NO: 15151 - RNA, 20 nt, synthetic construct
  source 1..20: mol_type = other RNA
taggtaaactcatgtcatgg

SEQ ID NO: 15152 - RNA, 20 nt, synthetic construct
  source 1..20: mol_type = other RNA
ataggtaaactcatgtcatg

SEQ ID NO: 15153 - RNA, 20 nt, synthetic construct
  source 1..20: mol_type = other RNA
tataggtaaactcatgtcat

SEQ ID NO: 15154 - RNA, 20 nt, synthetic construct
  source 1..20: mol_type = other RNA
atataggtaaactcatgtca

SEQ ID NO: 15155 - RNA, 20 nt, synthetic construct
  source 1..20: mol_type = other RNA
catgtgcgggtttgttatat

SEQ ID NO: 15156 - RNA, 20 nt, synthetic construct
  source 1..20: mol_type = other RNA
aagttcaggagtacatgtgc

SEQ ID NO: 15157 - RNA, 20 nt, synthetic construct
  source 1..20: mol_type = other RNA
taagttcaggagtacatgtg

SEQ ID NO: 15158 - RNA, 20 nt, synthetic construct
  source 1..20: mol_type = other RNA
ttaatttaacttttaagttc

SEQ ID NO: 15159 - RNA, 20 nt, synthetic construct
  source 1..20: mol_type = other RNA
acagtattcttcatattcaa

SEQ ID NO: 15160 - RNA, 20 nt, synthetic construct
  source 1..20: mol_type = other RNA
ttcaatggcaatgtgtgaag

SEQ ID NO: 15161 - RNA, 20 nt, synthetic construct
  source 1..20: mol_type = other RNA
tcaatggcaatgtgtgaagt

SEQ ID NO: 15162 - RNA, 20 nt, synthetic construct
  source 1..20: mol_type = other RNA
ggaagtgtcttgacagaatt

SEQ ID NO: 15163 - RNA, 20 nt, synthetic construct
  source 1..20: mol_type = other RNA
tgacagaattcggtgtttca

SEQ ID NO: 15164 - RNA, 20 nt, synthetic construct
  source 1..20: mol_type = other RNA
ttgatgcccaagactgcaca

SEQ ID NO: 15165 - RNA, 20 nt, synthetic construct
  source 1..20: mol_type = other RNA
atgtagccttgtgcagtctt

SEQ ID NO: 15166 - RNA, 20 nt, synthetic construct
  source 1..20: mol_type = other RNA
aatgtagccttgtgcagtct

SEQ ID NO: 15167 - RNA, 20 nt, synthetic construct
  source 1..20: mol_type = other RNA
cacaaggctacattttctac

SEQ ID NO: 15168 - RNA, 20 nt, synthetic construct
  source 1..20: mol_type = other RNA
ttctttattgcagttacata

SEQ ID NO: 15169 - RNA, 20 nt, synthetic construct
  source 1..20: mol_type = other RNA
tctttattgcagttacatat

SEQ ID NO: 15170 - RNA, 20 nt, synthetic construct
  source 1..20: mol_type = other RNA
ctttattgcagttacatatg

SEQ ID NO: 15171 - RNA, 20 nt, synthetic construct
  source 1..20: mol_type = other RNA
atatgtaactgcaataaaga

SEQ ID NO: 15172 - RNA, 20 nt, synthetic construct
  source 1..20: mol_type = other RNA
catatggggctgatgacttt

SEQ ID NO: 15173 - RNA, 20 nt, synthetic construct
  source 1..20: mol_type = other RNA
atatggggctgatgacttta

SEQ ID NO: 15174 - RNA, 20 nt, synthetic construct
  source 1..20: mol_type = other RNA
aagatttgggaattattgca

SEQ ID NO: 15175 - RNA, 20 nt, synthetic construct
  source 1..20: mol_type = other RNA
tacttacgagagaaagattt

SEQ ID NO: 15176 - RNA, 20 nt, synthetic construct
  source 1..20: mol_type = other RNA
atacttacgagagaaagatt

SEQ ID NO: 15177 - RNA, 20 nt, synthetic construct
  source 1..20: mol_type = other RNA
gtaagtatatgccttgcttc

SEQ ID NO: 15178 - RNA, 20 nt, synthetic construct
  source 1..20: mol_type = other RNA
gcttttgttttccagaagca

SEQ ID NO: 15179 - RNA, 20 nt, synthetic construct
  source 1..20: mol_type = other RNA
atttacatgataggagatga

SEQ ID NO: 15180 - RNA, 20 nt, synthetic construct
  source 1..20: mol_type = other RNA
acgtacgatatttacatgat

SEQ ID NO: 15181 - RNA, 20 nt, synthetic construct
  source 1..20: mol_type = other RNA
tgtatctcgggggttgatga

SEQ ID NO: 15182 - RNA, 20 nt, synthetic construct
  source 1..20: mol_type = other RNA
gaatatttaatgtatctcgg

SEQ ID NO: 15183 - RNA, 20 nt, synthetic construct
  source 1..20: mol_type = other RNA
tgaatatttaatgtatctcg

SEQ ID NO: 15184 - RNA, 20 nt, synthetic construct
  source 1..20: mol_type = other RNA
gtgaatatttaatgtatctc

SEQ ID NO: 15185 - RNA, 20 nt, synthetic construct
  source 1..20: mol_type = other RNA
agtgaatatttaatgtatct

SEQ ID NO: 15186 - RNA, 20 nt, synthetic construct
  source 1..20: mol_type = other RNA
gacacctaccatatcatttt

SEQ ID NO: 15187 - RNA, 20 nt, synthetic construct
  source 1..20: mol_type = other RNA
acacctaccatatcattttt

SEQ ID NO: 15188 - RNA, 20 nt, synthetic construct
  source 1..20: mol_type = other RNA
atacccaaaaatgatatggt

SEQ ID NO: 15189 - RNA, 20 nt, synthetic construct
  source 1..20: mol_type = other RNA
ataaatacccaaaaatgata

SEQ ID NO: 15190 - RNA, 20 nt, synthetic construct
  source 1..20: mol_type = other RNA
taccataaagtgcaaaacga

SEQ ID NO: 15191 - RNA, 20 nt, synthetic construct
  source 1..20: mol_type = other RNA
aaagtgcaaaacgaaggtct

SEQ ID NO: 15192 - RNA, 20 nt, synthetic construct
  source 1..20: mol_type = other RNA
gaccttcgttttgcacttta

SEQ ID NO: 15193 - RNA, 20 nt, synthetic construct
  source 1..20: mol_type = other RNA
cgaaggtctaggcagttgtg

SEQ ID NO: 15194 - RNA, 20 nt, synthetic construct
  source 1..20: mol_type = other RNA
taggcagttgtgcggtgtcc

SEQ ID NO: 15195 - RNA, 20 nt, synthetic construct
  source 1..20: mol_type = other RNA
aggcagttgtgcggtgtcct

SEQ ID NO: 15196 - RNA, 20 nt, synthetic construct
  source 1..20: mol_type = other RNA
tgtgcggtgtcctgggagca

SEQ ID NO: 15197 - RNA, 20 nt, synthetic construct
  source 1..20: mol_type = other RNA
gtgtcctgggagcatggcag

SEQ ID NO: 15198 - RNA, 20 nt, synthetic construct
  source 1..20: mol_type = other RNA
tactccactgccatgctccc

SEQ ID NO: 15199 - RNA, 20 nt, synthetic construct
  source 1..20: mol_type = other RNA
atggcagtggagtaacagta

SEQ ID NO: 15200 - RNA, 20 nt, synthetic construct
  source 1..20: mol_type = other RNA
tggcagtggagtaacagtaa

SEQ ID NO: 15201 - RNA, 20 nt, synthetic construct
  source 1..20: mol_type = other RNA
agtggagtaacagtaagggt

SEQ ID NO: 15202 - RNA, 20 nt, synthetic construct
  source 1..20: mol_type = other RNA
tggagtcacagtagcactga

SEQ ID NO: 15203 - RNA, 20 nt, synthetic construct
  source 1..20: mol_type = other RNA
ggagtcacagtagcactgat

SEQ ID NO: 15204 - RNA, 20 nt, synthetic construct
  source 1..20: mol_type = other RNA
tgttacttcgcagatgctgc

SEQ ID NO: 15205 - RNA, 20 nt, synthetic construct
  source 1..20: mol_type = other RNA
aatcctttttattgagtgtg

SEQ ID NO: 15206 - RNA, 20 nt, synthetic construct
  source 1..20: mol_type = other RNA
tatcctcacactcaataaaa

SEQ ID NO: 15207 - RNA, 20 nt, synthetic construct
  source 1..20: mol_type = other RNA
tattgagtgtgaggataaaa

SEQ ID NO: 15208 - RNA, 20 nt, synthetic construct
  source 1..20: mol_type = other RNA
tttgttggtgacagaaaata

SEQ ID NO: 15209 - RNA, 20 nt, synthetic construct
  source 1..20: mol_type = other RNA
caccaacaaagaactgaaca

SEQ ID NO: 15210 - RNA, 20 nt, synthetic construct
  source 1..20: mol_type = other RNA
aaccatgttcagttctttgt

SEQ ID NO: 15211 - RNA, 20 nt, synthetic construct
  source 1..20: mol_type = other RNA
agataatttttacaattttg

SEQ ID NO: 15212 - RNA, 20 nt, synthetic construct
  source 1..20: mol_type = other RNA
gataatttttacaattttgt

SEQ ID NO: 15213 - RNA, 20 nt, synthetic construct
  source 1..20: mol_type = other RNA
tttttacaattttgtgggac

SEQ ID NO: 15214 - RNA, 20 nt, synthetic construct
  source 1..20: mol_type = other RNA
caattttgtgggacaggaga

SEQ ID NO: 15215 - RNA, 20 nt, synthetic construct
  source 1..20: mol_type = other RNA
ggagatatgctcttcatctg

SEQ ID NO: 15216 - RNA, 20 nt, synthetic construct
  source 1..20: mol_type = other RNA
atgctcttcatctgtggttc

SEQ ID NO: 15217 - RNA, 20 nt, synthetic construct
  source 1..20: mol_type = other RNA
aactgagaagagaaaattgc

SEQ ID NO: 15218 - RNA, 20 nt, synthetic construct
  source 1..20: mol_type = other RNA
agagaaaattgcaggcctcc

SEQ ID NO: 15219 - RNA, 20 nt, synthetic construct
  source 1..20: mol_type = other RNA
gcctccaggccgttattctg

SEQ ID NO: 15220 - RNA, 20 nt, synthetic construct
  source 1..20: mol_type = other RNA
accacagaataacggcctgg

SEQ ID NO: 15221 - RNA, 20 nt, synthetic construct
  source 1..20: mol_type = other RNA
tgcaccacagaataacggcc

SEQ ID NO: 15222 - RNA, 20 nt, synthetic construct
  source 1..20: mol_type = other RNA
attctgtggtgcatcgctgc

SEQ ID NO: 15223 - RNA, 20 nt, synthetic construct
  source 1..20: mol_type = other RNA
gccaacgtactgttcctgct

SEQ ID NO: 15224 - RNA, 20 nt, synthetic construct
  source 1..20: mol_type = other RNA
accaagcaggaacagtacgt

SEQ ID NO: 15225 - RNA, 20 nt, synthetic construct
  source 1..20: mol_type = other RNA
tgttcctgcttggtgcccgc

SEQ ID NO: 15226 - RNA, 20 nt, synthetic construct
  source 1..20: mol_type = other RNA
aggtcctgcgggcaccaagc

SEQ ID NO: 15227 - RNA, 20 nt, synthetic construct
  source 1..20: mol_type = other RNA
cagatcagagaaggtcctgc

SEQ ID NO: 15228 - RNA, 20 nt, synthetic construct
  source 1..20: mol_type = other RNA
tcagatcagagaaggtcctg

SEQ ID NO: 15229 - RNA, 20 nt, synthetic construct
  source 1..20: mol_type = other RNA
ttaacagctcagatcagaga

SEQ ID NO: 15230 - RNA, 20 nt, synthetic construct
  source 1..20: mol_type = other RNA
atgaaattcacatctgtttt

SEQ ID NO: 15231 - RNA, 20 nt, synthetic construct
  source 1..20: mol_type = other RNA
tgataaatgataaatatatt

SEQ ID NO: 15232 - RNA, 20 nt, synthetic construct
  source 1..20: mol_type = other RNA
gataaatgataaatatattt

SEQ ID NO: 15233 - RNA, 20 nt, synthetic construct
  source 1..20: mol_type = other RNA
ttctttaaagtactcatttg

SEQ ID NO: 15234 - RNA, 20 nt, synthetic construct
  source 1..20: mol_type = other RNA
tacaagttgataatcccctt

SEQ ID NO: 15235 - RNA, 20 nt, synthetic construct
  source 1..20: mol_type = other RNA
aaggggattatcaacttgta

SEQ ID NO: 15236 - RNA, 20 nt, synthetic construct
  source 1..20: mol_type = other RNA
ttactaatacaggtcctaag

SEQ ID NO: 15237 - RNA, 20 nt, synthetic construct
  source 1..20: mol_type = other RNA
tttactaatacaggtcctaa

SEQ ID NO: 15238 - RNA, 20 nt, synthetic construct
  source 1..20: mol_type = other RNA
atttactaatacaggtccta

SEQ ID NO: 15239 - RNA, 20 nt, synthetic construct
  source 1..20: mol_type = other RNA
attagaggatttactaatac

SEQ ID NO: 15240 - RNA, 20 nt, synthetic construct
  source 1..20: mol_type = other RNA
atgttgctttatagtattag

SEQ ID NO: 15241 - RNA, 20 nt, synthetic construct
  source 1..20: mol_type = other RNA
ataaagcaacatcagaaaac

SEQ ID NO: 15242 - RNA, 20 nt, synthetic construct
  source 1..20: mol_type = other RNA
actgtgacaattataattat

SEQ ID NO: 15243 - RNA, 20 nt, synthetic construct
  source 1..20: mol_type = other RNA
tgccagtaacagttaaagac

SEQ ID NO: 15244 - RNA, 20 nt, synthetic construct
  source 1..20: mol_type = other RNA
cacctgtctttaactgttac

SEQ ID NO: 15245 - RNA, 20 nt, synthetic construct
  source 1..20: mol_type = other RNA
aagacaggtgtctgacatcc

SEQ ID NO: 15246 - RNA, 20 nt, synthetic construct
  source 1..20: mol_type = other RNA
cctggttatcaaaaactatc

SEQ ID NO: 15247 - RNA, 20 nt, synthetic construct
  source 1..20: mol_type = other RNA
ccagatagtttttgataacc

SEQ ID NO: 15248 - RNA, 20 nt, synthetic construct
  source 1..20: mol_type = other RNA
caaaaactatctggtgtcta

SEQ ID NO: 15249 - RNA, 20 nt, synthetic construct
  source 1..20: mol_type = other RNA
tttttgctcacaaactagat

SEQ ID NO: 15250 - RNA, 20 nt, synthetic construct
  source 1..20: mol_type = other RNA
tttctgtaacttctataggc

SEQ ID NO: 15251 - RNA, 20 nt, synthetic construct
  source 1..20: mol_type = other RNA
aagatttctgtaacttctat

SEQ ID NO: 15252 - RNA, 20 nt, synthetic construct
  source 1..20: mol_type = other RNA
ttgctttaaagtggaatcaa

SEQ ID NO: 15253 - RNA, 20 nt, synthetic construct
  source 1..20: mol_type = other RNA
atcaagctattgctttaaag

SEQ ID NO: 15254 - RNA, 20 nt, synthetic construct
  source 1..20: mol_type = other RNA
acatatacatctcaaaaagt

SEQ ID NO: 15255 - RNA, 20 nt, synthetic construct
  source 1..20: mol_type = other RNA
tatgaacatataaaacatta

SEQ ID NO: 15256 - RNA, 20 nt, synthetic construct
  source 1..20: mol_type = other RNA
catataaaacattatggtat

SEQ ID NO: 15257 - RNA, 20 nt, synthetic construct
  source 1..20: mol_type = other RNA
acttcacagaaacatgtttt

SEQ ID NO: 15258 - RNA, 20 nt, synthetic construct
  source 1..20: mol_type = other RNA
acatgtttctgtgaagtctg

SEQ ID NO: 15259 - RNA, 20 nt, synthetic construct
  source 1..20: mol_type = other RNA
gtttctgtgaagtctgagga

SEQ ID NO: 15260 - RNA, 20 nt, synthetic construct
  source 1..20: mol_type = other RNA
gtctgcttcaacatatgctc

SEQ ID NO: 15261 - RNA, 20 nt, synthetic construct
  source 1..20: mol_type = other RNA
agactgaaggcttcactgaa

SEQ ID NO: 15262 - RNA, 20 nt, synthetic construct
  source 1..20: mol_type = other RNA
cagactgaaggcttcactga

SEQ ID NO: 15263 - RNA, 20 nt, synthetic construct
  source 1..20: mol_type = other RNA
cagcgattcttacagactga

SEQ ID NO: 15264 - RNA, 20 nt, synthetic construct
  source 1..20: mol_type = other RNA
taaaagagatgatatacact

SEQ ID NO: 15265 - RNA, 20 nt, synthetic construct
  source 1..20: mol_type = other RNA
tctcccactctccccagtgt

SEQ ID NO: 15266 - RNA, 20 nt, synthetic construct
  source 1..20: mol_type = other RNA
attccaacactggggagagt

SEQ ID NO: 15267 - RNA, 20 nt, synthetic construct
  source 1..20: mol_type = other RNA
aattccaacactggggagag

SEQ ID NO: 15268 - RNA, 20 nt, synthetic construct
  source 1..20: mol_type = other RNA
tagtcacaattccaacactg

SEQ ID NO: 15269 - RNA, 20 nt, synthetic construct
  source 1..20: mol_type = other RNA
atagtcacaattccaacact

SEQ ID NO: 15270 - RNA, 20 nt, synthetic construct
  source 1..20: mol_type = other RNA
gatagtcacaattccaacac

SEQ ID NO: 15271 - RNA, 20 nt, synthetic construct
  source 1..20: mol_type = other RNA
tgactatcttctcacacaag

SEQ ID NO: 15272 - RNA, 20 nt, synthetic construct
  source 1..20: mol_type = other RNA
ttctcacacaagcggctact

SEQ ID NO: 15273 - RNA, 20 nt, synthetic construct
  source 1..20: mol_type = other RNA
ggttgctgttttgcggggga

SEQ ID NO: 15274 - RNA, 20 nt, synthetic construct
  source 1..20: mol_type = other RNA
gtttggttgctgttttgcgg

SEQ ID NO: 15275 - RNA, 20 nt, synthetic construct
  source 1..20: mol_type = other RNA
agtttggttgctgttttgcg

SEQ ID NO: 15276 - RNA, 20 nt, synthetic construct
  source 1..20: mol_type = other RNA
cagtttggttgctgttttgc

SEQ ID NO: 15277 - RNA, 20 nt, synthetic construct
  source 1..20: mol_type = other RNA
aaacagcaaccaaactgttc

SEQ ID NO: 15278 - RNA, 20 nt, synthetic construct
  source 1..20: mol_type = other RNA
aacagcaaccaaactgttct

SEQ ID NO: 15279 - RNA, 20 nt, synthetic construct
  source 1..20: mol_type = other RNA
gatattggcccagaacagtt

SEQ ID NO: 15280 - RNA, 20 nt, synthetic construct
  source 1..20: mol_type = other RNA
gggccaatatcaccaccttg

SEQ ID NO: 15281 - RNA, 20 nt, synthetic construct
  source 1..20: mol_type = other RNA
tgaccacaaggtggtgatat

SEQ ID NO: 15282 - RNA, 20 nt, synthetic construct
  source 1..20: mol_type = other RNA
tcttcatcatgaccacaagg

SEQ ID NO: 15283 - RNA, 20 nt, synthetic construct
  source 1..20: mol_type = other RNA
aattcttcatcatgaccaca

SEQ ID NO: 15284 - RNA, 20 nt, synthetic construct
  source 1..20: mol_type = other RNA
agaggtgttgagggcaaagg

SEQ ID NO: 15285 - RNA, 20 nt, synthetic construct
  source 1..20: mol_type = other RNA
aagaggtgttgagggcaaag

SEQ ID NO: 15286 - RNA, 20 nt, synthetic construct
  source 1..20: mol_type = other RNA
aaagaggtgttgagggcaaa

SEQ ID NO: 15287 - RNA, 20 nt, synthetic construct
  source 1..20: mol_type = other RNA
aaaagaggtgttgagggcaa

SEQ ID NO: 15288 - RNA, 20 nt, synthetic construct
  source 1..20: mol_type = other RNA
aagaagaaaagaggtgttga

SEQ ID NO: 15289 - RNA, 20 nt, synthetic construct
  source 1..20: mol_type = other RNA
caagaagaaaagaggtgttg

SEQ ID NO: 15290 - RNA, 20 nt, synthetic construct
  source 1..20: mol_type = other RNA
ttaattttcaagaagaaaag

SEQ ID NO: 15291 - RNA, 20 nt, synthetic construct
  source 1..20: mol_type = other RNA
gacagtagagggggtgaaag

SEQ ID NO: 15292 - RNA, 20 nt, synthetic construct
  source 1..20: mol_type = other RNA
ggacagtagagggggtgaaa

SEQ ID NO: 15293 - RNA, 20 nt, synthetic construct
  source 1..20: mol_type = other RNA
aggacagtagagggggtgaa

SEQ ID NO: 15294 - RNA, 20 nt, synthetic construct
  source 1..20: mol_type = other RNA
tggaataaggacagtagagg

SEQ ID NO: 15295 - RNA, 20 nt, synthetic construct
  source 1..20: mol_type = other RNA
ctggaataaggacagtagag

SEQ ID NO: 15296 - RNA, 20 nt, synthetic construct
  source 1..20: mol_type = other RNA
actggaataaggacagtaga

SEQ ID NO: 15297 - RNA, 20 nt, synthetic construct
  source 1..20: mol_type = other RNA
aactggaataaggacagtag

SEQ ID NO: 15298 - RNA, 20 nt, synthetic construct
  source 1..20: mol_type = other RNA
tacggacacaaactggaata

SEQ ID NO: 15299 - RNA, 20 nt, synthetic construct
  source 1..20: mol_type = other RNA
cagtttgtgtccgtagttgc

SEQ ID NO: 15300 - RNA, 20 nt, synthetic construct
  source 1..20: mol_type = other RNA
tttgtgtccgtagttgctgg

SEQ ID NO: 15301 - RNA, 20 nt, synthetic construct
  source 1..20: mol_type = other RNA
cagcaactacggacacaaac

SEQ ID NO: 15302 - RNA, 20 nt, synthetic construct
  source 1..20: mol_type = other RNA
tttctttcctccagcaacta

SEQ ID NO: 15303 - RNA, 20 nt, synthetic construct
  source 1..20: mol_type = other RNA
agaataaaaaaaagagcaat

SEQ ID NO: 15304 - RNA, 20 nt, synthetic construct
  source 1..20: mol_type = other RNA
aagtcagggagagaaaagaa

SEQ ID NO: 15305 - RNA, 20 nt, synthetic construct
  source 1..20: mol_type = other RNA
cctgacttcattccatttaa

SEQ ID NO: 15306 - RNA, 20 nt, synthetic construct
  source 1..20: mol_type = other RNA
ctttaaatggaatgaagtca

SEQ ID NO: 15307 - RNA, 20 nt, synthetic construct
  source 1..20: mol_type = other RNA
cctttaaatggaatgaagtc

SEQ ID NO: 15308 - RNA, 20 nt, synthetic construct
  source 1..20: mol_type = other RNA
tgcaatttaaggcctttaaa

SEQ ID NO: 15309 - RNA, 20 nt, synthetic construct
  source 1..20: mol_type = other RNA
ttttcgttatttgcaattta

SEQ ID NO: 15310 - RNA, 20 nt, synthetic construct
  source 1..20: mol_type = other RNA
ggtaattaaatgaaaatttg

SEQ ID NO: 15311 - RNA, 20 nt, synthetic construct
  source 1..20: mol_type = other RNA
ttaagatatatcttgaatca

SEQ ID NO: 15312 - RNA, 20 nt, synthetic construct
  source 1..20: mol_type = other RNA
caagtaaaaatcaaatgaaa

SEQ ID NO: 15313 - RNA, 20 nt, synthetic construct
  source 1..20: mol_type = other RNA
cagaaatattcttgcaacac

SEQ ID NO: 15314 - RNA, 20 nt, synthetic construct
  source 1..20: mol_type = other RNA
tcaatattttacttgaaaaa

SEQ ID NO: 15315 - RNA, 20 nt, synthetic construct
  source 1..20: mol_type = other RNA
ttgagcatttcaagcttaca

SEQ ID NO: 15316 - RNA, 20 nt, synthetic construct
  source 1..20: mol_type = other RNA
agtcactctagtgtgagttt

SEQ ID NO: 15317 - RNA, 20 nt, synthetic construct
  source 1..20: mol_type = other RNA
tcacactagagtgactactt

SEQ ID NO: 15318 - RNA, 20 nt, synthetic construct
  source 1..20: mol_type = other RNA
acttcggactatcttttcaa

SEQ ID NO: 15319 - RNA, 20 nt, synthetic construct
  source 1..20: mol_type = other RNA
ttactgaaaaagtaaatgtt

SEQ ID NO: 15320 - RNA, 20 nt, synthetic construct
  source 1..20: mol_type = other RNA
tatgaagacacattctaaaa

SEQ ID NO: 15321 - RNA, 20 nt, synthetic construct
  source 1..20: mol_type = other RNA
agacacattctaaaaaggaa

SEQ ID NO: 15322 - RNA, 20 nt, synthetic construct
  source 1..20: mol_type = other RNA
gacacattctaaaaaggaaa

SEQ ID NO: 15323 - RNA, 20 nt, synthetic construct
  source 1..20: mol_type = other RNA
aaaaggaaagggaaatgaag

SEQ ID NO: 15324 - RNA, 20 nt, synthetic construct
  source 1..20: mol_type = other RNA
gaagaggaagcttaattcat

SEQ ID NO: 15325 - RNA, 20 nt, synthetic construct
  source 1..20: mol_type = other RNA
ggaagcttaattcattggtc

SEQ ID NO: 15326 - RNA, 20 nt, synthetic construct
  source 1..20: mol_type = other RNA
agcttaattcattggtcagg

SEQ ID NO: 15327 - RNA, 20 nt, synthetic construct
  source 1..20: mol_type = other RNA
gcttaattcattggtcaggt

SEQ ID NO: 15328 - RNA, 20 nt, synthetic construct
  source 1..20: mol_type = other RNA
cttaattcattggtcaggtg

SEQ ID NO: 15329 - RNA, 20 nt, synthetic construct
  source 1..20: mol_type = other RNA
gctgaaagaaacaatacagg

SEQ ID NO: 15330 - RNA, 20 nt, synthetic construct
  source 1..20: mol_type = other RNA
ctggctgaaagaaacaatac

SEQ ID NO: 15331 - RNA, 20 nt, synthetic construct
  source 1..20: mol_type = other RNA
agtctctactttaacattac

SEQ ID NO: 15332 - RNA, 20 nt, synthetic construct
  source 1..20: mol_type = other RNA
actcagagtgatgaagagaa

SEQ ID NO: 15333 - RNA, 20 nt, synthetic construct
  source 1..20: mol_type = other RNA
ctcagagtgatgaagagaat

SEQ ID NO: 15334 - RNA, 20 nt, synthetic construct
  source 1..20: mol_type = other RNA
gggcgtgcctgtgaaatgaa

SEQ ID NO: 15335 - RNA, 20 nt, synthetic construct
  source 1..20: mol_type = other RNA
ggcgtgcctgtgaaatgaat

SEQ ID NO: 15336 - RNA, 20 nt, synthetic construct
  source 1..20: mol_type = other RNA
gcgtgcctgtgaaatgaatg

SEQ ID NO: 15337 - RNA, 20 nt, synthetic construct
  source 1..20: mol_type = other RNA
ttcttccccattcatttcac

SEQ ID NO: 15338 - RNA, 20 nt, synthetic construct
  source 1..20: mol_type = other RNA
aatgaatggggaagaatgtg

SEQ ID NO: 15339 - RNA, 20 nt, synthetic construct
  source 1..20: mol_type = other RNA
gaatggggaagaatgtgcgg

SEQ ID NO: 15340 - RNA, 20 nt, synthetic construct
  source 1..20: mol_type = other RNA
tttacgaatgcttgatgcct

SEQ ID NO: 15341 - RNA, 20 nt, synthetic construct
  source 1..20: mol_type = other RNA
ttacgaatgcttgatgcctc

SEQ ID NO: 15342 - RNA, 20 nt, synthetic construct
  source 1..20: mol_type = other RNA
gcctcgggagagaaaatgaa

SEQ ID NO: 15343 - RNA, 20 nt, synthetic construct
  source 1..20: mol_type = other RNA
gccattcattttctctcccg

SEQ ID NO: 15344 - RNA, 20 nt, synthetic construct
  source 1..20: mol_type = other RNA
agaaaatgaatggctcccac

SEQ ID NO: 15345 - RNA, 20 nt, synthetic construct
  source 1..20: mol_type = other RNA
gaaaatgaatggctcccaca

SEQ ID NO: 15346 - RNA, 20 nt, synthetic construct
  source 1..20: mol_type = other RNA
aatggctcccacagggacca

SEQ ID NO: 15347 - RNA, 20 nt, synthetic construct
  source 1..20: mol_type = other RNA
ccacagggaccaaggcagct

SEQ ID NO: 15348 - RNA, 20 nt, synthetic construct
  source 1..20: mol_type = other RNA
cgagctgccttggtccctgt

SEQ ID NO: 15349 - RNA, 20 nt, synthetic construct
  source 1..20: mol_type = other RNA
ccgagctgccttggtccctg

SEQ ID NO: 15350 - RNA, 20 nt, synthetic construct
  source 1..20: mol_type = other RNA
ccaaggcagctcggctttgt

SEQ ID NO: 15351 - RNA, 20 nt, synthetic construct
  source 1..20: mol_type = other RNA
caaggcagctcggctttgtc

SEQ ID NO: 15352 - RNA, 20 nt, synthetic construct
  source 1..20: mol_type = other RNA
ccgacaaagccgagctgcct

SEQ ID NO: 15353 - RNA, 20 nt, synthetic construct
  source 1..20: mol_type = other RNA
agctcggctttgtcgggagt

SEQ ID NO: 15354 - RNA, 20 nt, synthetic construct
  source 1..20: mol_type = other RNA
tcggctttgtcgggagttgg

SEQ ID NO: 15355 - RNA, 20 nt, synthetic construct
  source 1..20: mol_type = other RNA
ggaggcattcgacttcctaa

SEQ ID NO: 15356 - RNA, 20 nt, synthetic construct
  source 1..20: mol_type = other RNA
tcacactttagttttccgtt

SEQ ID NO: 15357 - RNA, 20 nt, synthetic construct
  source 1..20: mol_type = other RNA
aaactaaagtgtgatatctg

SEQ ID NO: 15358 - RNA, 20 nt, synthetic construct
  source 1..20: mol_type = other RNA
aactaaagtgtgatatctgt

SEQ ID NO: 15359 - RNA, 20 nt, synthetic construct
  source 1..20: mol_type = other RNA
atctgtgggatcatttgcat

SEQ ID NO: 15360 - RNA, 20 nt, synthetic construct
  source 1..20: mol_type = other RNA
tctgtgggatcatttgcatc

SEQ ID NO: 15361 - RNA, 20 nt, synthetic construct
  source 1..20: mol_type = other RNA
catcgggcccaatgtgctca

SEQ ID NO: 15362 - RNA, 20 nt, synthetic construct
  source 1..20: mol_type = other RNA
ttgtgaaccatgagcacatt

SEQ ID NO: 15363 - RNA, 20 nt, synthetic construct
  source 1..20: mol_type = other RNA
tttgtgaaccatgagcacat

SEQ ID NO: 15364 - RNA, 20 nt, synthetic construct
  source 1..20: mol_type = other RNA
gttcacaaaagaagccacac

SEQ ID NO: 15365 - RNA, 20 nt, synthetic construct
  source 1..20: mol_type = other RNA
caaaagaagccacactggta

SEQ ID NO: 15366 - RNA, 20 nt, synthetic construct
  source 1..20: mol_type = other RNA
gaagccacactggtaaggcc

SEQ ID NO: 15367 - RNA, 20 nt, synthetic construct
  source 1..20: mol_type = other RNA
tgagccaggccttaccagtg

SEQ ID NO: 15368 - RNA, 20 nt, synthetic construct
  source 1..20: mol_type = other RNA
agctctcctctctccgtccc

SEQ ID NO: 15369 - RNA, 20 nt, synthetic construct
  source 1..20: mol_type = other RNA
tgggacggagagaggagagc

SEQ ID NO: 15370 - RNA, 20 nt, synthetic construct
  source 1..20: mol_type = other RNA
ctctctccgtcccaggagaa

SEQ ID NO: 15371 - RNA, 20 nt, synthetic construct
  source 1..20: mol_type = other RNA
cgttctcctgggacggagag

SEQ ID NO: 15372 - RNA, 20 nt, synthetic construct
  source 1..20: mol_type = other RNA
gaagggccgttctcctggga

SEQ ID NO: 15373 - RNA, 20 nt, synthetic construct
  source 1..20: mol_type = other RNA
actggaagggccgttctcct

SEQ ID NO: 15374 - RNA, 20 nt, synthetic construct
  source 1..20: mol_type = other RNA
cactggaagggccgttctcc

SEQ ID NO: 15375 - RNA, 20 nt, synthetic construct
  source 1..20: mol_type = other RNA
cccttccagtgcaatcagtg

SEQ ID NO: 15376 - RNA, 20 nt, synthetic construct
  source 1..20: mol_type = other RNA
ccttccagtgcaatcagtgc

SEQ ID NO: 15377 - RNA, 20 nt, synthetic construct
  source 1..20: mol_type = other RNA
cttccagtgcaatcagtgcg

SEQ ID NO: 15378 - RNA, 20 nt, synthetic construct
  source 1..20: mol_type = other RNA
ccgcactgattgcactggaa

SEQ ID NO: 15379 - RNA, 20 nt, synthetic construct
  source 1..20: mol_type = other RNA
cccgcactgattgcactgga

SEQ ID NO: 15380 - RNA, 20 nt, synthetic construct
  source 1..20: mol_type = other RNA
aggccccgcactgattgcac

SEQ ID NO: 15381 - RNA, 20 nt, synthetic construct
  source 1..20: mol_type = other RNA
cggggcctcattcacccaga

SEQ ID NO: 15382 - RNA, 20 nt, synthetic construct
  source 1..20: mol_type = other RNA
ggggcctcattcacccagaa

SEQ ID NO: 15383 - RNA, 20 nt, synthetic construct
  source 1..20: mol_type = other RNA
gttgcccttctgggtgaatg

SEQ ID NO: 15384 - RNA, 20 nt, synthetic construct
  source 1..20: mol_type = other RNA
cccagaagggcaacctgctc

SEQ ID NO: 15385 - RNA, 20 nt, synthetic construct
  source 1..20: mol_type = other RNA
ccggagcaggttgcccttct

SEQ ID NO: 15386 - RNA, 20 nt, synthetic construct
  source 1..20: mol_type = other RNA
gccggagcaggttgcccttc

SEQ ID NO: 15387 - RNA, 20 nt, synthetic construct
  source 1..20: mol_type = other RNA
gcagcttgatgtgccggagc

SEQ ID NO: 15388 - RNA, 20 nt, synthetic construct
  source 1..20: mol_type = other RNA
cggcacatcaagctgcattc

SEQ ID NO: 15389 - RNA, 20 nt, synthetic construct
  source 1..20: mol_type = other RNA
ggcacatcaagctgcattcc

SEQ ID NO: 15390 - RNA, 20 nt, synthetic construct
  source 1..20: mol_type = other RNA
gcacatcaagctgcattccg

SEQ ID NO: 15391 - RNA, 20 nt, synthetic construct
  source 1..20: mol_type = other RNA
cggaatgcagcttgatgtgc

SEQ ID NO: 15392 - RNA, 20 nt, synthetic construct
  source 1..20: mol_type = other RNA
gcatttgaagggcttctccc

SEQ ID NO: 15393 - RNA, 20 nt, synthetic construct
  source 1..20: mol_type = other RNA
ttgcagaggtggcatttgaa

SEQ ID NO: 15394 - RNA, 20 nt, synthetic construct
  source 1..20: mol_type = other RNA
gttgcagaggtggcatttga

SEQ ID NO: 15395 - RNA, 20 nt, synthetic construct
  source 1..20: mol_type = other RNA
tctgcaactacgcctgccgc

SEQ ID NO: 15396 - RNA, 20 nt, synthetic construct
  source 1..20: mol_type = other RNA
gcaactacgcctgccgccgg

SEQ ID NO: 15397 - RNA, 20 nt, synthetic construct
  source 1..20: mol_type = other RNA
caactacgcctgccgccgga

SEQ ID NO: 15398 - RNA, 20 nt, synthetic construct
  source 1..20: mol_type = other RNA
cgccggagggacgccctcac

SEQ ID NO: 15399 - RNA, 20 nt, synthetic construct
  source 1..20: mol_type = other RNA
cagtgagggcgtccctccgg

SEQ ID NO: 15400 - RNA, 20 nt, synthetic construct
  source 1..20: mol_type = other RNA
ggccagtgagggcgtccctc

SEQ ID NO: 15401 - RNA, 20 nt, synthetic construct
  source 1..20: mol_type = other RNA
acgccctcactggccacctg

SEQ ID NO: 15402 - RNA, 20 nt, synthetic construct
  source 1..20: mol_type = other RNA
cgtcctcaggtggccagtga

SEQ ID NO: 15403 - RNA, 20 nt, synthetic construct
  source 1..20: mol_type = other RNA
gcgtcctcaggtggccagtg

SEQ ID NO: 15404 - RNA, 20 nt, synthetic construct
  source 1..20: mol_type = other RNA
ggccacctgaggacgcactc

SEQ ID NO: 15405 - RNA, 20 nt, synthetic construct
  source 1..20: mol_type = other RNA
acctgaggacgcactccggt

SEQ ID NO: 15406 - RNA, 20 nt, synthetic construct
  source 1..20: mol_type = other RNA
taccggagtgcgtcctcagg

SEQ ID NO: 15407 - RNA, 20 nt, synthetic construct
  source 1..20: mol_type = other RNA
acctaccggagtgcgtcctc

SEQ ID NO: 15408 - RNA, 20 nt, synthetic construct
  source 1..20: mol_type = other RNA
acgcactccggtaggtcccc

SEQ ID NO: 15409 - RNA, 20 nt, synthetic construct
  source 1..20: mol_type = other RNA
taggtcccctggatgcagtc

SEQ ID NO: 15410 - RNA, 20 nt, synthetic construct
  source 1..20: mol_type = other RNA
aggtcccctggatgcagtcc

SEQ ID NO: 15411 - RNA, 20 nt, synthetic construct
  source 1..20: mol_type = other RNA
ggtcccctggatgcagtccg

SEQ ID NO: 15412 - RNA, 20 nt, synthetic construct
  source 1..20: mol_type = other RNA
tcaattgtgttttctgcagt

SEQ ID NO: 15413 - RNA, 20 nt, synthetic construct
  source 1..20: mol_type = other RNA
gttggtaaacctcacaaatg

SEQ ID NO: 15414 - RNA, 20 nt, synthetic construct
  source 1..20: mol_type = other RNA
cctcacaaatgtggatattg

SEQ ID NO: 15415 - RNA, 20 nt, synthetic construct
  source 1..20: mol_type = other RNA
ccacaatatccacatttgtg

SEQ ID NO: 15416 - RNA, 20 nt, synthetic construct
  source 1..20: mol_type = other RNA
agcttcgctgtttatagctt

SEQ ID NO: 15417 - RNA, 20 nt, synthetic construct
  source 1..20: mol_type = other RNA
taaacagcgaagctctttag

SEQ ID NO: 15418 - RNA, 20 nt, synthetic construct
  source 1..20: mol_type = other RNA
agagcgctgccacaactact

SEQ ID NO: 15419 - RNA, 20 nt, synthetic construct
  source 1..20: mol_type = other RNA
ccacaactacttggaaagca

SEQ ID NO: 15420 - RNA, 20 nt, synthetic construct
  source 1..20: mol_type = other RNA
cacaactacttggaaagcat

SEQ ID NO: 15421 - RNA, 20 nt, synthetic construct
  source 1..20: mol_type = other RNA
ccatgctttccaagtagttg

SEQ ID NO: 15422 - RNA, 20 nt, synthetic construct
  source 1..20: mol_type = other RNA
cttggaaagcatgggccttc

SEQ ID NO: 15423 - RNA, 20 nt, synthetic construct
  source 1..20: mol_type = other RNA
ttggaaagcatgggccttcc

SEQ ID NO: 15424 - RNA, 20 nt, synthetic construct
  source 1..20: mol_type = other RNA
cttccgggcacactgtaccc

SEQ ID NO: 15425 - RNA, 20 nt, synthetic construct
  source 1..20: mol_type = other RNA
ctgggtacagtgtgcccgga

SEQ ID NO: 15426 - RNA, 20 nt, synthetic construct
  source 1..20: mol_type = other RNA
ttacctgggtacagtgtgcc

SEQ ID NO: 15427 - RNA, 20 nt, synthetic construct
  source 1..20: mol_type = other RNA
cccaggtaagcgctgctgct

SEQ ID NO: 15428 - RNA, 20 nt, synthetic construct
  source 1..20: mol_type = other RNA
aggtaagcgctgctgctcgg

SEQ ID NO: 15429 - RNA, 20 nt, synthetic construct
  source 1..20: mol_type = other RNA
ccgagcagcagcgcttacct

SEQ ID NO: 15430 - RNA, 20 nt, synthetic construct
  source 1..20: mol_type = other RNA
tccgagcagcagcgcttacc

SEQ ID NO: 15431 - RNA, 20 nt, synthetic construct
  source 1..20: mol_type = other RNA
gactaaagtcaaagacagag

SEQ ID NO: 15432 - RNA, 20 nt, synthetic construct
  source 1..20: mol_type = other RNA
agaaactaatcacagtgaaa

SEQ ID NO: 15433 - RNA, 20 nt, synthetic construct
  source 1..20: mol_type = other RNA
gcagaagacctgtgcaagat

SEQ ID NO: 15434 - RNA, 20 nt, synthetic construct
  source 1..20: mol_type = other RNA
tctctgatcctatcttgcac

SEQ ID NO: 15435 - RNA, 20 nt, synthetic construct
  source 1..20: mol_type = other RNA
atcagagagatctctcgtgc

SEQ ID NO: 15436 - RNA, 20 nt, synthetic construct
  source 1..20: mol_type = other RNA
aggcatagagctcttacgtt

SEQ ID NO: 15437 - RNA, 20 nt, synthetic construct
  source 1..20: mol_type = other RNA
tctatgcctcagaaatttct

SEQ ID NO: 15438 - RNA, 20 nt, synthetic construct
  source 1..20: mol_type = other RNA
ctcttaccaagaaatttctg

SEQ ID NO: 15439 - RNA, 20 nt, synthetic construct
  source 1..20: mol_type = other RNA
cactgtcgcctgctttccac

SEQ ID NO: 15440 - RNA, 20 nt, synthetic construct
  source 1..20: mol_type = other RNA
actgtcgcctgctttccaca

SEQ ID NO: 15441 - RNA, 20 nt, synthetic construct
  source 1..20: mol_type = other RNA
ctgtcgcctgctttccacag

SEQ ID NO: 15442 - RNA, 20 nt, synthetic construct
  source 1..20: mol_type = other RNA
cctgctttccacaggggaca

SEQ ID NO: 15443 - RNA, 20 nt, synthetic construct
  source 1..20: mol_type = other RNA
ctgctttccacaggggacaa

SEQ ID NO: 15444 - RNA, 20 nt, synthetic construct
  source 1..20: mol_type = other RNA
ccttgtcccctgtggaaagc

SEQ ID NO: 15445 - RNA, 20 nt, synthetic construct
  source 1..20: mol_type = other RNA
ggacaggcccttgtcccctg

SEQ ID NO: 15446 - RNA, 20 nt, synthetic construct
  source 1..20: mol_type = other RNA
tgtcgtagggcgtgtcggac

SEQ ID NO: 15447 - RNA, 20 nt, synthetic construct
  source 1..20: mol_type = other RNA
gctgctgtcgtagggcgtgt

SEQ ID NO: 15448 - RNA, 20 nt, synthetic construct
  source 1..20: mol_type = other RNA
tagctggcgctgctgtcgta

SEQ ID NO: 15449 - RNA, 20 nt, synthetic construct
  source 1..20: mol_type = other RNA
gtagctggcgctgctgtcgt

SEQ ID NO: 15450 - RNA, 20 nt, synthetic construct
  source 1..20: mol_type = other RNA
cagcagcgccagctacgaga

SEQ ID NO: 15451 - RNA, 20 nt, synthetic construct
  source 1..20: mol_type = other RNA
ttcgttctccttctcgtagc

SEQ ID NO: 15452 - RNA, 20 nt, synthetic construct
  source 1..20: mol_type = other RNA
aatgatgaagtcccacgtga

SEQ ID NO: 15453 - RNA, 20 nt, synthetic construct
  source 1..20: mol_type = other RNA
gatggcttggtccatcacgt

SEQ ID NO: 15454 - RNA, 20 nt, synthetic construct
  source 1..20: mol_type = other RNA
tgatggcttggtccatcacg

SEQ ID NO: 15455 - RNA, 20 nt, synthetic construct
  source 1..20: mol_type = other RNA
tgatggcgttgttgatggct

SEQ ID NO: 15456 - RNA, 20 nt, synthetic construct
  source 1..20: mol_type = other RNA
caacaacgccatcaactacc

SEQ ID NO: 15457 - RNA, 20 nt, synthetic construct
  source 1..20: mol_type = other RNA
aacaacgccatcaactacct

SEQ ID NO: 15458 - RNA, 20 nt, synthetic construct
  source 1..20: mol_type = other RNA
acaacgccatcaactacctg

SEQ ID NO: 15459 - RNA, 20 nt, synthetic construct
  source 1..20: mol_type = other RNA
caacgccatcaactacctgg

SEQ ID NO: 15460 - RNA, 20 nt, synthetic construct
  source 1..20: mol_type = other RNA
ctcggcccccaggtagttga

SEQ ID NO: 15461 - RNA, 20 nt, synthetic construct
  source 1..20: mol_type = other RNA
ggcgcagggactcggccccc

SEQ ID NO: 15462 - RNA, 20 nt, synthetic construct
  source 1..20: mol_type = other RNA
ggccgagtccctgcgcccgc

SEQ ID NO: 15463 - RNA, 20 nt, synthetic construct
  source 1..20: mol_type = other RNA
caccagcgggcgcagggact

SEQ ID NO: 15464 - RNA, 20 nt, synthetic construct
  source 1..20: mol_type = other RNA
cgtctgcaccagcgggcgca

SEQ ID NO: 15465 - RNA, 20 nt, synthetic construct
  source 1..20: mol_type = other RNA
gcgtctgcaccagcgggcgc

SEQ ID NO: 15466 - RNA, 20 nt, synthetic construct
  source 1..20: mol_type = other RNA
cccgctggtgcagacgcccc

SEQ ID NO: 15467 - RNA, 20 nt, synthetic construct
  source 1..20: mol_type = other RNA
ccgctggtgcagacgccccc

SEQ ID NO: 15468 - RNA, 20 nt, synthetic construct
  source 1..20: mol_type = other RNA
ctggtgcagacgcccccggg

SEQ ID NO: 15469 - RNA, 20 nt, synthetic construct
  source 1..20: mol_type = other RNA
ccgggggcgtctgcaccagc

SEQ ID NO: 15470 - RNA, 20 nt, synthetic construct
  source 1..20: mol_type = other RNA
cccgggggcgtctgcaccag

SEQ ID NO: 15471 - RNA, 20 nt, synthetic construct
  source 1..20: mol_type = other RNA
gacgcccccgggcggttccg

SEQ ID NO: 15472 - RNA, 20 nt, synthetic construct
  source 1..20: mol_type = other RNA
gcccccgggcggttccgagg

SEQ ID NO: 15473 - RNA, 20 nt, synthetic construct
  source 1..20: mol_type = other RNA
gggcggttccgaggtggtcc

SEQ ID NO: 15474 - RNA, 20 nt, synthetic construct
  source 1..20: mol_type = other RNA
gaccacctcggaaccgcccg

SEQ ID NO: 15475 - RNA, 20 nt, synthetic construct
  source 1..20: mol_type = other RNA
ggaccacctcggaaccgccc

SEQ ID NO: 15476 - RNA, 20 nt, synthetic construct
  source 1..20: mol_type = other RNA
gggaccacctcggaaccgcc

SEQ ID NO: 15477 - RNA, 20 nt, synthetic construct
  source 1..20: mol_type = other RNA
gctgatgaccgggaccacct

SEQ ID NO: 15478 - RNA, 20 nt, synthetic construct
  source 1..20: mol_type = other RNA
ggtacatcgggctgatgacc

SEQ ID NO: 15479 - RNA, 20 nt, synthetic construct
  source 1..20: mol_type = other RNA
tggtacatcgggctgatgac

SEQ ID NO: 15480 - RNA, 20 nt, synthetic construct
  source 1..20: mol_type = other RNA
gcttgtgcagctggtacatc

SEQ ID NO: 15481 - RNA, 20 nt, synthetic construct
  source 1..20: mol_type = other RNA
ggcttgtgcagctggtacat

SEQ ID NO: 15482 - RNA, 20 nt, synthetic construct
  source 1..20: mol_type = other RNA
ccagctgcacaagccgctcg

SEQ ID NO: 15483 - RNA, 20 nt, synthetic construct
  source 1..20: mol_type = other RNA
gctgcacaagccgctcgcgg

SEQ ID NO: 15484 - RNA, 20 nt, synthetic construct
  source 1..20: mol_type = other RNA
ctgcacaagccgctcgcgga

SEQ ID NO: 15485 - RNA, 20 nt, synthetic construct
  source 1..20: mol_type = other RNA
ccgcgagcggcttgtgcagc

SEQ ID NO: 15486 - RNA, 20 nt, synthetic construct
  source 1..20: mol_type = other RNA
cgcggggtgccctccgcgag

SEQ ID NO: 15487 - RNA, 20 nt, synthetic construct
  source 1..20: mol_type = other RNA
caccccgcgctccaaccact

SEQ ID NO: 15488 - RNA, 20 nt, synthetic construct
  source 1..20: mol_type = other RNA
gcgctccaaccactcggccc

SEQ ID NO: 15489 - RNA, 20 nt, synthetic construct
  source 1..20: mol_type = other RNA
ggccgagtggttggagcgcg

SEQ ID NO: 15490 - RNA, 20 nt, synthetic construct
  source 1..20: mol_type = other RNA
gggccgagtggttggagcgc

SEQ ID NO: 15491 - RNA, 20 nt, synthetic construct
  source 1..20: mol_type = other RNA
tgggccgagtggttggagcg

SEQ ID NO: 15492 - RNA, 20 nt, synthetic construct
  source 1..20: mol_type = other RNA
gctgtcctgggccgagtggt

SEQ ID NO: 15493 - RNA, 20 nt, synthetic construct
  source 1..20: mol_type = other RNA
ctcggcccaggacagcgccg

SEQ ID NO: 15494 - RNA, 20 nt, synthetic construct
  source 1..20: mol_type = other RNA
cggcgctgtcctgggccgag

SEQ ID NO: 15495 - RNA, 20 nt, synthetic construct
  source 1..20: mol_type = other RNA
gttctccacggcgctgtcct

SEQ ID NO: 15496 - RNA, 20 nt, synthetic construct
  source 1..20: mol_type = other RNA
ggttctccacggcgctgtcc

SEQ ID NO: 15497 - RNA, 20 nt, synthetic construct
  source 1..20: mol_type = other RNA
gagcagcagcaggttctcca

SEQ ID NO: 15498 - RNA, 20 nt, synthetic construct
  source 1..20: mol_type = other RNA
gaacctgctgctgctctcca

SEQ ID NO: 15499 - RNA, 20 nt, synthetic construct
  source 1..20: mol_type = other RNA
tggccttggagagcagcagc

SEQ ID NO: 15500 - RNA, 20 nt, synthetic construct
  source 1..20: mol_type = other RNA
gctgctctccaaggccaagt

SEQ ID NO: 15501 - RNA, 20 nt, synthetic construct
  source 1..20: mol_type = other RNA
caaggccaagttggtgccct

SEQ ID NO: 15502 - RNA, 20 nt, synthetic construct
  source 1..20: mol_type = other RNA
cgagggcaccaacttggcct

SEQ ID NO: 15503 - RNA, 20 nt, synthetic construct
  source 1..20: mol_type = other RNA
gttggtgccctcggagcgcg

SEQ ID NO: 15504 - RNA, 20 nt, synthetic construct
  source 1..20: mol_type = other RNA
gcgctccgagggcaccaact

SEQ ID NO: 15505 - RNA, 20 nt, synthetic construct
  source 1..20: mol_type = other RNA
ggggacgcctcgcgctccga

SEQ ID NO: 15506 - RNA, 20 nt, synthetic construct
  source 1..20: mol_type = other RNA
cggggacgcctcgcgctccg

SEQ ID NO: 15507 - RNA, 20 nt, synthetic construct
  source 1..20: mol_type = other RNA
gtcttggcagctgttgctcg

SEQ ID NO: 15508 - RNA, 20 nt, synthetic construct
  source 1..20: mol_type = other RNA
agtcttggcagctgttgctc

SEQ ID NO: 15509 - RNA, 20 nt, synthetic construct
  source 1..20: mol_type = other RNA
caacagctgccaagactcca

SEQ ID NO: 15510 - RNA, 20 nt, synthetic construct
  source 1..20: mol_type = other RNA
tctcggtgtccgtggagtct

SEQ ID NO: 15511 - RNA, 20 nt, synthetic construct
  source 1..20: mol_type = other RNA
ggacaccgagagcaacaacg

SEQ ID NO: 15512 - RNA, 20 nt, synthetic construct
  source 1..20: mol_type = other RNA
gttgttgctctcggtgtccg

SEQ ID NO: 15513 - RNA, 20 nt, synthetic construct
  source 1..20: mol_type = other RNA
ctgctcctcgttgttgctct

SEQ ID NO: 15514 - RNA, 20 nt, synthetic construct
  source 1..20: mol_type = other RNA
aacaacgaggagcagcgcag

SEQ ID NO: 15515 - RNA, 20 nt, synthetic construct
  source 1..20: mol_type = other RNA
gcggggcgatgtggttggtc

SEQ ID NO: 15516 - RNA, 20 nt, synthetic construct
  source 1..20: mol_type = other RNA
cgcgtgcggggcgatgtggt

SEQ ID NO: 15517 - RNA, 20 nt, synthetic construct
  source 1..20: mol_type = other RNA
atcgccccgcacgcgcgcaa

SEQ ID NO: 15518 - RNA, 20 nt, synthetic construct
  source 1..20: mol_type = other RNA
tcgccccgcacgcgcgcaac

SEQ ID NO: 15519 - RNA, 20 nt, synthetic construct
  source 1..20: mol_type = other RNA
cagcccgttgcgcgcgtgcg

SEQ ID NO: 15520 - RNA, 20 nt, synthetic construct
  source 1..20: mol_type = other RNA
acagcccgttgcgcgcgtgc

SEQ ID NO: 15521 - RNA, 20 nt, synthetic construct
  source 1..20: mol_type = other RNA
gacagcccgttgcgcgcgtg

SEQ ID NO: 15522 - RNA, 20 nt, synthetic construct
  source 1..20: mol_type = other RNA
gcgcaacgggctgtcgctca

SEQ ID NO: 15523 - RNA, 20 nt, synthetic construct
  source 1..20: mol_type = other RNA
caacgggctgtcgctcaagg

SEQ ID NO: 15524 - RNA, 20 nt, synthetic construct
  source 1..20: mol_type = other RNA
cgcgcagcaggtcgtaggcg

SEQ ID NO: 15525 - RNA, 20 nt, synthetic construct
  source 1..20: mol_type = other RNA
ggcggcgcgcagcaggtcgt

SEQ ID NO: 15526 - RNA, 20 nt, synthetic construct
  source 1..20: mol_type = other RNA
tctcggaggcggcgcgcagc

SEQ ID NO: 15527 - RNA, 20 nt, synthetic construct
  source 1..20: mol_type = other RNA
cgccgcctccgagaactcgc

SEQ ID NO: 15528 - RNA, 20 nt, synthetic construct
  source 1..20: mol_type = other RNA
gtcctgcgagttctcggagg

SEQ ID NO: 15529 - RNA, 20 nt, synthetic construct
  source 1..20: mol_type = other RNA
cgcgtcctgcgagttctcgg

SEQ ID NO: 15530 - RNA, 20 nt, synthetic construct
  source 1..20: mol_type = other RNA
gagcgcgtcctgcgagttct

SEQ ID NO: 15531 - RNA, 20 nt, synthetic construct
  source 1..20: mol_type = other RNA
ctcgcaggacgcgctccgcg

SEQ ID NO: 15532 - RNA, 20 nt, synthetic construct
  source 1..20: mol_type = other RNA
ctccgcgtggtcagcaccag

SEQ ID NO: 15533 - RNA, 20 nt, synthetic construct
  source 1..20: mol_type = other RNA
tccgcgtggtcagcaccagc

SEQ ID NO: 15534 - RNA, 20 nt, synthetic construct
  source 1..20: mol_type = other RNA
ccgcgtggtcagcaccagcg

SEQ ID NO: 15535 - RNA, 20 nt, synthetic construct
  source 1..20: mol_type = other RNA
ccccgctggtgctgaccacg

SEQ ID NO: 15536 - RNA, 20 nt, synthetic construct
  source 1..20: mol_type = other RNA
caccagcggggagcagatga

SEQ ID NO: 15537 - RNA, 20 nt, synthetic construct
  source 1..20: mol_type = other RNA
caccttcatctgctccccgc

SEQ ID NO: 15538 - RNA, 20 nt, synthetic construct
  source 1..20: mol_type = other RNA
tgtacaagtgcgaacactgc

SEQ ID NO: 15539 - RNA, 20 nt, synthetic construct
  source 1..20: mol_type = other RNA
gtacaagtgcgaacactgcc

SEQ ID NO: 15540 - RNA, 20 nt, synthetic construct
  source 1..20: mol_type = other RNA
acactgccgggtgctcttcc

SEQ ID NO: 15541 - RNA, 20 nt, synthetic construct
  source 1..20: mol_type = other RNA
cgtgatccaggaagagcacc

SEQ ID NO: 15542 - RNA, 20 nt, synthetic construct
  source 1..20: mol_type = other RNA
tggtgtacatgacgtgatcc

SEQ ID NO: 15543 - RNA, 20 nt, synthetic construct
  source 1..20: mol_type = other RNA
cgtcatgtacaccatccaca

SEQ ID NO: 15544 - RNA, 20 nt, synthetic construct
  source 1..20: mol_type = other RNA
gtcatgtacaccatccacat

SEQ ID NO: 15545 - RNA, 20 nt, synthetic construct
  source 1..20: mol_type = other RNA
accatccacatgggctgcca

SEQ ID NO: 15546 - RNA, 20 nt, synthetic construct
  source 1..20: mol_type = other RNA
gccgtggcagcccatgtgga

SEQ ID NO: 15547 - RNA, 20 nt, synthetic construct
  source 1..20: mol_type = other RNA
ggaagccgtggcagcccatg

SEQ ID NO: 15548 - RNA, 20 nt, synthetic construct
  source 1..20: mol_type = other RNA
caaaaggatcacggaagccg

SEQ ID NO: 15549 - RNA, 20 nt, synthetic construct
  source 1..20: mol_type = other RNA
tgttgcactcaaaaggatca

SEQ ID NO: 15550 - RNA, 20 nt, synthetic construct
  source 1..20: mol_type = other RNA
ccttttgagtgcaacatgtg

SEQ ID NO: 15551 - RNA, 20 nt, synthetic construct
  source 1..20: mol_type = other RNA
ccgcacatgttgcactcaaa

SEQ ID NO: 15552 - RNA, 20 nt, synthetic construct
  source 1..20: mol_type = other RNA
catgtgcggctaccacagcc

SEQ ID NO: 15553 - RNA, 20 nt, synthetic construct
  source 1..20: mol_type = other RNA
gcggctaccacagccaggac

SEQ ID NO: 15554 - RNA, 20 nt, synthetic construct
  source 1..20: mol_type = other RNA
actcgtaccggtcctggctg

SEQ ID NO: 15555 - RNA, 20 nt, synthetic construct
  source 1..20: mol_type = other RNA
acgagaactcgtaccggtcc

SEQ ID NO: 15556 - RNA, 20 nt, synthetic construct
  source 1..20: mol_type = other RNA
tgtgcgacgagaactcgtac

SEQ ID NO: 15557 - RNA, 20 nt, synthetic construct
  source 1..20: mol_type = other RNA
ttctcgtcgcacataacgcg

SEQ ID NO: 15558 - RNA, 20 nt, synthetic construct
  source 1..20: mol_type = other RNA
tctcgtcgcacataacgcga

SEQ ID NO: 15559 - RNA, 20 nt, synthetic construct
  source 1..20: mol_type = other RNA
ctcgtcgcacataacgcgag

SEQ ID NO: 15560 - RNA, 20 nt, synthetic construct
  source 1..20: mol_type = other RNA
ggctttagctcatgtggaag

SEQ ID NO: 15561 - RNA, 20 nt, synthetic construct
  source 1..20: mol_type = other RNA
cgggagggctttagctcatg

SEQ ID NO: 15562 - RNA, 20 nt, synthetic construct
  source 1..20: mol_type = other RNA
tctggggtgggggcgcggga

SEQ ID NO: 15563 - RNA, 20 nt, synthetic construct
  source 1..20: mol_type = other RNA
gtctggggtgggggcgcggg

SEQ ID NO: 15564 - RNA, 20 nt, synthetic construct
  source 1..20: mol_type = other RNA
ggggtctggggtgggggcgc

SEQ ID NO: 15565 - RNA, 20 nt, synthetic construct
  source 1..20: mol_type = other RNA
cggggtctggggtgggggcg

SEQ ID NO: 15566 - RNA, 20 nt, synthetic construct
  source 1..20: mol_type = other RNA
tggctcggggtctggggtgg

SEQ ID NO: 15567 - RNA, 20 nt, synthetic construct
  source 1..20: mol_type = other RNA
gtggctcggggtctggggtg

SEQ ID NO: 15568 - RNA, 20 nt, synthetic construct
  source 1..20: mol_type = other RNA
cccagaccccgagccacccc

SEQ ID NO: 15569 - RNA, 20 nt, synthetic construct
  source 1..20: mol_type = other RNA
gggtggctcggggtctgggg

SEQ ID NO: 15570 - RNA, 20 nt, synthetic construct
  source 1..20: mol_type = other RNA
ctggggtggctcggggtctg

SEQ ID NO: 15571 - RNA, 20 nt, synthetic construct
  source 1..20: mol_type = other RNA
cctggggtggctcggggtct

SEQ ID NO: 15572 - RNA, 20 nt, synthetic construct
  source 1..20: mol_type = other RNA
tcctggggtggctcggggtc

SEQ ID NO: 15573 - RNA, 20 nt, synthetic construct
  source 1..20: mol_type = other RNA
gcttttcctggggtggctcg

SEQ ID NO: 15574 - RNA, 20 nt, synthetic construct
  source 1..20: mol_type = other RNA
gccaccccaggaaaagcaca

SEQ ID NO: 15575 - RNA, 20 nt, synthetic construct
  source 1..20: mol_type = other RNA
gtgcttttcctggggtggct

SEQ ID NO: 15576 - RNA, 20 nt, synthetic construct
  source 1..20: mol_type = other RNA
tccttgtgcttttcctgggg

SEQ ID NO: 15577 - RNA, 20 nt, synthetic construct
  source 1..20: mol_type = other RNA
cagtccttgtgcttttcctg

SEQ ID NO: 15578 - RNA, 20 nt, synthetic construct
  source 1..20: mol_type = other RNA
gcagtccttgtgcttttcct

SEQ ID NO: 15579 - RNA, 20 nt, synthetic construct
  source 1..20: mol_type = other RNA
ggcagtccttgtgcttttcc

SEQ ID NO: 15580 - RNA, 20 nt, synthetic construct
  source 1..20: mol_type = other RNA
tgctggcgggagcgagaagg

SEQ ID NO: 15581 - RNA, 20 nt, synthetic construct
  source 1..20: mol_type = other RNA
tgctgctggcgggagcgaga

SEQ ID NO: 15582 - RNA, 20 nt, synthetic construct
  source 1..20: mol_type = other RNA
ctcccgccagcagcatagac

SEQ ID NO: 15583 - RNA, 20 nt, synthetic construct
  source 1..20: mol_type = other RNA
gccagcagcatagactggac

SEQ ID NO: 15584 - RNA, 20 nt, synthetic construct
  source 1..20: mol_type = other RNA
gtccagtctatgctgctggc

SEQ ID NO: 15585 - RNA, 20 nt, synthetic construct
  source 1..20: mol_type = other RNA
agtccagtctatgctgctgg

SEQ ID NO: 15586 - RNA, 20 nt, synthetic construct
  source 1..20: mol_type = other RNA
tccagtccagtctatgctgc

SEQ ID NO: 15587 - RNA, 20 nt, synthetic construct
  source 1..20: mol_type = other RNA
ggaccagacaatgttgtgtt

SEQ ID NO: 15588 - RNA, 20 nt, synthetic construct
  source 1..20: mol_type = other RNA
aatccaaacacaacattgtc

SEQ ID NO: 15589 - RNA, 20 nt, synthetic construct
  source 1..20: mol_type = other RNA
tttttgttttttgtttgagt

SEQ ID NO: 15590 - RNA, 20 nt, synthetic construct
  source 1..20: mol_type = other RNA
ttttgtttgagttggttgat

SEQ ID NO: 15591 - RNA, 20 nt, synthetic construct
  source 1..20: mol_type = other RNA
tttgtttgagttggttgatt

SEQ ID NO: 15592 - RNA, 20 nt, synthetic construct
  source 1..20: mol_type = other RNA
ttgtttgagttggttgattg

SEQ ID NO: 15593 - RNA, 20 nt, synthetic construct
  source 1..20: mol_type = other RNA
gaaaagatttttatttttag

SEQ ID NO: 15594 - RNA, 20 nt, synthetic construct
  source 1..20: mol_type = other RNA
agatttttatttttagaggc

SEQ ID NO: 15595 - RNA, 20 nt, synthetic construct
  source 1..20: mol_type = other RNA
gatttttatttttagaggca

SEQ ID NO: 15596 - RNA, 20 nt, synthetic construct
  source 1..20: mol_type = other RNA
ttttagaggcagggctgcat

SEQ ID NO: 15597 - RNA, 20 nt, synthetic construct
  source 1..20: mol_type = other RNA
tttagaggcagggctgcatt

SEQ ID NO: 15598 - RNA, 20 nt, synthetic construct
  source 1..20: mol_type = other RNA
atctaggaaggtagcagttc

SEQ ID NO: 15599 - RNA, 20 nt, synthetic construct
  source 1..20: mol_type = other RNA
gtctggggaaacatctagga

SEQ ID NO: 15600 - RNA, 20 nt, synthetic construct
  source 1..20: mol_type = other RNA
tagatgtttccccagaccgc

SEQ ID NO: 15601 - RNA, 20 nt, synthetic construct
  source 1..20: mol_type = other RNA
agcggtctggggaaacatct

SEQ ID NO: 15602 - RNA, 20 nt, synthetic construct
  source 1..20: mol_type = other RNA
gaatctcagccagcggtctg

SEQ ID NO: 15603 - RNA, 20 nt, synthetic construct
  source 1..20: mol_type = other RNA
ggaatctcagccagcggtct

SEQ ID NO: 15604 - RNA, 20 nt, synthetic construct
  source 1..20: mol_type = other RNA
gggaatctcagccagcggtc

SEQ ID NO: 15605 - RNA, 20 nt, synthetic construct
  source 1..20: mol_type = other RNA
ggtgagggaatctcagccag

SEQ ID NO: 15606 - RNA, 20 nt, synthetic construct
  source 1..20: mol_type = other RNA
ttctaggaagcgacaggtga

SEQ ID NO: 15607 - RNA, 20 nt, synthetic construct
  source 1..20: mol_type = other RNA
attctaggaagcgacaggtg

SEQ ID NO: 15608 - RNA, 20 nt, synthetic construct
  source 1..20: mol_type = other RNA
aggggattctaggaagcgac

SEQ ID NO: 15609 - RNA, 20 nt, synthetic construct
  source 1..20: mol_type = other RNA
cgtttggagaaggggattct

SEQ ID NO: 15610 - RNA, 20 nt, synthetic construct
  source 1..20: mol_type = other RNA
agactaatcgtttggagaag

SEQ ID NO: 15611 - RNA, 20 nt, synthetic construct
  source 1..20: mol_type = other RNA
tagactaatcgtttggagaa

SEQ ID NO: 15612 - RNA, 20 nt, synthetic construct
  source 1..20: mol_type = other RNA
ttagactaatcgtttggaga

SEQ ID NO: 15613 - RNA, 20 nt, synthetic construct
  source 1..20: mol_type = other RNA
gaaaatttagactaatcgtt

SEQ ID NO: 15614 - RNA, 20 nt, synthetic construct
  source 1..20: mol_type = other RNA
agataaaacacgccacagcc

SEQ ID NO: 15615 - RNA, 20 nt, synthetic construct
  source 1..20: mol_type = other RNA
gataaaacacgccacagcct

SEQ ID NO: 15616 - RNA, 20 nt, synthetic construct
  source 1..20: mol_type = other RNA
aaacacgccacagcctggga

SEQ ID NO: 15617 - RNA, 20 nt, synthetic construct
  source 1..20: mol_type = other RNA
gcacgctccttcccaggctg

SEQ ID NO: 15618 - RNA, 20 nt, synthetic construct
  source 1..20: mol_type = other RNA
ggtagagcacgctccttccc

SEQ ID NO: 15619 - RNA, 20 nt, synthetic construct
  source 1..20: mol_type = other RNA
gctctaccctgtgctaagca

SEQ ID NO: 15620 - RNA, 20 nt, synthetic construct
  source 1..20: mol_type = other RNA
ctctaccctgtgctaagcac

SEQ ID NO: 15621 - RNA, 20 nt, synthetic construct
  source 1..20: mol_type = other RNA
tctaccctgtgctaagcacg

SEQ ID NO: 15622 - RNA, 20 nt, synthetic construct
  source 1..20: mol_type = other RNA
cgaaccccgtgcttagcaca

SEQ ID NO: 15623 - RNA, 20 nt, synthetic construct
  source 1..20: mol_type = other RNA
gcgaaccccgtgcttagcac

SEQ ID NO: 15624 - RNA, 20 nt, synthetic construct
  source 1..20: mol_type = other RNA
aagcacggggttcgcgcacc

SEQ ID NO: 15625 - RNA, 20 nt, synthetic construct
  source 1..20: mol_type = other RNA
ggggactggaaaaagacacc

SEQ ID NO: 15626 - RNA, 20 nt, synthetic construct
  source 1..20: mol_type = other RNA
tgctctctgcttctggggac

SEQ ID NO: 15627 - RNA, 20 nt, synthetic construct
  source 1..20: mol_type = other RNA
ggctgtgctctctgcttctg

SEQ ID NO: 15628 - RNA, 20 nt, synthetic construct
  source 1..20: mol_type = other RNA
gggctgtgctctctgcttct

SEQ ID NO: 15629 - RNA, 20 nt, synthetic construct
  source 1..20: mol_type = other RNA
ggggctgtgctctctgcttc

SEQ ID NO: 15630 - RNA, 20 nt, synthetic construct
  source 1..20: mol_type = other RNA
agagcacagcccctgctgtg

SEQ ID NO: 15631 - RNA, 20 nt, synthetic construct
  source 1..20: mol_type = other RNA
gagcacagcccctgctgtgt

SEQ ID NO: 15632 - RNA, 20 nt, synthetic construct
  source 1..20: mol_type = other RNA
cccctgctgtgtgggtctgc

SEQ ID NO: 15633 - RNA, 20 nt, synthetic construct
  source 1..20: mol_type = other RNA
cctgcagacccacacagcag

SEQ ID NO: 15634 - RNA, 20 nt, synthetic construct
  source 1..20: mol_type = other RNA
acctgcagacccacacagca

SEQ ID NO: 15635 - RNA, 20 nt, synthetic construct
  source 1..20: mol_type = other RNA
cacctgcagacccacacagc

SEQ ID NO: 15636 - RNA, 20 nt, synthetic construct
  source 1..20: mol_type = other RNA
gggtctgcaggtgagcagac

SEQ ID NO: 15637 - RNA, 20 nt, synthetic construct
  source 1..20: mol_type = other RNA
tgcaggtgagcagacaggac

SEQ ID NO: 15638 - RNA, 20 nt, synthetic construct
  source 1..20: mol_type = other RNA
gtgtcttggcacttgggtgg

SEQ ID NO: 15639 - RNA, 20 nt, synthetic construct
  source 1..20: mol_type = other RNA
cccaagtgccaagacacagc

SEQ ID NO: 15640 - RNA, 20 nt, synthetic construct
  source 1..20: mol_type = other RNA
ccaagtgccaagacacagca

SEQ ID NO: 15641 - RNA, 20 nt, synthetic construct
  source 1..20: mol_type = other RNA
gctgtgtcttggcacttggg

SEQ ID NO: 15642 - RNA, 20 nt, synthetic construct
  source 1..20: mol_type = other RNA
cctgctgtgtcttggcactt

SEQ ID NO: 15643 - RNA, 20 nt, synthetic construct
  source 1..20: mol_type = other RNA
ccctgctgtgtcttggcact

SEQ ID NO: 15644 - RNA, 20 nt, synthetic construct
  source 1..20: mol_type = other RNA
ttgttggccctgctgtgtct

SEQ ID NO: 15645 - RNA, 20 nt, synthetic construct
  source 1..20: mol_type = other RNA
agggccaacaacctgtgccc

SEQ ID NO: 15646 - RNA, 20 nt, synthetic construct
  source 1..20: mol_type = other RNA
ctggcctgggcacaggttgt

SEQ ID NO: 15647 - RNA, 20 nt, synthetic construct
  source 1..20: mol_type = other RNA
ctcgaagctggcctgggcac

SEQ ID NO: 15648 - RNA, 20 nt, synthetic construct
  source 1..20: mol_type = other RNA
atgtagctcgaagctggcct

SEQ ID NO: 15649 - RNA, 20 nt, synthetic construct
  source 1..20: mol_type = other RNA
catgtagctcgaagctggcc

SEQ ID NO: 15650 - RNA, 20 nt, synthetic construct
  source 1..20: mol_type = other RNA
gcttcgagctacatgcatct

SEQ ID NO: 15651 - RNA, 20 nt, synthetic construct
  source 1..20: mol_type = other RNA
cttcgagctacatgcatcta

SEQ ID NO: 15652 - RNA, 20 nt, synthetic construct
  source 1..20: mol_type = other RNA
agatgcatgtagctcgaagc

SEQ ID NO: 15653 - RNA, 20 nt, synthetic construct
  source 1..20: mol_type = other RNA
cgagctacatgcatctaggg

SEQ ID NO: 15654 - RNA, 20 nt, synthetic construct
  source 1..20: mol_type = other RNA
tacatgcatctagggcggag

SEQ ID NO: 15655 - RNA, 20 nt, synthetic construct
  source 1..20: mol_type = other RNA
tttcaagtcatattctgcgt

SEQ ID NO: 15656 - RNA, 20 nt, synthetic construct
  source 1..20: mol_type = other RNA
ttctgcgtaggaaaatgaat

SEQ ID NO: 15657 - RNA, 20 nt, synthetic construct
  source 1..20: mol_type = other RNA
gcgtaggaaaatgaattggt

SEQ ID NO: 15658 - RNA, 20 nt, synthetic construct
  source 1..20: mol_type = other RNA
cgtaggaaaatgaattggtt

SEQ ID NO: 15659 - RNA, 20 nt, synthetic construct
  source 1..20: mol_type = other RNA
gtaggaaaatgaattggttg

SEQ ID NO: 15660 - RNA, 20 nt, synthetic construct
  source 1..20: mol_type = other RNA
tcgtgtctgtcagactgccc

SEQ ID NO: 15661 - RNA, 20 nt, synthetic construct
  source 1..20: mol_type = other RNA
cgtgtctgtcagactgccct

SEQ ID NO: 15662 - RNA, 20 nt, synthetic construct
  source 1..20: mol_type = other RNA
gtctgtcagactgccctggg

SEQ ID NO: 15663 - RNA, 20 nt, synthetic construct
  source 1..20: mol_type = other RNA
tgtcagactgccctgggtgg

SEQ ID NO: 15664 - RNA, 20 nt, synthetic construct
  source 1..20: mol_type = other RNA
gtcagactgccctgggtgga

SEQ ID NO: 15665 - RNA, 20 nt, synthetic construct
  source 1..20: mol_type = other RNA
ccctgggtggagggagacgc

SEQ ID NO: 15666 - RNA, 20 nt, synthetic construct
  source 1..20: mol_type = other RNA
cctgggtggagggagacgcc

SEQ ID NO: 15667 - RNA, 20 nt, synthetic construct
  source 1..20: mol_type = other RNA
ccggcgtctccctccaccca

SEQ ID NO: 15668 - RNA, 20 nt, synthetic construct
  source 1..20: mol_type = other RNA
cccggcgtctccctccaccc

SEQ ID NO: 15669 - RNA, 20 nt, synthetic construct
  source 1..20: mol_type = other RNA
agacgccgggctagagcctt

SEQ ID NO: 15670 - RNA, 20 nt, synthetic construct
  source 1..20: mol_type = other RNA
gacgccgggctagagccttt

SEQ ID NO: 15671 - RNA, 20 nt, synthetic construct
  source 1..20: mol_type = other RNA
cgatcccaaaggctctagcc

SEQ ID NO: 15672 - RNA, 20 nt, synthetic construct
  source 1..20: mol_type = other RNA
tagagcctttgggatcgtcc

SEQ ID NO: 15673 - RNA, 20 nt, synthetic construct
  source 1..20: mol_type = other RNA
tgggatcgtcctggattcac

SEQ ID NO: 15674 - RNA, 20 nt, synthetic construct
  source 1..20: mol_type = other RNA
tgaatccaggacgatcccaa

SEQ ID NO: 15675 - RNA, 20 nt, synthetic construct
  source 1..20: mol_type = other RNA
tcctggattcactggctttg

SEQ ID NO: 15676 - RNA, 20 nt, synthetic construct
  source 1..20: mol_type = other RNA
tggattcactggctttgcgg

SEQ ID NO: 15677 - RNA, 20 nt, synthetic construct
  source 1..20: mol_type = other RNA
tccgcaaagccagtgaatcc

SEQ ID NO: 15678 - RNA, 20 nt, synthetic construct
  source 1..20: mol_type = other RNA
ctttgcggaggctgctcaga

SEQ ID NO: 15679 - RNA, 20 nt, synthetic construct
  source 1..20: mol_type = other RNA
cagatggcctgagcctcccg

SEQ ID NO: 15680 - RNA, 20 nt, synthetic construct
  source 1..20: mol_type = other RNA
cagcaagcctcgggaggctc

SEQ ID NO: 15681 - RNA, 20 nt, synthetic construct
  source 1..20: mol_type = other RNA
cccgaggcttgctgccccgt

SEQ ID NO: 15682 - RNA, 20 nt, synthetic construct
  source 1..20: mol_type = other RNA
acggggcagcaagcctcggg

SEQ ID NO: 15683 - RNA, 20 nt, synthetic construct
  source 1..20: mol_type = other RNA
gaggcttgctgccccgtagg

SEQ ID NO: 15684 - RNA, 20 nt, synthetic construct
  source 1..20: mol_type = other RNA
cctacggggcagcaagcctc

SEQ ID NO: 15685 - RNA, 20 nt, synthetic construct
  source 1..20: mol_type = other RNA
tcctacggggcagcaagcct

SEQ ID NO: 15686 - RNA, 20 nt, synthetic construct
  source 1..20: mol_type = other RNA
gaagacagtctcctcctacg

SEQ ID NO: 15687 - RNA, 20 nt, synthetic construct
  source 1..20: mol_type = other RNA
aggaggagactgtcttcccg

SEQ ID NO: 15688 - RNA, 20 nt, synthetic construct
  source 1..20: mol_type = other RNA
ggaggagactgtcttcccgt

SEQ ID NO: 15689 - RNA, 20 nt, synthetic construct
  source 1..20: mol_type = other RNA
tgtcttcccgtgggcatatc

SEQ ID NO: 15690 - RNA, 20 nt, synthetic construct
  source 1..20: mol_type = other RNA
gtcttcccgtgggcatatct

SEQ ID NO: 15691 - RNA, 20 nt, synthetic construct
  source 1..20: mol_type = other RNA
tcttcccgtgggcatatctg

SEQ ID NO: 15692 - RNA, 20 nt, synthetic construct
  source 1..20: mol_type = other RNA
ggctccccagatatgcccac

SEQ ID NO: 15693 - RNA, 20 nt, synthetic construct
  source 1..20: mol_type = other RNA
gggctccccagatatgccca

SEQ ID NO: 15694 - RNA, 20 nt, synthetic construct
  source 1..20: mol_type = other RNA
gagtgaaaaagcggggaaca

SEQ ID NO: 15695 - RNA, 20 nt, synthetic construct
  source 1..20: mol_type = other RNA
ggagtgaaaaagcggggaac

SEQ ID NO: 15696 - RNA, 20 nt, synthetic construct
  source 1..20: mol_type = other RNA
ggtatgggagtgaaaaagcg

SEQ ID NO: 15697 - RNA, 20 nt, synthetic construct
  source 1..20: mol_type = other RNA
aggtatgggagtgaaaaagc

SEQ ID NO: 15698 - RNA, 20 nt, synthetic construct
  source 1..20: mol_type = other RNA
aaggtatgggagtgaaaaag

SEQ ID NO: 15699 - RNA, 20 nt, synthetic construct
  source 1..20: mol_type = other RNA
tttcactcccatacctttaa

SEQ ID NO: 15700 - RNA, 20 nt, synthetic construct
  source 1..20: mol_type = other RNA
ttgggggccattaaaggtat

SEQ ID NO: 15701 - RNA, 20 nt, synthetic construct
  source 1..20: mol_type = other RNA
tttgggggccattaaaggta

SEQ ID NO: 15702 - RNA, 20 nt, synthetic construct
  source 1..20: mol_type = other RNA
cagattttgggggccattaa

SEQ ID NO: 15703 - RNA, 20 nt, synthetic construct
  source 1..20: mol_type = other RNA
attgtagtgacagattttgg

SEQ ID NO: 15704 - RNA, 20 nt, synthetic construct
  source 1..20: mol_type = other RNA
aattgtagtgacagattttg

SEQ ID NO: 15705 - RNA, 20 nt, synthetic construct
  source 1..20: mol_type = other RNA
aaattgtagtgacagatttt

SEQ ID NO: 15706 - RNA, 20 nt, synthetic construct
  source 1..20: mol_type = other RNA
taaattgtagtgacagattt

SEQ ID NO: 15707 - RNA, 20 nt, synthetic construct
  source 1..20: mol_type = other RNA
taaacaccagtcccgaaatt

SEQ ID NO: 15708 - RNA, 20 nt, synthetic construct
  source 1..20: mol_type = other RNA
gaagatccaaatttcgggac

SEQ ID NO: 15709 - RNA, 20 nt, synthetic construct
  source 1..20: mol_type = other RNA
agaaagaagatccaaatttc

SEQ ID NO: 15710 - RNA, 20 nt, synthetic construct
  source 1..20: mol_type = other RNA
aagaaagaagatccaaattt

SEQ ID NO: 15711 - RNA, 20 nt, synthetic construct
  source 1..20: mol_type = other RNA
ttctttttgaatctctcaaa

SEQ ID NO: 15712 - RNA, 20 nt, synthetic construct
  source 1..20: mol_type = other RNA
aaataaagctttggtttctg

SEQ ID NO: 15713 - RNA, 20 nt, synthetic construct
  source 1..20: mol_type = other RNA
agagatttgaaataaagctt

SEQ ID NO: 15714 - RNA, 20 nt, synthetic construct
  source 1..20: mol_type = other RNA
tttcaaatctcttccttccc

SEQ ID NO: 15715 - RNA, 20 nt, synthetic construct
  source 1..20: mol_type = other RNA
aaatctcttccttccctggc

SEQ ID NO: 15716 - RNA, 20 nt, synthetic construct
  source 1..20: mol_type = other RNA
tagatggaaccagccaggga

SEQ ID NO: 15717 - RNA, 20 nt, synthetic construct
  source 1..20: mol_type = other RNA
gtactagatggaaccagcca

SEQ ID NO: 15718 - RNA, 20 nt, synthetic construct
  source 1..20: mol_type = other RNA
ctggttccatctagtaccag

SEQ ID NO: 15719 - RNA, 20 nt, synthetic construct
  source 1..20: mol_type = other RNA
aagaggcctctggtactaga

SEQ ID NO: 15720 - RNA, 20 nt, synthetic construct
  source 1..20: mol_type = other RNA
tcttcaggaaaagaggcctc

SEQ ID NO: 15721 - RNA, 20 nt, synthetic construct
  source 1..20: mol_type = other RNA
ttggatttcttcaggaaaag

SEQ ID NO: 15722 - RNA, 20 nt, synthetic construct
  source 1..20: mol_type = other RNA
ggctaggattggatttcttc

SEQ ID NO: 15723 - RNA, 20 nt, synthetic construct
  source 1..20: mol_type = other RNA
attaaaatgagggctaggat

SEQ ID NO: 15724 - RNA, 20 nt, synthetic construct
  source 1..20: mol_type = other RNA
acataattaaaatgagggct

SEQ ID NO: 15725 - RNA, 20 nt, synthetic construct
  source 1..20: mol_type = other RNA
gatgtacataattaaaatga

SEQ ID NO: 15726 - RNA, 20 nt, synthetic construct
  source 1..20: mol_type = other RNA
agatgtacataattaaaatg

SEQ ID NO: 15727 - RNA, 20 nt, synthetic construct
  source 1..20: mol_type = other RNA
aagcctgaatttctcagtgt

SEQ ID NO: 15728 - RNA, 20 nt, synthetic construct
  source 1..20: mol_type = other RNA
cactgagaaattcaggcttg

SEQ ID NO: 15729 - RNA, 20 nt, synthetic construct
  source 1..20: mol_type = other RNA
ttaccaacactgagaaattc

SEQ ID NO: 15730 - RNA, 20 nt, synthetic construct
  source 1..20: mol_type = other RNA
gaataatatatagtgagggt

SEQ ID NO: 15731 - RNA, 20 nt, synthetic construct
  source 1..20: mol_type = other RNA
acgagaataatatatagtga

SEQ ID NO: 15732 - RNA, 20 nt, synthetic construct
  source 1..20: mol_type = other RNA
aacgagaataatatatagtg

SEQ ID NO: 15733 - RNA, 20 nt, synthetic construct
  source 1..20: mol_type = other RNA
tctcgttttaaaacccataa

SEQ ID NO: 15734 - RNA, 20 nt, synthetic construct
  source 1..20: mol_type = other RNA
gttctaaatcactcctttat

SEQ ID NO: 15735 - RNA, 20 nt, synthetic construct
  source 1..20: mol_type = other RNA
tgttctaaatcactccttta

SEQ ID NO: 15736 - RNA, 20 nt, synthetic construct
  source 1..20: mol_type = other RNA
gtgttagcaacagagatgct

SEQ ID NO: 15737 - RNA, 20 nt, synthetic construct
  source 1..20: mol_type = other RNA
tgtgttagcaacagagatgc

SEQ ID NO: 15738 - RNA, 20 nt, synthetic construct
  source 1..20: mol_type = other RNA
ttgaaagcttggtttcaaac

SEQ ID NO: 15739 - RNA, 20 nt, synthetic construct
  source 1..20: mol_type = other RNA
cttcaacatgtttgaaagct

SEQ ID NO: 15740 - RNA, 20 nt, synthetic construct
  source 1..20: mol_type = other RNA
gttgaagctctttactgtaa

SEQ ID NO: 15741 - RNA, 20 nt, synthetic construct
  source 1..20: mol_type = other RNA
atgtgtgtccacacatacat

SEQ ID NO: 15742 - RNA, 20 nt, synthetic construct
  source 1..20: mol_type = other RNA
gtgtccacacatacatagga

SEQ ID NO: 15743 - RNA, 20 nt, synthetic construct
  source 1..20: mol_type = other RNA
ccacacatacataggatggc

SEQ ID NO: 15744 - RNA, 20 nt, synthetic construct
  source 1..20: mol_type = other RNA
ccagccatcctatgtatgtg

SEQ ID NO: 15745 - RNA, 20 nt, synthetic construct
  source 1..20: mol_type = other RNA
atggctggctctgcacctgt

SEQ ID NO: 15746 - RNA, 20 nt, synthetic construct
  source 1..20: mol_type = other RNA
gctctgcacctgtaggatat

SEQ ID NO: 15747 - RNA, 20 nt, synthetic construct
  source 1..20: mol_type = other RNA
tgtaggatattggaatgcac

SEQ ID NO: 15748 - RNA, 20 nt, synthetic construct
  source 1..20: mol_type = other RNA
gtaggatattggaatgcaca

SEQ ID NO: 15749 - RNA, 20 nt, synthetic construct
  source 1..20: mol_type = other RNA
tgtgcattccaatatcctac

SEQ ID NO: 15750 - RNA, 20 nt, synthetic construct
  source 1..20: mol_type = other RNA
tggaatgcacagggcaattg

SEQ ID NO: 15751 - RNA, 20 nt, synthetic construct
  source 1..20: mol_type = other RNA
ggaatgcacagggcaattga

SEQ ID NO: 15752 - RNA, 20 nt, synthetic construct
  source 1..20: mol_type = other RNA
gagggactgagccagacctt

SEQ ID NO: 15753 - RNA, 20 nt, synthetic construct
  source 1..20: mol_type = other RNA
ggcattactctccgaaggtc

SEQ ID NO: 15754 - RNA, 20 nt, synthetic construct
  source 1..20: mol_type = other RNA
ctggtggcattactctccga

SEQ ID NO: 15755 - RNA, 20 nt, synthetic construct
  source 1..20: mol_type = other RNA
gtaatgccaccagatcccct

SEQ ID NO: 15756 - RNA, 20 nt, synthetic construct
  source 1..20: mol_type = other RNA
caccagatcccctaggaaag

SEQ ID NO: 15757 - RNA, 20 nt, synthetic construct
  source 1..20: mol_type = other RNA
cagatcccctaggaaagagg

SEQ ID NO: 15758 - RNA, 20 nt, synthetic construct
  source 1..20: mol_type = other RNA
ctctttcctaggggatctgg

SEQ ID NO: 15759 - RNA, 20 nt, synthetic construct
  source 1..20: mol_type = other RNA
ctcctctttcctaggggatc

SEQ ID NO: 15760 - RNA, 20 nt, synthetic construct
  source 1..20: mol_type = other RNA
cctaggaaagaggaggcaaa

SEQ ID NO: 15761 - RNA, 20 nt, synthetic construct
  source 1..20: mol_type = other RNA
atttgcctcctctttcctag

SEQ ID NO: 15762 - RNA, 20 nt, synthetic construct
  source 1..20: mol_type = other RNA
catttgcctcctctttccta

SEQ ID NO: 15763 - RNA, 20 nt, synthetic construct
  source 1..20: mol_type = other RNA
ccatttgcctcctctttcct

SEQ ID NO: 15764 - RNA, 20 nt, synthetic construct
  source 1..20: mol_type = other RNA
gaggaggcaaatggcactgc

SEQ ID NO: 15765 - RNA, 20 nt, synthetic construct
  source 1..20: mol_type = other RNA
cgcccatccgtgctatgaca

SEQ ID NO: 15766 - RNA, 20 nt, synthetic construct
  source 1..20: mol_type = other RNA
tgtcatagcacggatgggcg

SEQ ID NO: 15767 - RNA, 20 nt, synthetic construct
  source 1..20: mol_type = other RNA
ccatccgtgctatgacatgg

SEQ ID NO: 15768 - RNA, 20 nt, synthetic construct
  source 1..20: mol_type = other RNA
catgtcatagcacggatggg

SEQ ID NO: 15769 - RNA, 20 nt, synthetic construct
  source 1..20: mol_type = other RNA
ctccatgtcatagcacggat

SEQ ID NO: 15770 - RNA, 20 nt, synthetic construct
  source 1..20: mol_type = other RNA
cctccatgtcatagcacgga

SEQ ID NO: 15771 - RNA, 20 nt, synthetic construct
  source 1..20: mol_type = other RNA
agtgcctccatgtcatagca

SEQ ID NO: 15772 - RNA, 20 nt, synthetic construct
  source 1..20: mol_type = other RNA
catggaggcactgaagcccg

SEQ ID NO: 15773 - RNA, 20 nt, synthetic construct
  source 1..20: mol_type = other RNA
gaggcactgaagcccgagga

SEQ ID NO: 15774 - RNA, 20 nt, synthetic construct
  source 1..20: mol_type = other RNA
tgaagcccgaggaaggtgtg

SEQ ID NO: 15775 - RNA, 20 nt, synthetic construct
  source 1..20: mol_type = other RNA
aatctccacacaccttcctc

SEQ ID NO: 15776 - RNA, 20 nt, synthetic construct
  source 1..20: mol_type = other RNA
gaatctccacacaccttcct

SEQ ID NO: 15777 - RNA, 20 nt, synthetic construct
  source 1..20: mol_type = other RNA
gattctaatcccaacaagca

SEQ ID NO: 15778 - RNA, 20 nt, synthetic construct
  source 1..20: mol_type = other RNA
attctaatcccaacaagcaa

SEQ ID NO: 15779 - RNA, 20 nt, synthetic construct
  source 1..20: mol_type = other RNA
gaaggagacccttgcttgtt

SEQ ID NO: 15780 - RNA, 20 nt, synthetic construct
  source 1..20: mol_type = other RNA
tgaaggagacccttgcttgt

SEQ ID NO: 15781 - RNA, 20 nt, synthetic construct
  source 1..20: mol_type = other RNA
attgatagcattaatcttga

SEQ ID NO: 15782 - RNA, 20 nt, synthetic construct
  source 1..20: mol_type = other RNA
attaatgctatcaatcatta

SEQ ID NO: 15783 - RNA, 20 nt, synthetic construct
  source 1..20: mol_type = other RNA
gtcattactctcaaccacct

SEQ ID NO: 15784 - RNA, 20 nt, synthetic construct
  source 1..20: mol_type = other RNA
tatattcttcattgcctagg

SEQ ID NO: 15785 - RNA, 20 nt, synthetic construct
  source 1..20: mol_type = other RNA
tggtatattcttcattgcct

SEQ ID NO: 15786 - RNA, 20 nt, synthetic construct
  source 1..20: mol_type = other RNA
agtactgtaaatatttgaaa

SEQ ID NO: 15787 - RNA, 20 nt, synthetic construct
  source 1..20: mol_type = other RNA
tcttcaccaacactgtccca

SEQ ID NO: 15788 - RNA, 20 nt, synthetic construct
  source 1..20: mol_type = other RNA
atttcaccttgggacagtgt

SEQ ID NO: 15789 - RNA, 20 nt, synthetic construct
  source 1..20: mol_type = other RNA
ggtgaaatgaagcaacagag

SEQ ID NO: 15790 - RNA, 20 nt, synthetic construct
  source 1..20: mol_type = other RNA
tctgttgcttcatttcacct

SEQ ID NO: 15791 - RNA, 20 nt, synthetic construct
  source 1..20: mol_type = other RNA
cctcagcatttaatccaaac

SEQ ID NO: 15792 - RNA, 20 nt, synthetic construct
  source 1..20: mol_type = other RNA
ctcagcatttaatccaaaca

SEQ ID NO: 15793 - RNA, 20 nt, synthetic construct
  source 1..20: mol_type = other RNA
tcagcatttaatccaaacag

SEQ ID NO: 15794 - RNA, 20 nt, synthetic construct
  source 1..20: mol_type = other RNA
cctgtttggattaaatgctg

SEQ ID NO: 15795 - RNA, 20 nt, synthetic construct
  source 1..20: mol_type = other RNA
tgagactaagaacccctgtt

SEQ ID NO: 15796 - RNA, 20 nt, synthetic construct
  source 1..20: mol_type = other RNA
gtctcagcactatgacattt

SEQ ID NO: 15797 - RNA, 20 nt, synthetic construct
  source 1..20: mol_type = other RNA
tctcagcactatgacatttt

SEQ ID NO: 15798 - RNA, 20 nt, synthetic construct
  source 1..20: mol_type = other RNA
gggctgactacttatttgtt

SEQ ID NO: 15799 - RNA, 20 nt, synthetic construct
  source 1..20: mol_type = other RNA
ctgactacttatttgttagg

SEQ ID NO: 15800 - RNA, 20 nt, synthetic construct
  source 1..20: mol_type = other RNA
tgactacttatttgttaggc

SEQ ID NO: 15801 - RNA, 20 nt, synthetic construct
  source 1..20: mol_type = other RNA
ggagctctcctgtgcattgt

SEQ ID NO: 15802 - RNA, 20 nt, synthetic construct
  source 1..20: mol_type = other RNA
ctaattatcctacaatgcac

SEQ ID NO: 15803 - RNA, 20 nt, synthetic construct
  source 1..20: mol_type = other RNA
aggataattagcagtatccc

SEQ ID NO: 15804 - RNA, 20 nt, synthetic construct
  source 1..20: mol_type = other RNA
ataattagcagtatccctgg

SEQ ID NO: 15805 - RNA, 20 nt, synthetic construct
  source 1..20: mol_type = other RNA
cgtctattgggtagccacca

SEQ ID NO: 15806 - RNA, 20 nt, synthetic construct
  source 1..20: mol_type = other RNA
gcgtctattgggtagccacc

SEQ ID NO: 15807 - RNA, 20 nt, synthetic construct
  source 1..20: mol_type = other RNA
gggtgctactggcgtctatt

SEQ ID NO: 15808 - RNA, 20 nt, synthetic construct
  source 1..20: mol_type = other RNA
ggggtgctactggcgtctat

SEQ ID NO: 15809 - RNA, 20 nt, synthetic construct
  source 1..20: mol_type = other RNA
ttgtcaattcggggtgctac

SEQ ID NO: 15810 - RNA, 20 nt, synthetic construct
  source 1..20: mol_type = other RNA
gagtttgggttgtcaattcg

SEQ ID NO: 15811 - RNA, 20 nt, synthetic construct
  source 1..20: mol_type = other RNA
agagtttgggttgtcaattc

SEQ ID NO: 15812 - RNA, 20 nt, synthetic construct
  source 1..20: mol_type = other RNA
gagagtttgggttgtcaatt

SEQ ID NO: 15813 - RNA, 20 nt, synthetic construct
  source 1..20: mol_type = other RNA
tggtgatgtctggagagttt

SEQ ID NO: 15814 - RNA, 20 nt, synthetic construct
  source 1..20: mol_type = other RNA
ttggtgatgtctggagagtt

SEQ ID NO: 15815 - RNA, 20 nt, synthetic construct
  source 1..20: mol_type = other RNA
aggggacagttggtgatgtc

SEQ ID NO: 15816 - RNA, 20 nt, synthetic construct
  source 1..20: mol_type = other RNA
atcaccaactgtcccctgcg

SEQ ID NO: 15817 - RNA, 20 nt, synthetic construct
  source 1..20: mol_type = other RNA
ttctcctcgcaggggacagt

SEQ ID NO: 15818 - RNA, 20 nt, synthetic construct
  source 1..20: mol_type = other RNA
ctgcgaggagaaatcactcc

SEQ ID NO: 15819 - RNA, 20 nt, synthetic construct
  source 1..20: mol_type = other RNA
tgcgaggagaaatcactcct

SEQ ID NO: 15820 - RNA, 20 nt, synthetic construct
  source 1..20: mol_type = other RNA
gcgaggagaaatcactcctg

SEQ ID NO: 15821 - RNA, 20 nt, synthetic construct
  source 1..20: mol_type = other RNA
cgaggagaaatcactcctgg

SEQ ID NO: 15822 - RNA, 20 nt, synthetic construct
  source 1..20: mol_type = other RNA
caggagtgatttctcctcgc

SEQ ID NO: 15823 - RNA, 20 nt, synthetic construct
  source 1..20: mol_type = other RNA
tgggtcagtggttctccccc

SEQ ID NO: 15824 - RNA, 20 nt, synthetic construct
  source 1..20: mol_type = other RNA
ttagaattcatttgggtcag

SEQ ID NO: 15825 - RNA, 20 nt, synthetic construct
  source 1..20: mol_type = other RNA
gattggtttagaattcattt

SEQ ID NO: 15826 - RNA, 20 nt, synthetic construct
  source 1..20: mol_type = other RNA
tgattggtttagaattcatt

SEQ ID NO: 15827 - RNA, 20 nt, synthetic construct
  source 1..20: mol_type = other RNA
ttctaaaccaatcaaatgtc

SEQ ID NO: 15828 - RNA, 20 nt, synthetic construct
  source 1..20: mol_type = other RNA
tctaaaccaatcaaatgtct

SEQ ID NO: 15829 - RNA, 20 nt, synthetic construct
  source 1..20: mol_type = other RNA
gggcttcccagacatttgat

SEQ ID NO: 15830 - RNA, 20 nt, synthetic construct
  source 1..20: mol_type = other RNA
tttctattttttttcttgga

SEQ ID NO: 15831 - RNA, 20 nt, synthetic construct
  source 1..20: mol_type = other RNA
ttttctattttttttcttgg

SEQ ID NO: 15832 - RNA, 20 nt, synthetic construct
  source 1..20: mol_type = other RNA
tgcttttctattttttttct

SEQ ID NO: 15833 - RNA, 20 nt, synthetic construct
  source 1..20: mol_type = other RNA
aagaatattcccaatattcc

SEQ ID NO: 15834 - RNA, 20 nt, synthetic construct
  source 1..20: mol_type = other RNA
tactgctgaccgggaatatt

SEQ ID NO: 15835 - RNA, 20 nt, synthetic construct
  source 1..20: mol_type = other RNA
attcccggtcagcagtatca

SEQ ID NO: 15836 - RNA, 20 nt, synthetic construct
  source 1..20: mol_type = other RNA
cagccttgatactgctgacc

SEQ ID NO: 15837 - RNA, 20 nt, synthetic construct
  source 1..20: mol_type = other RNA
tcagccttgatactgctgac

SEQ ID NO: 15838 - RNA, 20 nt, synthetic construct
  source 1..20: mol_type = other RNA
aaggctgacttgtgttcatg

SEQ ID NO: 15839 - RNA, 20 nt, synthetic construct
  source 1..20: mol_type = other RNA
ataaatcaattattcccctt

SEQ ID NO: 15840 - RNA, 20 nt, synthetic construct
  source 1..20: mol_type = other RNA
atatatttttaagaccgaag

SEQ ID NO: 15841 - RNA, 20 nt, synthetic construct
  source 1..20: mol_type = other RNA
aatatatttttaagaccgaa

SEQ ID NO: 15842 - RNA, 20 nt, synthetic construct
  source 1..20: mol_type = other RNA
aaatatatttttaagaccga

SEQ ID NO: 15843 - RNA, 20 nt, synthetic construct
  source 1..20: mol_type = other RNA
acaaaactcaaatgtttatg

SEQ ID NO: 15844 - RNA, 20 nt, synthetic construct
  source 1..20: mol_type = other RNA
tttgagttttgttgaaaaga

SEQ ID NO: 15845 - RNA, 20 nt, synthetic construct
  source 1..20: mol_type = other RNA
aagataccattcttgagtca

SEQ ID NO: 15846 - RNA, 20 nt, synthetic construct
  source 1..20: mol_type = other RNA
agaaatccatgactcaagaa

SEQ ID NO: 15847 - RNA, 20 nt, synthetic construct
  source 1..20: mol_type = other RNA
tggatttctctgctcacaga

SEQ ID NO: 15848 - RNA, 20 nt, synthetic construct
  source 1..20: mol_type = other RNA
ggatttctctgctcacagaa

SEQ ID NO: 15849 - RNA, 20 nt, synthetic construct
  source 1..20: mol_type = other RNA
tctctgctcacagaagggtg

SEQ ID NO: 15850 - RNA, 20 nt, synthetic construct
  source 1..20: mol_type = other RNA
tcacagaagggtgtggcatt

SEQ ID NO: 15851 - RNA, 20 nt, synthetic construct
  source 1..20: mol_type = other RNA
aagggtgtggcatttggaaa

SEQ ID NO: 15852 - RNA, 20 nt, synthetic construct
  source 1..20: mol_type = other RNA
agggtgtggcatttggaaac

SEQ ID NO: 15853 - RNA, 20 nt, synthetic construct
  source 1..20: mol_type = other RNA
tgcaccaatgcactgagtga

SEQ ID NO: 15854 - RNA, 20 nt, synthetic construct
  source 1..20: mol_type = other RNA
tcttccttcactcagtgcat

SEQ ID NO: 15855 - RNA, 20 nt, synthetic construct
  source 1..20: mol_type = other RNA
gagtgaaggaagagagacag

SEQ ID NO: 15856 - RNA, 20 nt, synthetic construct
  source 1..20: mol_type = other RNA
ggaagagagacagaggatca

SEQ ID NO: 15857 - RNA, 20 nt, synthetic construct
  source 1..20: mol_type = other RNA
gaagagagacagaggatcaa

SEQ ID NO: 15858 - RNA, 20 nt, synthetic construct
  source 1..20: mol_type = other RNA
tctctgtgattgcatattga

SEQ ID NO: 15859 - RNA, 20 nt, synthetic construct
  source 1..20: mol_type = other RNA
tatccaagttaatatctcta

SEQ ID NO: 15860 - RNA, 20 nt, synthetic construct
  source 1..20: mol_type = other RNA
tagagatattaacttggata

SEQ ID NO: 15861 - RNA, 20 nt, synthetic construct
  source 1..20: mol_type = other RNA
tcaccttagagatattaact

SEQ ID NO: 15862 - RNA, 20 nt, synthetic construct
  source 1..20: mol_type = other RNA
gcaacaaactgactctaaga

SEQ ID NO: 15863 - RNA, 20 nt, synthetic construct
  source 1..20: mol_type = other RNA
tggatggaaaagaacagagt

SEQ ID NO: 15864 - RNA, 20 nt, synthetic construct
  source 1..20: mol_type = other RNA
atccatccccctgagtcagt

SEQ ID NO: 15865 - RNA, 20 nt, synthetic construct
  source 1..20: mol_type = other RNA
aactgactcagggggatgga

SEQ ID NO: 15866 - RNA, 20 nt, synthetic construct
  source 1..20: mol_type = other RNA
cccctgagtcagttggttga

SEQ ID NO: 15867 - RNA, 20 nt, synthetic construct
  source 1..20: mol_type = other RNA
ccctgagtcagttggttgaa

SEQ ID NO: 15868 - RNA, 20 nt, synthetic construct
  source 1..20: mol_type = other RNA
cttcaaccaactgactcagg

SEQ ID NO: 15869 - RNA, 20 nt, synthetic construct
  source 1..20: mol_type = other RNA
ccttcaaccaactgactcag

SEQ ID NO: 15870 - RNA, 20 nt, synthetic construct
  source 1..20: mol_type = other RNA
cccttcaaccaactgactca

SEQ ID NO: 15871 - RNA, 20 nt, synthetic construct
  source 1..20: mol_type = other RNA
tcccttcaaccaactgactc

SEQ ID NO: 15872 - RNA, 20 nt, synthetic construct
  source 1..20: mol_type = other RNA
aagggagttattttttcaag

SEQ ID NO: 15873 - RNA, 20 nt, synthetic construct
  source 1..20: mol_type = other RNA
gaactgtaaatagtgattgc

SEQ ID NO: 15874 - RNA, 20 nt, synthetic construct
  source 1..20: mol_type = other RNA
gcaatcactatttacagttc

SEQ ID NO: 15875 - RNA, 20 nt, synthetic construct
  source 1..20: mol_type = other RNA
taaaaggcagtgagaggaaa

SEQ ID NO: 15876 - RNA, 20 nt, synthetic construct
  source 1..20: mol_type = other RNA
ataaaaggcagtgagaggaa

SEQ ID NO: 15877 - RNA, 20 nt, synthetic construct
  source 1..20: mol_type = other RNA
tggctataaaaggcagtgag

SEQ ID NO: 15878 - RNA, 20 nt, synthetic construct
  source 1..20: mol_type = other RNA
acatttatattggctataaa

SEQ ID NO: 15879 - RNA, 20 nt, synthetic construct
  source 1..20: mol_type = other RNA
gtgcaaagagacatttatat

SEQ ID NO: 15880 - RNA, 20 nt, synthetic construct
  source 1..20: mol_type = other RNA
tctttgcacaccttttgttg

SEQ ID NO: 15881 - RNA, 20 nt, synthetic construct
  source 1..20: mol_type = other RNA
caatataaaaccacaacaaa

SEQ ID NO: 15882 - RNA, 20 nt, synthetic construct
  source 1..20: mol_type = other RNA
acaatagtttcaaagaaaaa

SEQ ID NO: 15883 - RNA, 20 nt, synthetic construct
  source 1..20: mol_type = other RNA
aaactattgtatttaaagta

SEQ ID NO: 15884 - RNA, 20 nt, synthetic construct
  source 1..20: mol_type = other RNA
gtaattaacttatgtttaaa

SEQ ID NO: 15885 - RNA, 20 nt, synthetic construct
  source 1..20: mol_type = other RNA
attaacttatgtttaaaagg

SEQ ID NO: 15886 - RNA, 20 nt, synthetic construct
  source 1..20: mol_type = other RNA
gcaacttttggtacatgata

SEQ ID NO: 15887 - RNA, 20 nt, synthetic construct
  source 1..20: mol_type = other RNA
agagaaacttcagcaacttt

SEQ ID NO: 15888 - RNA, 20 nt, synthetic construct
  source 1..20: mol_type = other RNA
gctgaagtttctcttctagc

SEQ ID NO: 15889 - RNA, 20 nt, synthetic construct
  source 1..20: mol_type = other RNA
tctcttctagctggtaaagt

SEQ ID NO: 15890 - RNA, 20 nt, synthetic construct
  source 1..20: mol_type = other RNA
tagtttcttctgttgtatga

SEQ ID NO: 15891 - RNA, 20 nt, synthetic construct
  source 1..20: mol_type = other RNA
gatggcgtgagtgtgtgtct

SEQ ID NO: 15892 - RNA, 20 nt, synthetic construct
  source 1..20: mol_type = other RNA
atggcgtgagtgtgtgtctt

SEQ ID NO: 15893 - RNA, 20 nt, synthetic construct
  source 1..20: mol_type = other RNA
aggcacacagtagtacacag

SEQ ID NO: 15894 - RNA, 20 nt, synthetic construct
  source 1..20: mol_type = other RNA
aacgagagtgcatggaatct

SEQ ID NO: 15895 - RNA, 20 nt, synthetic construct
  source 1..20: mol_type = other RNA
tcaaacacaacgagagtgca

SEQ ID NO: 15896 - RNA, 20 nt, synthetic construct
  source 1..20: mol_type = other RNA
gttgtgtttgaagtaaatat

SEQ ID NO: 15897 - RNA, 20 nt, synthetic construct
  source 1..20: mol_type = other RNA
ttgaagtaaatattggagac

SEQ ID NO: 15898 - RNA, 20 nt, synthetic construct
  source 1..20: mol_type = other RNA
aagtaaatattggagaccgg

SEQ ID NO: 15899 - RNA, 20 nt, synthetic construct
  source 1..20: mol_type = other RNA
agtaaatattggagaccgga

SEQ ID NO: 15900 - RNA, 20 nt, synthetic construct
  source 1..20: mol_type = other RNA
attggagaccggagggtaac

SEQ ID NO: 15901 - RNA, 20 nt, synthetic construct
  source 1..20: mol_type = other RNA
gagaccggagggtaacaggt

SEQ ID NO: 15902 - RNA, 20 nt, synthetic construct
  source 1..20: mol_type = other RNA
caggccaacctgttaccctc

SEQ ID NO: 15903 - RNA, 20 nt, synthetic construct
  source 1..20: mol_type = other RNA
gattactagctgtaatcaac

SEQ ID NO: 15904 - RNA, 20 nt, synthetic construct
  source 1..20: mol_type = other RNA
ctggggtgtcagggaggggg

SEQ ID NO: 15905 - RNA, 20 nt, synthetic construct
  source 1..20: mol_type = other RNA
aagctggggtgtcagggagg

SEQ ID NO: 15906 - RNA, 20 nt, synthetic construct
  source 1..20: mol_type = other RNA
ccctgacaccccagcttccc

SEQ ID NO: 15907 - RNA, 20 nt, synthetic construct
  source 1..20: mol_type = other RNA
ggaagctggggtgtcaggga

SEQ ID NO: 15908 - RNA, 20 nt, synthetic construct
  source 1..20: mol_type = other RNA
gggaagctggggtgtcaggg

SEQ ID NO: 15909 - RNA, 20 nt, synthetic construct
  source 1..20: mol_type = other RNA
cctgggaagctggggtgtca

SEQ ID NO: 15910 - RNA, 20 nt, synthetic construct
  source 1..20: mol_type = other RNA
caccccagcttcccaggatg

SEQ ID NO: 15911 - RNA, 20 nt, synthetic construct
  source 1..20: mol_type = other RNA
ttccacatcctgggaagctg

SEQ ID NO: 15912 - RNA, 20 nt, synthetic construct
  source 1..20: mol_type = other RNA
tttccacatcctgggaagct

SEQ ID NO: 15913 - RNA, 20 nt, synthetic construct
  source 1..20: mol_type = other RNA
ttcccaggatgtggaaagcc

SEQ ID NO: 15914 - RNA, 20 nt, synthetic construct
  source 1..20: mol_type = other RNA
atccaggctttccacatcct

SEQ ID NO: 15915 - RNA, 20 nt, synthetic construct
  source 1..20: mol_type = other RNA
gatccaggctttccacatcc

SEQ ID NO: 15916 - RNA, 20 nt, synthetic construct
  source 1..20: mol_type = other RNA
ggggcaaggagctgagatcc

SEQ ID NO: 15917 - RNA, 20 nt, synthetic construct
  source 1..20: mol_type = other RNA
tacagaagggatatggggca

SEQ ID NO: 15918 - RNA, 20 nt, synthetic construct
  source 1..20: mol_type = other RNA
caaattacagaagggatatg

SEQ ID NO: 15919 - RNA, 20 nt, synthetic construct
  source 1..20: mol_type = other RNA
acaaattacagaagggatat

SEQ ID NO: 15920 - RNA, 20 nt, synthetic construct
  source 1..20: mol_type = other RNA
tacaaattacagaagggata

SEQ ID NO: 15921 - RNA, 20 nt, synthetic construct
  source 1..20: mol_type = other RNA
tttaggtacaaattacagaa

SEQ ID NO: 15922 - RNA, 20 nt, synthetic construct
  source 1..20: mol_type = other RNA
ctttaggtacaaattacaga

SEQ ID NO: 15923 - RNA, 20 nt, synthetic construct
  source 1..20: mol_type = other RNA
ttaggataatcacactcttt

SEQ ID NO: 15924 - RNA, 20 nt, synthetic construct
  source 1..20: mol_type = other RNA
gttttagtgactcttgaatt

SEQ ID NO: 15925 - RNA, 20 nt, synthetic construct
  source 1..20: mol_type = other RNA
ttatcattgcatatcagcaa

SEQ ID NO: 15926 - RNA, 20 nt, synthetic construct
  source 1..20: mol_type = other RNA
tatcattgcatatcagcaaa

SEQ ID NO: 15927 - RNA, 20 nt, synthetic construct
  source 1..20: mol_type = other RNA
tatgtgaagcaattggtgct

SEQ ID NO: 15928 - RNA, 20 nt, synthetic construct
  source 1..20: mol_type = other RNA
atgctggtatgtgaagcaat

SEQ ID NO: 15929 - RNA, 20 nt, synthetic construct
  source 1..20: mol_type = other RNA
aaattggaaatggaacatgc

SEQ ID NO: 15930 - RNA, 20 nt, synthetic construct
  source 1..20: mol_type = other RNA
ggctaattctaaattggaaa

SEQ ID NO: 15931 - RNA, 20 nt, synthetic construct
  source 1..20: mol_type = other RNA
ttatgtggctaattctaaat

SEQ ID NO: 15932 - RNA, 20 nt, synthetic construct
  source 1..20: mol_type = other RNA
gattctaagattttattatg

SEQ ID NO: 15933 - RNA, 20 nt, synthetic construct
  source 1..20: mol_type = other RNA
tctcaggcagctctttctca

SEQ ID NO: 15934 - RNA, 20 nt, synthetic construct
  source 1..20: mol_type = other RNA
tgagatgtagttttgttata

SEQ ID NO: 15935 - RNA, 20 nt, synthetic construct
  source 1..20: mol_type = other RNA
atataacaaaactacatctc

SEQ ID NO: 15936 - RNA, 20 nt, synthetic construct
  source 1..20: mol_type = other RNA
aagcacaaaaatggtcggtg

SEQ ID NO: 15937 - RNA, 20 nt, synthetic construct
  source 1..20: mol_type = other RNA
aaagcacaaaaatggtcggt

SEQ ID NO: 15938 - RNA, 20 nt, synthetic construct
  source 1..20: mol_type = other RNA
aaaagcacaaaaatggtcgg

SEQ ID NO: 15939 - RNA, 20 nt, synthetic construct
  source 1..20: mol_type = other RNA
gaaaaaagcacaaaaatggt

SEQ ID NO: 15940 - RNA, 20 nt, synthetic construct
  source 1..20: mol_type = other RNA
acaagaaaaaagcacaaaaa

SEQ ID NO: 15941 - RNA, 20 nt, synthetic construct
  source 1..20: mol_type = other RNA
gcgtttgttttggcaagaag

SEQ ID NO: 15942 - RNA, 20 nt, synthetic construct
  source 1..20: mol_type = other RNA
aaaacaaacgcgagatgaac

SEQ ID NO: 15943 - RNA, 20 nt, synthetic construct
  source 1..20: mol_type = other RNA
agttcatctcgcgtttgttt

SEQ ID NO: 15944 - RNA, 20 nt, synthetic construct
  source 1..20: mol_type = other RNA
tgaagaaaggaaggatacac

SEQ ID NO: 15945 - RNA, 20 nt, synthetic construct
  source 1..20: mol_type = other RNA
tgctggaactgaagaaagga

SEQ ID NO: 15946 - RNA, 20 nt, synthetic construct
  source 1..20: mol_type = other RNA
ttattgctggaactgaagaa

SEQ ID NO: 15947 - RNA, 20 nt, synthetic construct
  source 1..20: mol_type = other RNA
tcagttccagcaataatgaa

SEQ ID NO: 15948 - RNA, 20 nt, synthetic construct
  source 1..20: mol_type = other RNA
agttgaccattcattattgc

SEQ ID NO: 15949 - RNA, 20 nt, synthetic construct
  source 1..20: mol_type = other RNA
ttaaataagtctaataattt

SEQ ID NO: 15950 - RNA, 20 nt, synthetic construct
  source 1..20: mol_type = other RNA
tagacttatttaagatgtac

SEQ ID NO: 15951 - RNA, 20 nt, synthetic construct
  source 1..20: mol_type = other RNA
aaagaagcacataatgcttt

SEQ ID NO: 15952 - RNA, 20 nt, synthetic construct
  source 1..20: mol_type = other RNA
acataatgcttttggtgcga

SEQ ID NO: 15953 - RNA, 20 nt, synthetic construct
  source 1..20: mol_type = other RNA
caatattgcatattaatatg

SEQ ID NO: 15954 - RNA, 20 nt, synthetic construct
  source 1..20: mol_type = other RNA
aaaactgtattagaaagtat

SEQ ID NO: 15955 - RNA, 20 nt, synthetic construct
  source 1..20: mol_type = other RNA
gttttttataatgttgtgtg

SEQ ID NO: 15956 - RNA, 20 nt, synthetic construct
  source 1..20: mol_type = other RNA
gttgtgtgtggtgattgttc

SEQ ID NO: 15957 - RNA, 20 nt, synthetic construct
  source 1..20: mol_type = other RNA
gttgtatccagtacagcttt

SEQ ID NO: 15958 - RNA, 20 nt, synthetic construct
  source 1..20: mol_type = other RNA
ctgaagacctaaagctgtac

SEQ ID NO: 15959 - RNA, 20 nt, synthetic construct
  source 1..20: mol_type = other RNA
taggtcttcagctgcccttc

SEQ ID NO: 15960 - RNA, 20 nt, synthetic construct
  source 1..20: mol_type = other RNA
cttctggcgagtacatgcac

SEQ ID NO: 15961 - RNA, 20 nt, synthetic construct
  source 1..20: mol_type = other RNA
tgtgcatgtactcgccagaa

SEQ ID NO: 15962 - RNA, 20 nt, synthetic construct
  source 1..20: mol_type = other RNA
ctgtgcatgtactcgccaga

SEQ ID NO: 15963 - RNA, 20 nt, synthetic construct
  source 1..20: mol_type = other RNA
acatcatcatagaggcagac

SEQ ID NO: 15964 - RNA, 20 nt, synthetic construct
  source 1..20: mol_type = other RNA
ataatttaacatcatcatag

SEQ ID NO: 15965 - RNA, 20 nt, synthetic construct
  source 1..20: mol_type = other RNA
ttgctgtttagctgtgaaca

SEQ ID NO: 15966 - RNA, 20 nt, synthetic construct
  source 1..20: mol_type = other RNA
tgctgtttagctgtgaacaa

SEQ ID NO: 15967 - RNA, 20 nt, synthetic construct
  source 1..20: mol_type = other RNA
gtgaacaagggatgtaccac

SEQ ID NO: 15968 - RNA, 20 nt, synthetic construct
  source 1..20: mol_type = other RNA
aacaagggatgtaccactgg

SEQ ID NO: 15969 - RNA, 20 nt, synthetic construct
  source 1..20: mol_type = other RNA
aggatactctattcctccag

SEQ ID NO: 15970 - RNA, 20 nt, synthetic construct
  source 1..20: mol_type = other RNA
catttcaaaatgtgtacaaa

SEQ ID NO: 15971 - RNA, 20 nt, synthetic construct
  source 1..20: mol_type = other RNA
ctatcccgtgaagtccacac

SEQ ID NO: 15972 - RNA, 20 nt, synthetic construct
  source 1..20: mol_type = other RNA
agtgtggacttcacgggata

SEQ ID NO: 15973 - RNA, 20 nt, synthetic construct
  source 1..20: mol_type = other RNA
cagtgtggacttcacgggat

SEQ ID NO: 15974 - RNA, 20 nt, synthetic construct
  source 1..20: mol_type = other RNA
tacgccagtgtggacttcac

SEQ ID NO: 15975 - RNA, 20 nt, synthetic construct
  source 1..20: mol_type = other RNA
ttacgccagtgtggacttca

SEQ ID NO: 15976 - RNA, 20 nt, synthetic construct
  source 1..20: mol_type = other RNA
gtccacactggcgtaagaga

SEQ ID NO: 15977 - RNA, 20 nt, synthetic construct
  source 1..20: mol_type = other RNA
ggccttctcttacgccagtg

SEQ ID NO: 15978 - RNA, 20 nt, synthetic construct
  source 1..20: mol_type = other RNA
aagagaaggcccagcagagc

SEQ ID NO: 15979 - RNA, 20 nt, synthetic construct
  source 1..20: mol_type = other RNA
aggcagattcctgctctgct

SEQ ID NO: 15980 - RNA, 20 nt, synthetic construct
  source 1..20: mol_type = other RNA
taggcagattcctgctctgc

SEQ ID NO: 15981 - RNA, 20 nt, synthetic construct
  source 1..20: mol_type = other RNA
atctcattgggagaaagtct

SEQ ID NO: 15982 - RNA, 20 nt, synthetic construct
  source 1..20: mol_type = other RNA
caatgagatcccaatatgag

SEQ ID NO: 15983 - RNA, 20 nt, synthetic construct
  source 1..20: mol_type = other RNA
aatgagatcccaatatgaga

SEQ ID NO: 15984 - RNA, 20 nt, synthetic construct
  source 1..20: mol_type = other RNA
tctcatattgggatctcatt

SEQ ID NO: 15985 - RNA, 20 nt, synthetic construct
  source 1..20: mol_type = other RNA
ctctcatattgggatctcat

SEQ ID NO: 15986 - RNA, 20 nt, synthetic construct
  source 1..20: mol_type = other RNA
aatatgagagggagaagaga

SEQ ID NO: 15987 - RNA, 20 nt, synthetic construct
  source 1..20: mol_type = other RNA
atatgagagggagaagagat

SEQ ID NO: 15988 - RNA, 20 nt, synthetic construct
  source 1..20: mol_type = other RNA
tctcttctccctctcatatt

SEQ ID NO: 15989 - RNA, 20 nt, synthetic construct
  source 1..20: mol_type = other RNA
atctcttctccctctcatat

SEQ ID NO: 15990 - RNA, 20 nt, synthetic construct
  source 1..20: mol_type = other RNA
agggagaagagatgggcctc

SEQ ID NO: 15991 - RNA, 20 nt, synthetic construct
  source 1..20: mol_type = other RNA
aggacagctgcaataccact

SEQ ID NO: 15992 - RNA, 20 nt, synthetic construct
  source 1..20: mol_type = other RNA
ggacagctgcaataccactt

SEQ ID NO: 15993 - RNA, 20 nt, synthetic construct
  source 1..20: mol_type = other RNA
ataccacttgggaacacatg

SEQ ID NO: 15994 - RNA, 20 nt, synthetic construct
  source 1..20: mol_type = other RNA
acaccacatgtgttcccaag

SEQ ID NO: 15995 - RNA, 20 nt, synthetic construct
  source 1..20: mol_type = other RNA
acacatgtggtgtcttgatg

SEQ ID NO: 15996 - RNA, 20 nt, synthetic construct
  source 1..20: mol_type = other RNA
gttgtgctgaactgctgcgc

SEQ ID NO: 15997 - RNA, 20 nt, synthetic construct
  source 1..20: mol_type = other RNA
cctcccatctacaacagtgc

SEQ ID NO: 15998 - RNA, 20 nt, synthetic construct
  source 1..20: mol_type = other RNA
ccagcactgttgtagatggg

SEQ ID NO: 15999 - RNA, 20 nt, synthetic construct
  source 1..20: mol_type = other RNA
atctacaacagtgctggacg

SEQ ID NO: 16000 - RNA, 20 nt, synthetic construct
  source 1..20: mol_type = other RNA
tctacaacagtgctggacgt

SEQ ID NO: 16001 - RNA, 20 nt, synthetic construct
  source 1..20: mol_type = other RNA
cgtccagcactgttgtagat

SEQ ID NO: 16002 - RNA, 20 nt, synthetic construct
  source 1..20: mol_type = other RNA
acgtccagcactgttgtaga

SEQ ID NO: 16003 - RNA, 20 nt, synthetic construct
  source 1..20: mol_type = other RNA
aattctaagtcccagtcttg

SEQ ID NO: 16004 - RNA, 20 nt, synthetic construct
  source 1..20: mol_type = other RNA
attctaagtcccagtcttga

SEQ ID NO: 16005 - RNA, 20 nt, synthetic construct
  source 1..20: mol_type = other RNA
ctaagtcccagtcttgaggg

SEQ ID NO: 16006 - RNA, 20 nt, synthetic construct
  source 1..20: mol_type = other RNA
taagtcccagtcttgagggt

SEQ ID NO: 16007 - RNA, 20 nt, synthetic construct
  source 1..20: mol_type = other RNA
gtcccagtcttgagggtggg

SEQ ID NO: 16008 - RNA, 20 nt, synthetic construct
  source 1..20: mol_type = other RNA
gtcttgagggtgggtggaga

SEQ ID NO: 16009 - RNA, 20 nt, synthetic construct
  source 1..20: mol_type = other RNA
ctccacccaccctcaagact

SEQ ID NO: 16010 - RNA, 20 nt, synthetic construct
  source 1..20: mol_type = other RNA
tctccacccaccctcaagac

SEQ ID NO: 16011 - RNA, 20 nt, synthetic construct
  source 1..20: mol_type = other RNA
ttgagggtgggtggagatgg

SEQ ID NO: 16012 - RNA, 20 nt, synthetic construct
  source 1..20: mol_type = other RNA
tgagggtgggtggagatgga

SEQ ID NO: 16013 - RNA, 20 nt, synthetic construct
  source 1..20: mol_type = other RNA
agcatgctgcagtggagaac

SEQ ID NO: 16014 - RNA, 20 nt, synthetic construct
  source 1..20: mol_type = other RNA
atgactgaagcatgctgcag

SEQ ID NO: 16015 - RNA, 20 nt, synthetic construct
  source 1..20: mol_type = other RNA
tgcttcagtcattctgtgag

SEQ ID NO: 16016 - RNA, 20 nt, synthetic construct
  source 1..20: mol_type = other RNA
tcagtcattctgtgagtggc

SEQ ID NO: 16017 - RNA, 20 nt, synthetic construct
  source 1..20: mol_type = other RNA
cagtcattctgtgagtggcc

SEQ ID NO: 16018 - RNA, 20 nt, synthetic construct
  source 1..20: mol_type = other RNA
ttctgtgagtggccgggccc

SEQ ID NO: 16019 - RNA, 20 nt, synthetic construct
  source 1..20: mol_type = other RNA
tctgtgagtggccgggccca

SEQ ID NO: 16020 - RNA, 20 nt, synthetic construct
  source 1..20: mol_type = other RNA
aattgtgagggccctgggcc

SEQ ID NO: 16021 - RNA, 20 nt, synthetic construct
  source 1..20: mol_type = other RNA
agtgaaattgtgagggccct

SEQ ID NO: 16022 - RNA, 20 nt, synthetic construct
  source 1..20: mol_type = other RNA
tagtgaaattgtgagggccc

SEQ ID NO: 16023 - RNA, 20 nt, synthetic construct
  source 1..20: mol_type = other RNA
acaaggtagtgaaattgtga

SEQ ID NO: 16024 - RNA, 20 nt, synthetic construct
  source 1..20: mol_type = other RNA
gacaaggtagtgaaattgtg

SEQ ID NO: 16025 - RNA, 20 nt, synthetic construct
  source 1..20: mol_type = other RNA
ttatgactatgtaaaagaca

SEQ ID NO: 16026 - RNA, 20 nt, synthetic construct
  source 1..20: mol_type = other RNA
agcgtcaaaaggctatgttg

SEQ ID NO: 16027 - RNA, 20 nt, synthetic construct
  source 1..20: mol_type = other RNA
tcaagatttacagcgtcaaa

SEQ ID NO: 16028 - RNA, 20 nt, synthetic construct
  source 1..20: mol_type = other RNA
tttacccttttctgatctcc

SEQ ID NO: 16029 - RNA, 20 nt, synthetic construct
  source 1..20: mol_type = other RNA
gtttccaggagatcagaaaa

SEQ ID NO: 16030 - RNA, 20 nt, synthetic construct
  source 1..20: mol_type = other RNA
tgtttccaggagatcagaaa

SEQ ID NO: 16031 - RNA, 20 nt, synthetic construct
  source 1..20: mol_type = other RNA
gcaggcaggcagctgtttcc

SEQ ID NO: 16032 - RNA, 20 nt, synthetic construct
  source 1..20: mol_type = other RNA
aagagaagtgcaatgcaggc

SEQ ID NO: 16033 - RNA, 20 nt, synthetic construct
  source 1..20: mol_type = other RNA
gcattgcacttctcttcccg

SEQ ID NO: 16034 - RNA, 20 nt, synthetic construct
  source 1..20: mol_type = other RNA
cgggaagagaagtgcaatgc

SEQ ID NO: 16035 - RNA, 20 nt, synthetic construct
  source 1..20: mol_type = other RNA
gcacttctcttcccgaggag

SEQ ID NO: 16036 - RNA, 20 nt, synthetic construct
  source 1..20: mol_type = other RNA
cacttctcttcccgaggagt

SEQ ID NO: 16037 - RNA, 20 nt, synthetic construct
  source 1..20: mol_type = other RNA
acttctcttcccgaggagtg

SEQ ID NO: 16038 - RNA, 20 nt, synthetic construct
  source 1..20: mol_type = other RNA
ttaaatttaccccactcctc

SEQ ID NO: 16039 - RNA, 20 nt, synthetic construct
  source 1..20: mol_type = other RNA
tttaaatttaccccactcct

SEQ ID NO: 16040 - RNA, 20 nt, synthetic construct
  source 1..20: mol_type = other RNA
ttaaaagtcaagttatagtt

SEQ ID NO: 16041 - RNA, 20 nt, synthetic construct
  source 1..20: mol_type = other RNA
ttagtatagaattttgaaat

SEQ ID NO: 16042 - RNA, 20 nt, synthetic construct
  source 1..20: mol_type = other RNA
tagtatagaattttgaaatt

SEQ ID NO: 16043 - RNA, 20 nt, synthetic construct
  source 1..20: mol_type = other RNA
gaaattgggaattaaaaatc

SEQ ID NO: 16044 - RNA, 20 nt, synthetic construct
  source 1..20: mol_type = other RNA
tgggaattaaaaatcaggac

SEQ ID NO: 16045 - RNA, 20 nt, synthetic construct
  source 1..20: mol_type = other RNA
gggaattaaaaatcaggact

SEQ ID NO: 16046 - RNA, 20 nt, synthetic construct
  source 1..20: mol_type = other RNA
ggaattaaaaatcaggactg

SEQ ID NO: 16047 - RNA, 20 nt, synthetic construct
  source 1..20: mol_type = other RNA
taaaaatcaggactggggac

SEQ ID NO: 16048 - RNA, 20 nt, synthetic construct
  source 1..20: mol_type = other RNA
aaaaatcaggactggggact

SEQ ID NO: 16049 - RNA, 20 nt, synthetic construct
  source 1..20: mol_type = other RNA
gaaatgggatcagaaatttt

SEQ ID NO: 16050 - RNA, 20 nt, synthetic construct
  source 1..20: mol_type = other RNA
atttctgatcccatttctga

SEQ ID NO: 16051 - RNA, 20 nt, synthetic construct
  source 1..20: mol_type = other RNA
gtgacacatccatcagaaat

SEQ ID NO: 16052 - RNA, 20 nt, synthetic construct
  source 1..20: mol_type = other RNA
tgtgacacatccatcagaaa

SEQ ID NO: 16053 - RNA, 20 nt, synthetic construct
  source 1..20: mol_type = other RNA
tctgtcaaaataaaatgtct

SEQ ID NO: 16054 - RNA, 20 nt, synthetic construct
  source 1..20: mol_type = other RNA
gtcaaaataaaatgtcttgg

SEQ ID NO: 16055 - RNA, 20 nt, synthetic construct
  source 1..20: mol_type = other RNA
tcttggaggttatgactcct

SEQ ID NO: 16056 - RNA, 20 nt, synthetic construct
  source 1..20: mol_type = other RNA
aatgtgagaaggtttcacca

SEQ ID NO: 16057 - DNA, 28 bp, synthetic construct
  source 1..28: mol_type = other DNA
tcttcccaccttgggctccaaactcagg

SEQ ID NO: 16058 - DNA, 28 bp, synthetic construct
  source 1..28: mol_type = other DNA
aggtgtgagtcactgcacccagccaagg

SEQ ID NO: 16059 - DNA, 28 bp, synthetic construct
  source 1..28: mol_type = other DNA
ctgtgaagagtcaggctccttggctggg

SEQ ID NO: 16060 - DNA, 28 bp, synthetic construct
  source 1..28: mol_type = other DNA
actgtgaagagtcaggctccttggctgg

SEQ ID NO: 16061 - DNA, 28 bp, synthetic construct
  source 1..28: mol_type = other DNA
gtgcactgtgaagagtcaggctccttgg

SEQ ID NO: 16062 - DNA, 28 bp, synthetic construct
  source 1..28: mol_type = other DNA
gatgaggagtgcactgtgaagagtcagg

SEQ ID NO: 16063 - DNA, 28 bp, synthetic construct
  source 1..28: mol_type = other DNA
cttcacagtgcactcctcatctcattgg

SEQ ID NO: 16064 - DNA, 28 bp, synthetic construct
  source 1..28: mol_type = other DNA
ttcacagtgcactcctcatctcattggg

SEQ ID NO: 16065 - DNA, 28 bp, synthetic construct
  source 1..28: mol_type = other DNA
tgcactcctcatctcattgggacattgg

SEQ ID NO: 16066 - DNA, 28 bp, synthetic construct
  source 1..28: mol_type = other DNA
ctcctcatctcattgggacattggttgg

SEQ ID NO: 16067 - DNA, 28 bp, synthetic construct
  source 1..28: mol_type = other DNA
tcctcatctcattgggacattggttggg

SEQ ID NO: 16068 - DNA, 28 bp, synthetic construct
  source 1..28: mol_type = other DNA
gcccaaccaatgtcccaatgagatgagg

SEQ ID NO: 16069 - DNA, 28 bp, synthetic construct
  source 1..28: mol_type = other DNA
tcattgggacattggttgggctagcagg

SEQ ID NO: 16070 - DNA, 28 bp, synthetic construct
  source 1..28: mol_type = other DNA
cattgggacattggttgggctagcaggg

SEQ ID NO: 16071 - DNA, 28 bp, synthetic construct
  source 1..28: mol_type = other DNA
ctagcagggaataactgttcttacttgg

SEQ ID NO: 16072 - DNA, 28 bp, synthetic construct
  source 1..28: mol_type = other DNA
tacttggaaagtactcctctctgtcagg

SEQ ID NO: 16073 - DNA, 28 bp, synthetic construct
  source 1..28: mol_type = other DNA
aaagtactcctctctgtcaggcatgtgg

SEQ ID NO: 16074 - DNA, 28 bp, synthetic construct
  source 1..28: mol_type = other DNA
actcctctctgtcaggcatgtggcaagg

SEQ ID NO: 16075 - DNA, 28 bp, synthetic construct
  source 1..28: mol_type = other DNA
agaccttgccacatgcctgacagagagg

SEQ ID NO: 16076 - DNA, 28 bp, synthetic construct
  source 1..28: mol_type = other DNA
gtttgtgggttaaggagatcacatatgg

SEQ ID NO: 16077 - DNA, 28 bp, synthetic construct
  source 1..28: mol_type = other DNA
tccttaacccacaaacaaccccaccagg

SEQ ID NO: 16078 - DNA, 28 bp, synthetic construct
  source 1..28: mol_type = other DNA
tcctggtggggttgtttgtgggttaagg

SEQ ID NO: 16079 - DNA, 28 bp, synthetic construct
  source 1..28: mol_type = other DNA
ttaacccacaaacaaccccaccaggagg

SEQ ID NO: 16080 - DNA, 28 bp, synthetic construct
  source 1..28: mol_type = other DNA
taacccacaaacaaccccaccaggaggg

SEQ ID NO: 16081 - DNA, 28 bp, synthetic construct
  source 1..28: mol_type = other DNA
taaccctcctggtggggttgtttgtggg

SEQ ID NO: 16082 - DNA, 28 bp, synthetic construct
  source 1..28: mol_type = other DNA
ataaccctcctggtggggttgtttgtgg

SEQ ID NO: 16083 - DNA, 28 bp, synthetic construct
  source 1..28: mol_type = other DNA
tggtgataatataaccctcctggtgggg

SEQ ID NO: 16084 - DNA, 28 bp, synthetic construct
  source 1..28: mol_type = other DNA
gtggtgataatataaccctcctggtggg

SEQ ID NO: 16085 - DNA, 28 bp, synthetic construct
  source 1..28: mol_type = other DNA
ggtggtgataatataaccctcctggtgg

SEQ ID NO: 16086 - DNA, 28 bp, synthetic construct
  source 1..28: mol_type = other DNA
attggtggtgataatataaccctcctgg

SEQ ID NO: 16087 - DNA, 28 bp, synthetic construct
  source 1..28: mol_type = other DNA
tatattatcaccaccaatttacagatgg

SEQ ID NO: 16088 - DNA, 28 bp, synthetic construct
  source 1..28: mol_type = other DNA
atattatcaccaccaatttacagatggg

SEQ ID NO: 16089 - DNA, 28 bp, synthetic construct
  source 1..28: mol_type = other DNA
tattatcaccaccaatttacagatgggg

SEQ ID NO: 16090 - DNA, 28 bp, synthetic construct
  source 1..28: mol_type = other DNA
ctgaatttccccatctgtaaattggtgg

SEQ ID NO: 16091 - DNA, 28 bp, synthetic construct
  source 1..28: mol_type = other DNA
caccaatttacagatggggaaattcagg

SEQ ID NO: 16092 - DNA, 28 bp, synthetic construct
  source 1..28: mol_type = other DNA
agcctgaatttccccatctgtaaattgg

SEQ ID NO: 16093 - DNA, 28 bp, synthetic construct
  source 1..28: mol_type = other DNA
gggaaattcaggctttgagagattaagg

SEQ ID NO: 16094 - DNA, 28 bp, synthetic construct
  source 1..28: mol_type = other DNA
tagtttgggcttatgaatctgactgagg

SEQ ID NO: 16095 - DNA, 28 bp, synthetic construct
  source 1..28: mol_type = other DNA
gtcagattcataagcccaaactatctgg

SEQ ID NO: 16096 - DNA, 28 bp, synthetic construct
  source 1..28: mol_type = other DNA
tcagattcataagcccaaactatctggg

SEQ ID NO: 16097 - DNA, 28 bp, synthetic construct
  source 1..28: mol_type = other DNA
gtggggctaagagcccagatagtttggg

SEQ ID NO: 16098 - DNA, 28 bp, synthetic construct
  source 1..28: mol_type = other DNA
tgtggggctaagagcccagatagtttgg

SEQ ID NO: 16099 - DNA, 28 bp, synthetic construct
  source 1..28: mol_type = other DNA
ttagccccacatgctcctgcctcagtgg

SEQ ID NO: 16100 - DNA, 28 bp, synthetic construct
  source 1..28: mol_type = other DNA
tagccccacatgctcctgcctcagtggg

SEQ ID NO: 16101 - DNA, 28 bp, synthetic construct
  source 1..28: mol_type = other DNA
tagcccactgaggcaggagcatgtgggg

SEQ ID NO: 16102 - DNA, 28 bp, synthetic construct
  source 1..28: mol_type = other DNA
gtagcccactgaggcaggagcatgtggg

SEQ ID NO: 16103 - DNA, 28 bp, synthetic construct
  source 1..28: mol_type = other DNA
tgtagcccactgaggcaggagcatgtgg

SEQ ID NO: 16104 - DNA, 28 bp, synthetic construct
  source 1..28: mol_type = other DNA
gctcctgcctcagtgggctacaccttgg

SEQ ID NO: 16105 - DNA, 28 bp, synthetic construct
  source 1..28: mol_type = other DNA
tcaccaaggtgtagcccactgaggcagg

SEQ ID NO: 16106 - DNA, 28 bp, synthetic construct
  source 1..28: mol_type = other DNA
catctcaccaaggtgtagcccactgagg

SEQ ID NO: 16107 - DNA, 28 bp, synthetic construct
  source 1..28: mol_type = other DNA
acaccttggtgagatgcctatgtttcgg

SEQ ID NO: 16108 - DNA, 28 bp, synthetic construct
  source 1..28: mol_type = other DNA
ggaccgaaacataggcatctcaccaagg

SEQ ID NO: 16109 - DNA, 28 bp, synthetic construct
  source 1..28: mol_type = other DNA
gtgagatgcctatgtttcggtccactgg

SEQ ID NO: 16110 - DNA, 28 bp, synthetic construct
  source 1..28: mol_type = other DNA
ggagtggaccagtggaccgaaacatagg

SEQ ID NO: 16111 - DNA, 28 bp, synthetic construct
  source 1..28: mol_type = other DNA
tccactggtccactcctgaagaccaagg

SEQ ID NO: 16112 - DNA, 28 bp, synthetic construct
  source 1..28: mol_type = other DNA
gccttggtcttcaggagtggaccagtgg

SEQ ID NO: 16113 - DNA, 28 bp, synthetic construct
  source 1..28: mol_type = other DNA
ggtccactcctgaagaccaaggcacagg

SEQ ID NO: 16114 - DNA, 28 bp, synthetic construct
  source 1..28: mol_type = other DNA
aaacctgtgccttggtcttcaggagtgg

SEQ ID NO: 16115 - DNA, 28 bp, synthetic construct
  source 1..28: mol_type = other DNA
tctctaaacctgtgccttggtcttcagg

SEQ ID NO: 16116 - DNA, 28 bp, synthetic construct
  source 1..28: mol_type = other DNA
ggtacgtctctctaaacctgtgccttgg

SEQ ID NO: 16117 - DNA, 28 bp, synthetic construct
  source 1..28: mol_type = other DNA
gcacaggtttagagagacgtaccagcgg

SEQ ID NO: 16118 - DNA, 28 bp, synthetic construct
  source 1..28: mol_type = other DNA
tttagagagacgtaccagcggctaaagg

SEQ ID NO: 16119 - DNA, 28 bp, synthetic construct
  source 1..28: mol_type = other DNA
tggatgcagaagtacctttagccgctgg

SEQ ID NO: 16120 - DNA, 28 bp, synthetic construct
  source 1..28: mol_type = other DNA
aggtacttctgcatccaagaactagagg

SEQ ID NO: 16121 - DNA, 28 bp, synthetic construct
  source 1..28: mol_type = other DNA
ggggacacgggacacctctagttcttgg

SEQ ID NO: 16122 - DNA, 28 bp, synthetic construct
  source 1..28: mol_type = other DNA
tcccgtgtcccctttacaacattgttgg

SEQ ID NO: 16123 - DNA, 28 bp, synthetic construct
  source 1..28: mol_type = other DNA
gccaacaatgttgtaaaggggacacggg

SEQ ID NO: 16124 - DNA, 28 bp, synthetic construct
  source 1..28: mol_type = other DNA
ggccaacaatgttgtaaaggggacacgg

SEQ ID NO: 16125 - DNA, 28 bp, synthetic construct
  source 1..28: mol_type = other DNA
gagggaggccaacaatgttgtaaagggg

SEQ ID NO: 16126 - DNA, 28 bp, synthetic construct
  source 1..28: mol_type = other DNA
agagggaggccaacaatgttgtaaaggg

SEQ ID NO: 16127 - DNA, 28 bp, synthetic construct
  source 1..28: mol_type = other DNA
cagagggaggccaacaatgttgtaaagg

SEQ ID NO: 16128 - DNA, 28 bp, synthetic construct
  source 1..28: mol_type = other DNA
ctttacaacattgttggcctccctctgg

SEQ ID NO: 16129 - DNA, 28 bp, synthetic construct
  source 1..28: mol_type = other DNA
tttacaacattgttggcctccctctggg

SEQ ID NO: 16130 - DNA, 28 bp, synthetic construct
  source 1..28: mol_type = other DNA
aacataaggtacaaggcccagagggagg

SEQ ID NO: 16131 - DNA, 28 bp, synthetic construct
  source 1..28: mol_type = other DNA
ataaacataaggtacaaggcccagaggg

SEQ ID NO: 16132 - DNA, 28 bp, synthetic construct
  source 1..28: mol_type = other DNA
aataaacataaggtacaaggcccagagg

SEQ ID NO: 16133 - DNA, 28 bp, synthetic construct
  source 1..28: mol_type = other DNA
aatgaggcaataaacataaggtacaagg

SEQ ID NO: 16134 - DNA, 28 bp, synthetic construct
  source 1..28: mol_type = other DNA
tggattaaatgaggcaataaacataagg

SEQ ID NO: 16135 - DNA, 28 bp, synthetic construct
  source 1..28: mol_type = other DNA
ttatgtttattgcctcatttaatccagg

SEQ ID NO: 16136 - DNA, 28 bp, synthetic construct
  source 1..28: mol_type = other DNA
tttattgcctcatttaatccaggtaagg

SEQ ID NO: 16137 - DNA, 28 bp, synthetic construct
  source 1..28: mol_type = other DNA
aaagactccttacctggattaaatgagg

SEQ ID NO: 16138 - DNA, 28 bp, synthetic construct
  source 1..28: mol_type = other DNA
catttaatccaggtaaggagtctttagg

SEQ ID NO: 16139 - DNA, 28 bp, synthetic construct
  source 1..28: mol_type = other DNA
aatccaggtaaggagtctttaggattgg

SEQ ID NO: 16140 - DNA, 28 bp, synthetic construct
  source 1..28: mol_type = other DNA
ccaggtaaggagtctttaggattggtgg

SEQ ID NO: 16141 - DNA, 28 bp, synthetic construct
  source 1..28: mol_type = other DNA
gtggcatgtattctttttatagacaagg

SEQ ID NO: 16142 - DNA, 28 bp, synthetic construct
  source 1..28: mol_type = other DNA
tttatagacaaggaagatgatgctcagg

SEQ ID NO: 16143 - DNA, 28 bp, synthetic construct
  source 1..28: mol_type = other DNA
acaaggaagatgatgctcaggagtttgg

SEQ ID NO: 16144 - DNA, 28 bp, synthetic construct
  source 1..28: mol_type = other DNA
ctcaggagtttggataacctgcccaagg

SEQ ID NO: 16145 - DNA, 28 bp, synthetic construct
  source 1..28: mol_type = other DNA
ggataacctgcccaaggtcacgcagtgg

SEQ ID NO: 16146 - DNA, 28 bp, synthetic construct
  source 1..28: mol_type = other DNA
taacctgcccaaggtcacgcagtggagg

SEQ ID NO: 16147 - DNA, 28 bp, synthetic construct
  source 1..28: mol_type = other DNA
tctcctccactgcgtgaccttgggcagg

SEQ ID NO: 16148 - DNA, 28 bp, synthetic construct
  source 1..28: mol_type = other DNA
tgcccaaggtcacgcagtggaggagagg

SEQ ID NO: 16149 - DNA, 28 bp, synthetic construct
  source 1..28: mol_type = other DNA
gtcctctcctccactgcgtgaccttggg

SEQ ID NO: 16150 - DNA, 28 bp, synthetic construct
  source 1..28: mol_type = other DNA
agtcctctcctccactgcgtgaccttgg

SEQ ID NO: 16151 - DNA, 28 bp, synthetic construct
  source 1..28: mol_type = other DNA
tcacgcagtggaggagaggactagaagg

SEQ ID NO: 16152 - DNA, 28 bp, synthetic construct
  source 1..28: mol_type = other DNA
aggagaggactagaaggtaaatcaatgg

SEQ ID NO: 16153 - DNA, 28 bp, synthetic construct
  source 1..28: mol_type = other DNA
gacctttcactaccttccccttctctgg

SEQ ID NO: 16154 - DNA, 28 bp, synthetic construct
  source 1..28: mol_type = other DNA
acctttcactaccttccccttctctggg

SEQ ID NO: 16155 - DNA, 28 bp, synthetic construct
  source 1..28: mol_type = other DNA
gcccagagaaggggaaggtagtgaaagg

SEQ ID NO: 16156 - DNA, 28 bp, synthetic construct
  source 1..28: mol_type = other DNA
cactgctacagcccagagaaggggaagg

SEQ ID NO: 16157 - DNA, 28 bp, synthetic construct
  source 1..28: mol_type = other DNA
aactcactgctacagcccagagaagggg

SEQ ID NO: 16158 - DNA, 28 bp, synthetic construct
  source 1..28: mol_type = other DNA
taactcactgctacagcccagagaaggg

SEQ ID NO: 16159 - DNA, 28 bp, synthetic construct
  source 1..28: mol_type = other DNA
ttaactcactgctacagcccagagaagg

SEQ ID NO: 16160 - DNA, 28 bp, synthetic construct
  source 1..28: mol_type = other DNA
ctctgggctgtagcagtgagttaactgg

SEQ ID NO: 16161 - DNA, 28 bp, synthetic construct
  source 1..28: mol_type = other DNA
agttaactggctcagacttgcccagcgg

SEQ ID NO: 16162 - DNA, 28 bp, synthetic construct
  source 1..28: mol_type = other DNA
agacttgcccagcggaatgcccttcagg

SEQ ID NO: 16163 - DNA, 28 bp, synthetic construct
  source 1..28: mol_type = other DNA
agtgtgtcctgaagggcattccgctggg

SEQ ID NO: 16164 - DNA, 28 bp, synthetic construct
  source 1..28: mol_type = other DNA
cagtgtgtcctgaagggcattccgctgg

SEQ ID NO: 16165 - DNA, 28 bp, synthetic construct
  source 1..28: mol_type = other DNA
actacagtactcagtgtgtcctgaaggg

SEQ ID NO: 16166 - DNA, 28 bp, synthetic construct
  source 1..28: mol_type = other DNA
tactacagtactcagtgtgtcctgaagg

SEQ ID NO: 16167 - DNA, 28 bp, synthetic construct
  source 1..28: mol_type = other DNA
tgtagtaagagctgcatatgcgctcagg

SEQ ID NO: 16168 - DNA, 28 bp, synthetic construct
  source 1..28: mol_type = other DNA
gtagtaagagctgcatatgcgctcaggg

SEQ ID NO: 16169 - DNA, 28 bp, synthetic construct
  source 1..28: mol_type = other DNA
gctgcatatgcgctcagggagaatgtgg

SEQ ID NO: 16170 - DNA, 28 bp, synthetic construct
  source 1..28: mol_type = other DNA
gtggatagacgctgtttgtgattcacgg

SEQ ID NO: 16171 - DNA, 28 bp, synthetic construct
  source 1..28: mol_type = other DNA
tggatagacgctgtttgtgattcacggg

SEQ ID NO: 16172 - DNA, 28 bp, synthetic construct
  source 1..28: mol_type = other DNA
gacgctgtttgtgattcacgggtaaagg

SEQ ID NO: 16173 - DNA, 28 bp, synthetic construct
  source 1..28: mol_type = other DNA
acgctgtttgtgattcacgggtaaaggg

SEQ ID NO: 16174 - DNA, 28 bp, synthetic construct
  source 1..28: mol_type = other DNA
tcacgggtaaagggccttctcccagagg

SEQ ID NO: 16175 - DNA, 28 bp, synthetic construct
  source 1..28: mol_type = other DNA
aagggccttctcccagaggcagcagagg

SEQ ID NO: 16176 - DNA, 28 bp, synthetic construct
  source 1..28: mol_type = other DNA
atctgcctctgctgcctctgggagaagg

SEQ ID NO: 16177 - DNA, 28 bp, synthetic construct
  source 1..28: mol_type = other DNA
gacaggatctgcctctgctgcctctggg

SEQ ID NO: 16178 - DNA, 28 bp, synthetic construct
  source 1..28: mol_type = other DNA
agacaggatctgcctctgctgcctctgg

SEQ ID NO: 16179 - DNA, 28 bp, synthetic construct
  source 1..28: mol_type = other DNA
aggcagcagaggcagatcctgtctctgg

SEQ ID NO: 16180 - DNA, 28 bp, synthetic construct
  source 1..28: mol_type = other DNA
ggcagatcctgtctctggtgtgccctgg

SEQ ID NO: 16181 - DNA, 28 bp, synthetic construct
  source 1..28: mol_type = other DNA
tcgggggccagggcacaccagagacagg

SEQ ID NO: 16182 - DNA, 28 bp, synthetic construct
  source 1..28: mol_type = other DNA
ctctggtgtgccctggcccccgacttgg

SEQ ID NO: 16183 - DNA, 28 bp, synthetic construct
  source 1..28: mol_type = other DNA
tggtgtgccctggcccccgacttggagg

SEQ ID NO: 16184 - DNA, 28 bp, synthetic construct
  source 1..28: mol_type = other DNA
caggaggcctccaagtcgggggccaggg

SEQ ID NO: 16185 - DNA, 28 bp, synthetic construct
  source 1..28: mol_type = other DNA
cctggcccccgacttggaggcctcctgg

SEQ ID NO: 16186 - DNA, 28 bp, synthetic construct
  source 1..28: mol_type = other DNA
ctggcccccgacttggaggcctcctggg

SEQ ID NO: 16187 - DNA, 28 bp, synthetic construct
  source 1..28: mol_type = other DNA
ctggcccaggaggcctccaagtcggggg

SEQ ID NO: 16188 - DNA, 28 bp, synthetic construct
  source 1..28: mol_type = other DNA
ccccgacttggaggcctcctgggccagg

SEQ ID NO: 16189 - DNA, 28 bp, synthetic construct
  source 1..28: mol_type = other DNA
gcctggcccaggaggcctccaagtcggg

SEQ ID NO: 16190 - DNA, 28 bp, synthetic construct
  source 1..28: mol_type = other DNA
ggcctggcccaggaggcctccaagtcgg

SEQ ID NO: 16191 - DNA, 28 bp, synthetic construct
  source 1..28: mol_type = other DNA
ggggaaggtcttggcctggcccaggagg

SEQ ID NO: 16192 - DNA, 28 bp, synthetic construct
  source 1..28: mol_type = other DNA
tcctgggccaggccaagaccttccccgg

SEQ ID NO: 16193 - DNA, 28 bp, synthetic construct
  source 1..28: mol_type = other DNA
gccggggaaggtcttggcctggcccagg

SEQ ID NO: 16194 - DNA, 28 bp, synthetic construct
  source 1..28: mol_type = other DNA
atcgctgccggggaaggtcttggcctgg

SEQ ID NO: 16195 - DNA, 28 bp, synthetic construct
  source 1..28: mol_type = other DNA
aggccaagaccttccccggcagcgatgg

SEQ ID NO: 16196 - DNA, 28 bp, synthetic construct
  source 1..28: mol_type = other DNA
agaccatcgctgccggggaaggtcttgg

SEQ ID NO: 16197 - DNA, 28 bp, synthetic construct
  source 1..28: mol_type = other DNA
ggctggagaccatcgctgccggggaagg

SEQ ID NO: 16198 - DNA, 28 bp, synthetic construct
  source 1..28: mol_type = other DNA
gtgtggctggagaccatcgctgccgggg

SEQ ID NO: 16199 - DNA, 28 bp, synthetic construct
  source 1..28: mol_type = other DNA
agtgtggctggagaccatcgctgccggg

SEQ ID NO: 16200 - DNA, 28 bp, synthetic construct
  source 1..28: mol_type = other DNA
gagtgtggctggagaccatcgctgccgg

SEQ ID NO: 16201 - DNA, 28 bp, synthetic construct
  source 1..28: mol_type = other DNA
ctccagccacactcaactgccctgaagg

SEQ ID NO: 16202 - DNA, 28 bp, synthetic construct
  source 1..28: mol_type = other DNA
tccagccacactcaactgccctgaaggg

SEQ ID NO: 16203 - DNA, 28 bp, synthetic construct
  source 1..28: mol_type = other DNA
tcccttcagggcagttgagtgtggctgg

SEQ ID NO: 16204 - DNA, 28 bp, synthetic construct
  source 1..28: mol_type = other DNA
aatgtcccttcagggcagttgagtgtgg

SEQ ID NO: 16205 - DNA, 28 bp, synthetic construct
  source 1..28: mol_type = other DNA
ggaataagcaggaaatgtcccttcaggg

SEQ ID NO: 16206 - DNA, 28 bp, synthetic construct
  source 1..28: mol_type = other DNA
gggaataagcaggaaatgtcccttcagg

SEQ ID NO: 16207 - DNA, 28 bp, synthetic construct
  source 1..28: mol_type = other DNA
gacatttcctgcttattcccttgcccgg

SEQ ID NO: 16208 - DNA, 28 bp, synthetic construct
  source 1..28: mol_type = other DNA
gacacagccgggcaagggaataagcagg

SEQ ID NO: 16209 - DNA, 28 bp, synthetic construct
  source 1..28: mol_type = other DNA
cccttgcccggctgtgtcctccacccgg

SEQ ID NO: 16210 - DNA, 28 bp, synthetic construct
  source 1..28: mol_type = other DNA
tccgggtggaggacacagccgggcaagg

SEQ ID NO: 16211 - DNA, 28 bp, synthetic construct
  source 1..28: mol_type = other DNA
tgcccggctgtgtcctccacccggaagg

SEQ ID NO: 16212 - DNA, 28 bp, synthetic construct
  source 1..28: mol_type = other DNA
ggccttccgggtggaggacacagccggg

SEQ ID NO: 16213 - DNA, 28 bp, synthetic construct
  source 1..28: mol_type = other DNA
aggccttccgggtggaggacacagccgg

SEQ ID NO: 16214 - DNA, 28 bp, synthetic construct
  source 1..28: mol_type = other DNA
aagaaggcacaggccttccgggtggagg

SEQ ID NO: 16215 - DNA, 28 bp, synthetic construct
  source 1..28: mol_type = other DNA
gcgaagaaggcacaggccttccgggtgg

SEQ ID NO: 16216 - DNA, 28 bp, synthetic construct
  source 1..28: mol_type = other DNA
caggcgaagaaggcacaggccttccggg

SEQ ID NO: 16217 - DNA, 28 bp, synthetic construct
  source 1..28: mol_type = other DNA
gcaggcgaagaaggcacaggccttccgg

SEQ ID NO: 16218 - DNA, 28 bp, synthetic construct
  source 1..28: mol_type = other DNA
taggacatgcaggcgaagaaggcacagg

SEQ ID NO: 16219 - DNA, 28 bp, synthetic construct
  source 1..28: mol_type = other DNA
tcagggtaggacatgcaggcgaagaagg

SEQ ID NO: 16220 - DNA, 28 bp, synthetic construct
  source 1..28: mol_type = other DNA
ttcttcgcctgcatgtcctaccctgagg

SEQ ID NO: 16221 - DNA, 28 bp, synthetic construct
  source 1..28: mol_type = other DNA
ttcgcctgcatgtcctaccctgaggagg

SEQ ID NO: 16222 - DNA, 28 bp, synthetic construct
  source 1..28: mol_type = other DNA
ggagcctcctcagggtaggacatgcagg

SEQ ID NO: 16223 - DNA, 28 bp, synthetic construct
  source 1..28: mol_type = other DNA
atgtcctaccctgaggaggctcccttgg

SEQ ID NO: 16224 - DNA, 28 bp, synthetic construct
  source 1..28: mol_type = other DNA
aagaccaagggagcctcctcagggtagg

SEQ ID NO: 16225 - DNA, 28 bp, synthetic construct
  source 1..28: mol_type = other DNA
atgaaagaccaagggagcctcctcaggg

SEQ ID NO: 16226 - DNA, 28 bp, synthetic construct
  source 1..28: mol_type = other DNA
gatgaaagaccaagggagcctcctcagg

SEQ ID NO: 16227 - DNA, 28 bp, synthetic construct
  source 1..28: mol_type = other DNA
catagggagagcgatgaaagaccaaggg

SEQ ID NO: 16228 - DNA, 28 bp, synthetic construct
  source 1..28: mol_type = other DNA
ccttggtctttcatcgctctccctatgg

SEQ ID NO: 16229 - DNA, 28 bp, synthetic construct
  source 1..28: mol_type = other DNA
cttggtctttcatcgctctccctatggg

SEQ ID NO: 16230 - DNA, 28 bp, synthetic construct
  source 1..28: mol_type = other DNA
gttcgggaaggcgtgaagacccataggg

SEQ ID NO: 16231 - DNA, 28 bp, synthetic construct
  source 1..28: mol_type = other DNA
ggttcgggaaggcgtgaagacccatagg

SEQ ID NO: 16232 - DNA, 28 bp, synthetic construct
  source 1..28: mol_type = other DNA
ccttcccgaaccaccgcgcccaagcagg

SEQ ID NO: 16233 - DNA, 28 bp, synthetic construct
  source 1..28: mol_type = other DNA
tgctcctgcttgggcgcggtggttcggg

SEQ ID NO: 16234 - DNA, 28 bp, synthetic construct
  source 1..28: mol_type = other DNA
gtgctcctgcttgggcgcggtggttcgg

SEQ ID NO: 16235 - DNA, 28 bp, synthetic construct
  source 1..28: mol_type = other DNA
agaacgtgctcctgcttgggcgcggtgg

SEQ ID NO: 16236 - DNA, 28 bp, synthetic construct
  source 1..28: mol_type = other DNA
ccgcgcccaagcaggagcacgttctcgg

SEQ ID NO: 16237 - DNA, 28 bp, synthetic construct
  source 1..28: mol_type = other DNA
gagggccgagaacgtgctcctgcttggg

SEQ ID NO: 16238 - DNA, 28 bp, synthetic construct
  source 1..28: mol_type = other DNA
agagggccgagaacgtgctcctgcttgg

SEQ ID NO: 16239 - DNA, 28 bp, synthetic construct
  source 1..28: mol_type = other DNA
ggagcacgttctcggccctcttcacagg

SEQ ID NO: 16240 - DNA, 28 bp, synthetic construct
  source 1..28: mol_type = other DNA
gagcacgttctcggccctcttcacaggg

SEQ ID NO: 16241 - DNA, 28 bp, synthetic construct
  source 1..28: mol_type = other DNA
tgtgaggaggagcgccctgtgaagaggg

SEQ ID NO: 16242 - DNA, 28 bp, synthetic construct
  source 1..28: mol_type = other DNA
ctgtgaggaggagcgccctgtgaagagg

SEQ ID NO: 16243 - DNA, 28 bp, synthetic construct
  source 1..28: mol_type = other DNA
ctcttcacagggcgctcctcctcacagg

SEQ ID NO: 16244 - DNA, 28 bp, synthetic construct
  source 1..28: mol_type = other DNA
tcttcacagggcgctcctcctcacaggg

SEQ ID NO: 16245 - DNA, 28 bp, synthetic construct
  source 1..28: mol_type = other DNA
cttcacagggcgctcctcctcacagggg

SEQ ID NO: 16246 - DNA, 28 bp, synthetic construct
  source 1..28: mol_type = other DNA
gggcgctcctcctcacaggggtgcccgg

SEQ ID NO: 16247 - DNA, 28 bp, synthetic construct
  source 1..28: mol_type = other DNA
ggcgctcctcctcacaggggtgcccggg

SEQ ID NO: 16248 - DNA, 28 bp, synthetic construct
  source 1..28: mol_type = other DNA
aaaaatcccgggcacccctgtgaggagg

SEQ ID NO: 16249 - DNA, 28 bp, synthetic construct
  source 1..28: mol_type = other DNA
aataaaaatcccgggcacccctgtgagg

SEQ ID NO: 16250 - DNA, 28 bp, synthetic construct
  source 1..28: mol_type = other DNA
caggaaggcacagaataaaaatcccggg

SEQ ID NO: 16251 - DNA, 28 bp, synthetic construct
  source 1..28: mol_type = other DNA
ccgggatttttattctgtgccttcctgg

SEQ ID NO: 16252 - DNA, 28 bp, synthetic construct
  source 1..28: mol_type = other DNA
ggatttttattctgtgccttcctggtgg

SEQ ID NO: 16253 - DNA, 28 bp, synthetic construct
  source 1..28: mol_type = other DNA
gccttcctggtggctcctacaagtctgg

SEQ ID NO: 16254 - DNA, 28 bp, synthetic construct
  source 1..28: mol_type = other DNA
tccagacttgtaggagccaccaggaagg

SEQ ID NO: 16255 - DNA, 28 bp, synthetic construct
  source 1..28: mol_type = other DNA
tcctggtggctcctacaagtctggaagg

SEQ ID NO: 16256 - DNA, 28 bp, synthetic construct
  source 1..28: mol_type = other DNA
cctggtggctcctacaagtctggaaggg

SEQ ID NO: 16257 - DNA, 28 bp, synthetic construct
  source 1..28: mol_type = other DNA
gtggctcctacaagtctggaagggcagg

SEQ ID NO: 16258 - DNA, 28 bp, synthetic construct
  source 1..28: mol_type = other DNA
gctcctacaagtctggaagggcaggagg

SEQ ID NO: 16259 - DNA, 28 bp, synthetic construct
  source 1..28: mol_type = other DNA
gcgcctcctgcccttccagacttgtagg

SEQ ID NO: 16260 - DNA, 28 bp, synthetic construct
  source 1..28: mol_type = other DNA
gggcaggaggcgcatctcactcctctgg

SEQ ID NO: 16261 - DNA, 28 bp, synthetic construct
  source 1..28: mol_type = other DNA
ggcaggaggcgcatctcactcctctggg

SEQ ID NO: 16262 - DNA, 28 bp, synthetic construct
  source 1..28: mol_type = other DNA
cctctgggtcccctcccctagcgcctgg

SEQ ID NO: 16263 - DNA, 28 bp, synthetic construct
  source 1..28: mol_type = other DNA
ctgggtcccctcccctagcgcctggcgg

SEQ ID NO: 16264 - DNA, 28 bp, synthetic construct
  source 1..28: mol_type = other DNA
tgggtcccctcccctagcgcctggcggg

SEQ ID NO: 16265 - DNA, 28 bp, synthetic construct
  source 1..28: mol_type = other DNA
gggctcccgccaggcgctaggggagggg

SEQ ID NO: 16266 - DNA, 28 bp, synthetic construct
  source 1..28: mol_type = other DNA
tgggctcccgccaggcgctaggggaggg

SEQ ID NO: 16267 - DNA, 28 bp, synthetic construct
  source 1..28: mol_type = other DNA
ctgggctcccgccaggcgctaggggagg

SEQ ID NO: 16268 - DNA, 28 bp, synthetic construct
  source 1..28: mol_type = other DNA
ctcccctagcgcctggcgggagcccagg

SEQ ID NO: 16269 - DNA, 28 bp, synthetic construct
  source 1..28: mol_type = other DNA
agcctgggctcccgccaggcgctagggg

SEQ ID NO: 16270 - DNA, 28 bp, synthetic construct
  source 1..28: mol_type = other DNA
cagcctgggctcccgccaggcgctaggg

SEQ ID NO: 16271 - DNA, 28 bp, synthetic construct
  source 1..28: mol_type = other DNA
gcagcctgggctcccgccaggcgctagg

SEQ ID NO: 16272 - DNA, 28 bp, synthetic construct
  source 1..28: mol_type = other DNA
cacaaatgcagcctgggctcccgccagg

SEQ ID NO: 16273 - DNA, 28 bp, synthetic construct
  source 1..28: mol_type = other DNA
ctggcgggagcccaggctgcatttgtgg

SEQ ID NO: 16274 - DNA, 28 bp, synthetic construct
  source 1..28: mol_type = other DNA
gtcatgaattccacaaatgcagcctggg

SEQ ID NO: 16275 - DNA, 28 bp, synthetic construct
  source 1..28: mol_type = other DNA
agtcatgaattccacaaatgcagcctgg

SEQ ID NO: 16276 - DNA, 28 bp, synthetic construct
  source 1..28: mol_type = other DNA
ctcctgctcaagctgaacacattgctgg

SEQ ID NO: 16277 - DNA, 28 bp, synthetic construct
  source 1..28: mol_type = other DNA
agccagcaatgtgttcagcttgagcagg

SEQ ID NO: 16278 - DNA, 28 bp, synthetic construct
  source 1..28: mol_type = other DNA
gctgaacacattgctggctcctgctcgg

SEQ ID NO: 16279 - DNA, 28 bp, synthetic construct
  source 1..28: mol_type = other DNA
ctgaacacattgctggctcctgctcggg

SEQ ID NO: 16280 - DNA, 28 bp, synthetic construct
  source 1..28: mol_type = other DNA
aacacattgctggctcctgctcgggtgg

SEQ ID NO: 16281 - DNA, 28 bp, synthetic construct
  source 1..28: mol_type = other DNA
tgctggctcctgctcgggtggagcccgg

SEQ ID NO: 16282 - DNA, 28 bp, synthetic construct
  source 1..28: mol_type = other DNA
ctaattagccgggctccacccgagcagg

SEQ ID NO: 16283 - DNA, 28 bp, synthetic construct
  source 1..28: mol_type = other DNA
gggtggagcccggctaattagagtgagg

SEQ ID NO: 16284 - DNA, 28 bp, synthetic construct
  source 1..28: mol_type = other DNA
ggtggagcccggctaattagagtgaggg

SEQ ID NO: 16285 - DNA, 28 bp, synthetic construct
  source 1..28: mol_type = other DNA
gtggagcccggctaattagagtgagggg

SEQ ID NO: 16286 - DNA, 28 bp, synthetic construct
  source 1..28: mol_type = other DNA
ggggagcccctcactctaattagccggg

SEQ ID NO: 16287 - DNA, 28 bp, synthetic construct
  source 1..28: mol_type = other DNA
cggggagcccctcactctaattagccgg

SEQ ID NO: 16288 - DNA, 28 bp, synthetic construct
  source 1..28: mol_type = other DNA
ctaattagagtgaggggctccccgtagg

SEQ ID NO: 16289 - DNA, 28 bp, synthetic construct
  source 1..28: mol_type = other DNA
taattagagtgaggggctccccgtaggg

SEQ ID NO: 16290 - DNA, 28 bp, synthetic construct
  source 1..28: mol_type = other DNA
gagtgaggggctccccgtagggcgaagg

SEQ ID NO: 16291 - DNA, 28 bp, synthetic construct
  source 1..28: mol_type = other DNA
agtgaggggctccccgtagggcgaaggg

SEQ ID NO: 16292 - DNA, 28 bp, synthetic construct
  source 1..28: mol_type = other DNA
gtgaggggctccccgtagggcgaagggg

SEQ ID NO: 16293 - DNA, 28 bp, synthetic construct
  source 1..28: mol_type = other DNA
tgacagcgcaccccttcgccctacgggg

SEQ ID NO: 16294 - DNA, 28 bp, synthetic construct
  source 1..28: mol_type = other DNA
ctgacagcgcaccccttcgccctacggg

SEQ ID NO: 16295 - DNA, 28 bp, synthetic construct
  source 1..28: mol_type = other DNA
tctgacagcgcaccccttcgccctacgg

SEQ ID NO: 16296 - DNA, 28 bp, synthetic construct
  source 1..28: mol_type = other DNA
gggcgaaggggtgcgctgtcagatgtgg

SEQ ID NO: 16297 - DNA, 28 bp, synthetic construct
  source 1..28: mol_type = other DNA
tgtcagatgtggcattcccgttttacgg

SEQ ID NO: 16298 - DNA, 28 bp, synthetic construct
  source 1..28: mol_type = other DNA
ggcattcccgttttacggagacacacgg

SEQ ID NO: 16299 - DNA, 28 bp, synthetic construct
  source 1..28: mol_type = other DNA
aagacaccgtgtgtctccgtaaaacggg

SEQ ID NO: 16300 - DNA, 28 bp, synthetic construct
  source 1..28: mol_type = other DNA
taagacaccgtgtgtctccgtaaaacgg

SEQ ID NO: 16301 - DNA, 28 bp, synthetic construct
  source 1..28: mol_type = other DNA
ggagacacacggtgtcttacacgccagg

SEQ ID NO: 16302 - DNA, 28 bp, synthetic construct
  source 1..28: mol_type = other DNA
gagacacacggtgtcttacacgccaggg

SEQ ID NO: 16303 - DNA, 28 bp, synthetic construct
  source 1..28: mol_type = other DNA
acacggtgtcttacacgccagggagagg

SEQ ID NO: 16304 - DNA, 28 bp, synthetic construct
  source 1..28: mol_type = other DNA
gctctttgcgtctcagacctctccctgg

SEQ ID NO: 16305 - DNA, 28 bp, synthetic construct
  source 1..28: mol_type = other DNA
gtctgagacgcaaagagccgtcgagcgg

SEQ ID NO: 16306 - DNA, 28 bp, synthetic construct
  source 1..28: mol_type = other DNA
tctgagacgcaaagagccgtcgagcggg

SEQ ID NO: 16307 - DNA, 28 bp, synthetic construct
  source 1..28: mol_type = other DNA
acgcaaagagccgtcgagcgggctgcgg

SEQ ID NO: 16308 - DNA, 28 bp, synthetic construct
  source 1..28: mol_type = other DNA
cgcaaagagccgtcgagcgggctgcggg

SEQ ID NO: 16309 - DNA, 28 bp, synthetic construct
  source 1..28: mol_type = other DNA
cgaagcaatcccgcagcccgctcgacgg

SEQ ID NO: 16310 - DNA, 28 bp, synthetic construct
  source 1..28: mol_type = other DNA
cgtgcggaagggtggctgcaggcggagg

SEQ ID NO: 16311 - DNA, 28 bp, synthetic construct
  source 1..28: mol_type = other DNA
gtgcgtgcggaagggtggctgcaggcgg

SEQ ID NO: 16312 - DNA, 28 bp, synthetic construct
  source 1..28: mol_type = other DNA
caagtgcgtgcggaagggtggctgcagg

SEQ ID NO: 16313 - DNA, 28 bp, synthetic construct
  source 1..28: mol_type = other DNA
gcacacacaagtgcgtgcggaagggtgg

SEQ ID NO: 16314 - DNA, 28 bp, synthetic construct
  source 1..28: mol_type = other DNA
ggtgcacacacaagtgcgtgcggaaggg

SEQ ID NO: 16315 - DNA, 28 bp, synthetic construct
  source 1..28: mol_type = other DNA
gggtgcacacacaagtgcgtgcggaagg

SEQ ID NO: 16316 - DNA, 28 bp, synthetic construct
  source 1..28: mol_type = other DNA
tccgcacgcacttgtgtgtgcacccagg

SEQ ID NO: 16317 - DNA, 28 bp, synthetic construct
  source 1..28: mol_type = other DNA
gcctgggtgcacacacaagtgcgtgcgg

SEQ ID NO: 16318 - DNA, 28 bp, synthetic construct
  source 1..28: mol_type = other DNA
acttgtgtgtgcacccaggccaacatgg

SEQ ID NO: 16319 - DNA, 28 bp, synthetic construct
  source 1..28: mol_type = other DNA
gtgtgtgcacccaggccaacatggaagg

SEQ ID NO: 16320 - DNA, 28 bp, synthetic construct
  source 1..28: mol_type = other DNA
aggatggcgccttccatgttggcctggg

SEQ ID NO: 16321 - DNA, 28 bp, synthetic construct
  source 1..28: mol_type = other DNA
taggatggcgccttccatgttggcctgg

SEQ ID NO: 16322 - DNA, 28 bp, synthetic construct
  source 1..28: mol_type = other DNA
gaagttaggatggcgccttccatgttgg

SEQ ID NO: 16323 - DNA, 28 bp, synthetic construct
  source 1..28: mol_type = other DNA
cgccatcctaacttctgccgtgagcagg

SEQ ID NO: 16324 - DNA, 28 bp, synthetic construct
  source 1..28: mol_type = other DNA
cacctgctcacggcagaagttaggatgg

SEQ ID NO: 16325 - DNA, 28 bp, synthetic construct
  source 1..28: mol_type = other DNA
catcctaacttctgccgtgagcaggtgg

SEQ ID NO: 16326 - DNA, 28 bp, synthetic construct
  source 1..28: mol_type = other DNA
atcctaacttctgccgtgagcaggtggg

SEQ ID NO: 16327 - DNA, 28 bp, synthetic construct
  source 1..28: mol_type = other DNA
ctcccacctgctcacggcagaagttagg

SEQ ID NO: 16328 - DNA, 28 bp, synthetic construct
  source 1..28: mol_type = other DNA
ctaacttctgccgtgagcaggtgggagg

SEQ ID NO: 16329 - DNA, 28 bp, synthetic construct
  source 1..28: mol_type = other DNA
taacttctgccgtgagcaggtgggaggg

SEQ ID NO: 16330 - DNA, 28 bp, synthetic construct
  source 1..28: mol_type = other DNA
gtctctcttccctcccacctgctcacgg

SEQ ID NO: 16331 - DNA, 28 bp, synthetic construct
  source 1..28: mol_type = other DNA
gcaggtgggagggaagagagacgagagg

SEQ ID NO: 16332 - DNA, 28 bp, synthetic construct
  source 1..28: mol_type = other DNA
ggaagagagacgagaggtattccattgg

SEQ ID NO: 16333 - DNA, 28 bp, synthetic construct
  source 1..28: mol_type = other DNA
gacgagaggtattccattggttgtctgg

SEQ ID NO: 16334 - DNA, 28 bp, synthetic construct
  source 1..28: mol_type = other DNA
acgagaggtattccattggttgtctggg

SEQ ID NO: 16335 - DNA, 28 bp, synthetic construct
  source 1..28: mol_type = other DNA
gcgggggtggcggcggcgcgccgagcgg

SEQ ID NO: 16336 - DNA, 28 bp, synthetic construct
  source 1..28: mol_type = other DNA
cgggggtggcggcggcgcgccgagcggg

SEQ ID NO: 16337 - DNA, 28 bp, synthetic construct
  source 1..28: mol_type = other DNA
gtggcggcggcgcgccgagcgggcccgg

SEQ ID NO: 16338 - DNA, 28 bp, synthetic construct
  source 1..28: mol_type = other DNA
ggcggcgcgccgagcgggcccggcgcgg

SEQ ID NO: 16339 - DNA, 28 bp, synthetic construct
  source 1..28: mol_type = other DNA
gcggcgcgccgagcgggcccggcgcggg

SEQ ID NO: 16340 - DNA, 28 bp, synthetic construct
  source 1..28: mol_type = other DNA
gccgagcgggcccggcgcgggcgagcgg

SEQ ID NO: 16341 - DNA, 28 bp, synthetic construct
  source 1..28: mol_type = other DNA
ccgagcgggcccggcgcgggcgagcggg

SEQ ID NO: 16342 - DNA, 28 bp, synthetic construct
  source 1..28: mol_type = other DNA
cggctgcagcccgctcgcccgcgccggg

SEQ ID NO: 16343 - DNA, 28 bp, synthetic construct
  source 1..28: mol_type = other DNA
ccggcgcgggcgagcgggctgcagccgg

SEQ ID NO: 16344 - DNA, 28 bp, synthetic construct
  source 1..28: mol_type = other DNA
gcgcgggcgagcgggctgcagccggcgg

SEQ ID NO: 16345 - DNA, 28 bp, synthetic construct
  source 1..28: mol_type = other DNA
cgggcgagcgggctgcagccggcggcgg

SEQ ID NO: 16346 - DNA, 28 bp, synthetic construct
  source 1..28: mol_type = other DNA
ggctgcagccggcggcggcgccagcagg

SEQ ID NO: 16347 - DNA, 28 bp, synthetic construct
  source 1..28: mol_type = other DNA
cagccggcggcggcgccagcaggtacgg

SEQ ID NO: 16348 - DNA, 28 bp, synthetic construct
  source 1..28: mol_type = other DNA
gggccgtacctgctggcgccgccgccgg

SEQ ID NO: 16349 - DNA, 28 bp, synthetic construct
  source 1..28: mol_type = other DNA
ggcggcgggtgcgggccgtacctgctgg

SEQ ID NO: 16350 - DNA, 28 bp, synthetic construct
  source 1..28: mol_type = other DNA
gtacggcccgcacccgccgccgccccgg

SEQ ID NO: 16351 - DNA, 28 bp, synthetic construct
  source 1..28: mol_type = other DNA
cggcccgcacccgccgccgccccggcgg

SEQ ID NO: 16352 - DNA, 28 bp, synthetic construct
  source 1..28: mol_type = other DNA
aggccgccggggcggcggcgggtgcggg

SEQ ID NO: 16353 - DNA, 28 bp, synthetic construct
  source 1..28: mol_type = other DNA
aaggccgccggggcggcggcgggtgcgg

SEQ ID NO: 16354 - DNA, 28 bp, synthetic construct
  source 1..28: mol_type = other DNA
cacccgccgccgccccggcggcctttgg

SEQ ID NO: 16355 - DNA, 28 bp, synthetic construct
  source 1..28: mol_type = other DNA
acccgccgccgccccggcggcctttggg

SEQ ID NO: 16356 - DNA, 28 bp, synthetic construct
  source 1..28: mol_type = other DNA
cccgccgccgccccggcggcctttgggg

SEQ ID NO: 16357 - DNA, 28 bp, synthetic construct
  source 1..28: mol_type = other DNA
ccgccgccgccccggcggcctttggggg

SEQ ID NO: 16358 - DNA, 28 bp, synthetic construct
  source 1..28: mol_type = other DNA
cagcccccaaaggccgccggggcggcgg

SEQ ID NO: 16359 - DNA, 28 bp, synthetic construct
  source 1..28: mol_type = other DNA
gctcagcccccaaaggccgccggggcgg

SEQ ID NO: 16360 - DNA, 28 bp, synthetic construct
  source 1..28: mol_type = other DNA
ccccggcggcctttgggggctgagccgg

SEQ ID NO: 16361 - DNA, 28 bp, synthetic construct
  source 1..28: mol_type = other DNA
tccggctcagcccccaaaggccgccggg

SEQ ID NO: 16362 - DNA, 28 bp, synthetic construct
  source 1..28: mol_type = other DNA
ctccggctcagcccccaaaggccgccgg

SEQ ID NO: 16363 - DNA, 28 bp, synthetic construct
  source 1..28: mol_type = other DNA
ggcctttgggggctgagccggagcccgg

SEQ ID NO: 16364 - DNA, 28 bp, synthetic construct
  source 1..28: mol_type = other DNA
cgccgggctccggctcagcccccaaagg

SEQ ID NO: 16365 - DNA, 28 bp, synthetic construct
  source 1..28: mol_type = other DNA
aaaactttgcaatcgcgccgggctccgg

SEQ ID NO: 16366 - DNA, 28 bp, synthetic construct
  source 1..28: mol_type = other DNA
cgcacgaaaactttgcaatcgcgccggg

SEQ ID NO: 16367 - DNA, 28 bp, synthetic construct
  source 1..28: mol_type = other DNA
gcgcacgaaaactttgcaatcgcgccgg

SEQ ID NO: 16368 - DNA, 28 bp, synthetic construct
  source 1..28: mol_type = other DNA
ggcgcgattgcaaagttttcgtgcgcgg

SEQ ID NO: 16369 - DNA, 28 bp, synthetic construct
  source 1..28: mol_type = other DNA
gcaaagttttcgtgcgcggcccctctgg

SEQ ID NO: 16370 - DNA, 28 bp, synthetic construct
  source 1..28: mol_type = other DNA
gttttcgtgcgcggcccctctggcccgg

SEQ ID NO: 16371 - DNA, 28 bp, synthetic construct
  source 1..28: mol_type = other DNA
gcgcggcccctctggcccggagttgcgg

SEQ ID NO: 16372 - DNA, 28 bp, synthetic construct
  source 1..28: mol_type = other DNA
tctcagccgcaactccgggccagagggg

SEQ ID NO: 16373 - DNA, 28 bp, synthetic construct
  source 1..28: mol_type = other DNA
gtctcagccgcaactccgggccagaggg

SEQ ID NO: 16374 - DNA, 28 bp, synthetic construct
  source 1..28: mol_type = other DNA
cgtctcagccgcaactccgggccagagg

SEQ ID NO: 16375 - DNA, 28 bp, synthetic construct
  source 1..28: mol_type = other DNA
cggcgcgcgtctcagccgcaactccggg

SEQ ID NO: 16376 - DNA, 28 bp, synthetic construct
  source 1..28: mol_type = other DNA
gcggcgcgcgtctcagccgcaactccgg

SEQ ID NO: 16377 - DNA, 28 bp, synthetic construct
  source 1..28: mol_type = other DNA
cggctgagacgcgcgccgcgcgagccgg

SEQ ID NO: 16378 - DNA, 28 bp, synthetic construct
  source 1..28: mol_type = other DNA
ggctgagacgcgcgccgcgcgagccggg

SEQ ID NO: 16379 - DNA, 28 bp, synthetic construct
  source 1..28: mol_type = other DNA
gctgagacgcgcgccgcgcgagccgggg

SEQ ID NO: 16380 - DNA, 28 bp, synthetic construct
  source 1..28: mol_type = other DNA
ctgagacgcgcgccgcgcgagccggggg

SEQ ID NO: 16381 - DNA, 28 bp, synthetic construct
  source 1..28: mol_type = other DNA
cgcgcgccgcgcgagccgggggactcgg

SEQ ID NO: 16382 - DNA, 28 bp, synthetic construct
  source 1..28: mol_type = other DNA
ccgcgcgagccgggggactcggcgacgg

SEQ ID NO: 16383 - DNA, 28 bp, synthetic construct
  source 1..28: mol_type = other DNA
cgcgcgagccgggggactcggcgacggg

SEQ ID NO: 16384 - DNA, 28 bp, synthetic construct
  source 1..28: mol_type = other DNA
gcgcgagccgggggactcggcgacgggg

SEQ ID NO: 16385 - DNA, 28 bp, synthetic construct
  source 1..28: mol_type = other DNA
cgagccgggggactcggcgacggggcgg

SEQ ID NO: 16386 - DNA, 28 bp, synthetic construct
  source 1..28: mol_type = other DNA
gagccgggggactcggcgacggggcggg

SEQ ID NO: 16387 - DNA, 28 bp, synthetic construct
  source 1..28: mol_type = other DNA
agccgggggactcggcgacggggcgggg

SEQ ID NO: 16388 - DNA, 28 bp, synthetic construct
  source 1..28: mol_type = other DNA
gtccccgccccgtcgccgagtcccccgg

SEQ ID NO: 16389 - DNA, 28 bp, synthetic construct
  source 1..28: mol_type = other DNA
gggggactcggcgacggggcggggacgg

SEQ ID NO: 16390 - DNA, 28 bp, synthetic construct
  source 1..28: mol_type = other DNA
ggggactcggcgacggggcggggacggg

SEQ ID NO: 16391 - DNA, 28 bp, synthetic construct
  source 1..28: mol_type = other DNA
aagggcgcagagcgggacacggagaggg

SEQ ID NO: 16392 - DNA, 28 bp, synthetic construct
  source 1..28: mol_type = other DNA
gaagggcgcagagcgggacacggagagg

SEQ ID NO: 16393 - DNA, 28 bp, synthetic construct
  source 1..28: mol_type = other DNA
gcgcagaagggcgcagagcgggacacgg

SEQ ID NO: 16394 - DNA, 28 bp, synthetic construct
  source 1..28: mol_type = other DNA
cggggcgcgcagaagggcgcagagcggg

SEQ ID NO: 16395 - DNA, 28 bp, synthetic construct
  source 1..28: mol_type = other DNA
gcggggcgcgcagaagggcgcagagcgg

SEQ ID NO: 16396 - DNA, 28 bp, synthetic construct
  source 1..28: mol_type = other DNA
ggtacagggagcggggcgcgcagaaggg

SEQ ID NO: 16397 - DNA, 28 bp, synthetic construct
  source 1..28: mol_type = other DNA
cggtacagggagcggggcgcgcagaagg

SEQ ID NO: 16398 - DNA, 28 bp, synthetic construct
  source 1..28: mol_type = other DNA
cttctgcgcgccccgctccctgtaccgg

SEQ ID NO: 16399 - DNA, 28 bp, synthetic construct
  source 1..28: mol_type = other DNA
gatcgctgctccggtacagggagcgggg

SEQ ID NO: 16400 - DNA, 28 bp, synthetic construct
  source 1..28: mol_type = other DNA
ggatcgctgctccggtacagggagcggg

SEQ ID NO: 16401 - DNA, 28 bp, synthetic construct
  source 1..28: mol_type = other DNA
cggatcgctgctccggtacagggagcgg

SEQ ID NO: 16402 - DNA, 28 bp, synthetic construct
  source 1..28: mol_type = other DNA
cgctccctgtaccggagcagcgatccgg

SEQ ID NO: 16403 - DNA, 28 bp, synthetic construct
  source 1..28: mol_type = other DNA
gctccctgtaccggagcagcgatccggg

SEQ ID NO: 16404 - DNA, 28 bp, synthetic construct
  source 1..28: mol_type = other DNA
ccctgtaccggagcagcgatccgggagg

SEQ ID NO: 16405 - DNA, 28 bp, synthetic construct
  source 1..28: mol_type = other DNA
gcctcccggatcgctgctccggtacagg

SEQ ID NO: 16406 - DNA, 28 bp, synthetic construct
  source 1..28: mol_type = other DNA
tgtaccggagcagcgatccgggaggcgg

SEQ ID NO: 16407 - DNA, 28 bp, synthetic construct
  source 1..28: mol_type = other DNA
tcggccgcctcccggatcgctgctccgg

SEQ ID NO: 16408 - DNA, 28 bp, synthetic construct
  source 1..28: mol_type = other DNA
agcagcgatccgggaggcggccgagagg

SEQ ID NO: 16409 - DNA, 28 bp, synthetic construct
  source 1..28: mol_type = other DNA
ccgggaggcggccgagaggtgcgcgcgg

SEQ ID NO: 16410 - DNA, 28 bp, synthetic construct
  source 1..28: mol_type = other DNA
cgggaggcggccgagaggtgcgcgcggg

SEQ ID NO: 16411 - DNA, 28 bp, synthetic construct
  source 1..28: mol_type = other DNA
gggaggcggccgagaggtgcgcgcgggg

SEQ ID NO: 16412 - DNA, 28 bp, synthetic construct
  source 1..28: mol_type = other DNA
ccgagaggtgcgcgcggggccgagccgg

SEQ ID NO: 16413 - DNA, 28 bp, synthetic construct
  source 1..28: mol_type = other DNA
ggtgcgcgcggggccgagccggctgcgg

SEQ ID NO: 16414 - DNA, 28 bp, synthetic construct
  source 1..28: mol_type = other DNA
gtgcgcgcggggccgagccggctgcggg

SEQ ID NO: 16415 - DNA, 28 bp, synthetic construct
  source 1..28: mol_type = other DNA
tgcgcgcggggccgagccggctgcgggg

SEQ ID NO: 16416 - DNA, 28 bp, synthetic construct
  source 1..28: mol_type = other DNA
cgcggggccgagccggctgcggggcagg

SEQ ID NO: 16417 - DNA, 28 bp, synthetic construct
  source 1..28: mol_type = other DNA
tgctcgacctgccccgcagccggctcgg

SEQ ID NO: 16418 - DNA, 28 bp, synthetic construct
  source 1..28: mol_type = other DNA
gagccggctgcggggcaggtcgagcagg

SEQ ID NO: 16419 - DNA, 28 bp, synthetic construct
  source 1..28: mol_type = other DNA
agccggctgcggggcaggtcgagcaggg

SEQ ID NO: 16420 - DNA, 28 bp, synthetic construct
  source 1..28: mol_type = other DNA
gtccctgctcgacctgccccgcagccgg

SEQ ID NO: 16421 - DNA, 28 bp, synthetic construct
  source 1..28: mol_type = other DNA
caaactttggggtgacgcacgctggcgg

SEQ ID NO: 16422 - DNA, 28 bp, synthetic construct
  source 1..28: mol_type = other DNA
ccagcgtgcgtcaccccaaagtttgcgg

SEQ ID NO: 16423 - DNA, 28 bp, synthetic construct
  source 1..28: mol_type = other DNA
cagcgtgcgtcaccccaaagtttgcggg

SEQ ID NO: 16424 - DNA, 28 bp, synthetic construct
  source 1..28: mol_type = other DNA
agcgtgcgtcaccccaaagtttgcgggg

SEQ ID NO: 16425 - DNA, 28 bp, synthetic construct
  source 1..28: mol_type = other DNA
gtgcgtcaccccaaagtttgcggggtgg

SEQ ID NO: 16426 - DNA, 28 bp, synthetic construct
  source 1..28: mol_type = other DNA
gtcaccccaaagtttgcggggtggcagg

SEQ ID NO: 16427 - DNA, 28 bp, synthetic construct
  source 1..28: mol_type = other DNA
tcaccccaaagtttgcggggtggcaggg

SEQ ID NO: 16428 - DNA, 28 bp, synthetic construct
  source 1..28: mol_type = other DNA
gcgccctgccaccccgcaaactttgggg

SEQ ID NO: 16429 - DNA, 28 bp, synthetic construct
  source 1..28: mol_type = other DNA
cgcgccctgccaccccgcaaactttggg

SEQ ID NO: 16430 - DNA, 28 bp, synthetic construct
  source 1..28: mol_type = other DNA
gcgcgccctgccaccccgcaaactttgg

SEQ ID NO: 16431 - DNA, 28 bp, synthetic construct
  source 1..28: mol_type = other DNA
ttgcggggtggcagggcgcgcgctctgg

SEQ ID NO: 16432 - DNA, 28 bp, synthetic construct
  source 1..28: mol_type = other DNA
cgcgcgctctggccacccgccgctctgg

SEQ ID NO: 16433 - DNA, 28 bp, synthetic construct
  source 1..28: mol_type = other DNA
gcgcgctctggccacccgccgctctggg

SEQ ID NO: 16434 - DNA, 28 bp, synthetic construct
  source 1..28: mol_type = other DNA
cgctctggccacccgccgctctgggcgg

SEQ ID NO: 16435 - DNA, 28 bp, synthetic construct
  source 1..28: mol_type = other DNA
gccacccgccgctctgggcggcagctgg

SEQ ID NO: 16436 - DNA, 28 bp, synthetic construct
  source 1..28: mol_type = other DNA
accagctgccgcccagagcggcgggtgg

SEQ ID NO: 16437 - DNA, 28 bp, synthetic construct
  source 1..28: mol_type = other DNA
acccgccgctctgggcggcagctggtgg

SEQ ID NO: 16438 - DNA, 28 bp, synthetic construct
  source 1..28: mol_type = other DNA
gccaccagctgccgcccagagcggcggg

SEQ ID NO: 16439 - DNA, 28 bp, synthetic construct
  source 1..28: mol_type = other DNA
tgccaccagctgccgcccagagcggcgg

SEQ ID NO: 16440 - DNA, 28 bp, synthetic construct
  source 1..28: mol_type = other DNA
cgttgccaccagctgccgcccagagcgg

SEQ ID NO: 16441 - DNA, 28 bp, synthetic construct
  source 1..28: mol_type = other DNA
ctgggcggcagctggtggcaacgcaagg

SEQ ID NO: 16442 - DNA, 28 bp, synthetic construct
  source 1..28: mol_type = other DNA
tgggcggcagctggtggcaacgcaaggg

SEQ ID NO: 16443 - DNA, 28 bp, synthetic construct
  source 1..28: mol_type = other DNA
ggcagctggtggcaacgcaagggcgcgg

SEQ ID NO: 16444 - DNA, 28 bp, synthetic construct
  source 1..28: mol_type = other DNA
agctggtggcaacgcaagggcgcggcgg

SEQ ID NO: 16445 - DNA, 28 bp, synthetic construct
  source 1..28: mol_type = other DNA
gctggtggcaacgcaagggcgcggcggg

SEQ ID NO: 16446 - DNA, 28 bp, synthetic construct
  source 1..28: mol_type = other DNA
ctggtggcaacgcaagggcgcggcgggg

SEQ ID NO: 16447 - DNA, 28 bp, synthetic construct
  source 1..28: mol_type = other DNA
tggtggcaacgcaagggcgcggcggggg

SEQ ID NO: 16448 - DNA, 28 bp, synthetic construct
  source 1..28: mol_type = other DNA
tggcaacgcaagggcgcggcgggggcgg

SEQ ID NO: 16449 - DNA, 28 bp, synthetic construct
  source 1..28: mol_type = other DNA
aacgcaagggcgcggcgggggcggccgg

SEQ ID NO: 16450 - DNA, 28 bp, synthetic construct
  source 1..28: mol_type = other DNA
aagggcgcggcgggggcggccggcgcgg

SEQ ID NO: 16451 - DNA, 28 bp, synthetic construct
  source 1..28: mol_type = other DNA
ggcgcggcgggggcggccggcgcggagg

SEQ ID NO: 16452 - DNA, 28 bp, synthetic construct
  source 1..28: mol_type = other DNA
gcgcggcgggggcggccggcgcggaggg

SEQ ID NO: 16453 - DNA, 28 bp, synthetic construct
  source 1..28: mol_type = other DNA
cgcggcgggggcggccggcgcggagggg

SEQ ID NO: 16454 - DNA, 28 bp, synthetic construct
  source 1..28: mol_type = other DNA
gcggcgggggcggccggcgcggaggggg

SEQ ID NO: 16455 - DNA, 28 bp, synthetic construct
  source 1..28: mol_type = other DNA
gggggcggccggcgcggagggggccagg

SEQ ID NO: 16456 - DNA, 28 bp, synthetic construct
  source 1..28: mol_type = other DNA
cggccggcgcggagggggccaggtacgg

SEQ ID NO: 16457 - DNA, 28 bp, synthetic construct
  source 1..28: mol_type = other DNA
ggccggcgcggagggggccaggtacggg

SEQ ID NO: 16458 - DNA, 28 bp, synthetic construct
  source 1..28: mol_type = other DNA
gccggcgcggagggggccaggtacgggg

SEQ ID NO: 16459 - DNA, 28 bp, synthetic construct
  source 1..28: mol_type = other DNA
gccccgtacctggccccctccgcgccgg

SEQ ID NO: 16460 - DNA, 28 bp, synthetic construct
  source 1..28: mol_type = other DNA
cggagggggccaggtacggggcccgcgg

SEQ ID NO: 16461 - DNA, 28 bp, synthetic construct
  source 1..28: mol_type = other DNA
ggagggggccaggtacggggcccgcggg

SEQ ID NO: 16462 - DNA, 28 bp, synthetic construct
  source 1..28: mol_type = other DNA
gggggccaggtacggggcccgcgggcgg

SEQ ID NO: 16463 - DNA, 28 bp, synthetic construct
  source 1..28: mol_type = other DNA
cagcgccgcccgcgggccccgtacctgg

SEQ ID NO: 16464 - DNA, 28 bp, synthetic construct
  source 1..28: mol_type = other DNA
ttagagtgtcctgctaacttggccgcgg

SEQ ID NO: 16465 - DNA, 28 bp, synthetic construct
  source 1..28: mol_type = other DNA
cacttgttagagtgtcctgctaacttgg

SEQ ID NO: 16466 - DNA, 28 bp, synthetic construct
  source 1..28: mol_type = other DNA
caggacactctaacaagtgactgcgcgg

SEQ ID NO: 16467 - DNA, 28 bp, synthetic construct
  source 1..28: mol_type = other DNA
aacaagtgactgcgcggcccgcgcccgg

SEQ ID NO: 16468 - DNA, 28 bp, synthetic construct
  source 1..28: mol_type = other DNA
acaagtgactgcgcggcccgcgcccggg

SEQ ID NO: 16469 - DNA, 28 bp, synthetic construct
  source 1..28: mol_type = other DNA
caagtgactgcgcggcccgcgcccgggg

SEQ ID NO: 16470 - DNA, 28 bp, synthetic construct
  source 1..28: mol_type = other DNA
gtgactgcgcggcccgcgcccggggcgg

SEQ ID NO: 16471 - DNA, 28 bp, synthetic construct
  source 1..28: mol_type = other DNA
cggcccgcgcccggggcggtgactgcgg

SEQ ID NO: 16472 - DNA, 28 bp, synthetic construct
  source 1..28: mol_type = other DNA
ttgccgcagtcaccgccccgggcgcggg

SEQ ID NO: 16473 - DNA, 28 bp, synthetic construct
  source 1..28: mol_type = other DNA
cttgccgcagtcaccgccccgggcgcgg

SEQ ID NO: 16474 - DNA, 28 bp, synthetic construct
  source 1..28: mol_type = other DNA
gggggcttgccgcagtcaccgccccggg

SEQ ID NO: 16475 - DNA, 28 bp, synthetic construct
  source 1..28: mol_type = other DNA
agggggcttgccgcagtcaccgccccgg

SEQ ID NO: 16476 - DNA, 28 bp, synthetic construct
  source 1..28: mol_type = other DNA
ggggcggtgactgcggcaagccccctgg

SEQ ID NO: 16477 - DNA, 28 bp, synthetic construct
  source 1..28: mol_type = other DNA
gggcggtgactgcggcaagccccctggg

SEQ ID NO: 16478 - DNA, 28 bp, synthetic construct
  source 1..28: mol_type = other DNA
gcggcaagccccctgggtccccgcgcgg

SEQ ID NO: 16479 - DNA, 28 bp, synthetic construct
  source 1..28: mol_type = other DNA
gggatgcgccgcgcggggacccaggggg

SEQ ID NO: 16480 - DNA, 28 bp, synthetic construct
  source 1..28: mol_type = other DNA
tgggatgcgccgcgcggggacccagggg

SEQ ID NO: 16481 - DNA, 28 bp, synthetic construct
  source 1..28: mol_type = other DNA
ctgggatgcgccgcgcggggacccaggg

SEQ ID NO: 16482 - DNA, 28 bp, synthetic construct
  source 1..28: mol_type = other DNA
gctgggatgcgccgcgcggggacccagg

SEQ ID NO: 16483 - DNA, 28 bp, synthetic construct
  source 1..28: mol_type = other DNA
ggtccccgcgcggcgcatcccagcctgg

SEQ ID NO: 16484 - DNA, 28 bp, synthetic construct
  source 1..28: mol_type = other DNA
gtccccgcgcggcgcatcccagcctggg

SEQ ID NO: 16485 - DNA, 28 bp, synthetic construct
  source 1..28: mol_type = other DNA
cgcccaggctgggatgcgccgcgcgggg

SEQ ID NO: 16486 - DNA, 28 bp, synthetic construct
  source 1..28: mol_type = other DNA
cccgcgcggcgcatcccagcctgggcgg

SEQ ID NO: 16487 - DNA, 28 bp, synthetic construct
  source 1..28: mol_type = other DNA
ccgcgcggcgcatcccagcctgggcggg

SEQ ID NO: 16488 - DNA, 28 bp, synthetic construct
  source 1..28: mol_type = other DNA
cgcatcccagcctgggcgggacgctcgg

SEQ ID NO: 16489 - DNA, 28 bp, synthetic construct
  source 1..28: mol_type = other DNA
cgcggccgagcgtcccgcccaggctggg

SEQ ID NO: 16490 - DNA, 28 bp, synthetic construct
  source 1..28: mol_type = other DNA
ccagcctgggcgggacgctcggccgcgg

SEQ ID NO: 16491 - DNA, 28 bp, synthetic construct
  source 1..28: mol_type = other DNA
ctcgccgcggccgagcgtcccgcccagg

SEQ ID NO: 16492 - DNA, 28 bp, synthetic construct
  source 1..28: mol_type = other DNA
ctgggcgggacgctcggccgcggcgagg

SEQ ID NO: 16493 - DNA, 28 bp, synthetic construct
  source 1..28: mol_type = other DNA
ggcgggacgctcggccgcggcgaggcgg

SEQ ID NO: 16494 - DNA, 28 bp, synthetic construct
  source 1..28: mol_type = other DNA
gcgggacgctcggccgcggcgaggcggg

SEQ ID NO: 16495 - DNA, 28 bp, synthetic construct
  source 1..28: mol_type = other DNA
tcggccgcggcgaggcgggcaagcctgg

SEQ ID NO: 16496 - DNA, 28 bp, synthetic construct
  source 1..28: mol_type = other DNA
ccgcggcgaggcgggcaagcctggcagg

SEQ ID NO: 16497 - DNA, 28 bp, synthetic construct
  source 1..28: mol_type = other DNA
cgcggcgaggcgggcaagcctggcaggg

SEQ ID NO: 16498 - DNA, 28 bp, synthetic construct
  source 1..28: mol_type = other DNA
gaggcgggcaagcctggcagggcagagg

SEQ ID NO: 16499 - DNA, 28 bp, synthetic construct
  source 1..28: mol_type = other DNA
aggcgggcaagcctggcagggcagaggg

SEQ ID NO: 16500 - DNA, 28 bp, synthetic construct
  source 1..28: mol_type = other DNA
aagcctggcagggcagagggagccccgg

SEQ ID NO: 16501 - DNA, 28 bp, synthetic construct
  source 1..28: mol_type = other DNA
gagccggggctccctctgccctgccagg

SEQ ID NO: 16502 - DNA, 28 bp, synthetic construct
  source 1..28: mol_type = other DNA
cagggcagagggagccccggctccgagg

SEQ ID NO: 16503 - DNA, 28 bp, synthetic construct
  source 1..28: mol_type = other DNA
ggtgcgaagagcaacctcggagccgggg

SEQ ID NO: 16504 - DNA, 28 bp, synthetic construct
  source 1..28: mol_type = other DNA
gggtgcgaagagcaacctcggagccggg

SEQ ID NO: 16505 - DNA, 28 bp, synthetic construct
  source 1..28: mol_type = other DNA
cgggtgcgaagagcaacctcggagccgg

SEQ ID NO: 16506 - DNA, 28 bp, synthetic construct
  source 1..28: mol_type = other DNA
gctccgaggttgctcttcgcacccgagg

SEQ ID NO: 16507 - DNA, 28 bp, synthetic construct
  source 1..28: mol_type = other DNA
gatcctcgggtgcgaagagcaacctcgg

SEQ ID NO: 16508 - DNA, 28 bp, synthetic construct
  source 1..28: mol_type = other DNA
gctcttcgcacccgaggatcagtcttgg

SEQ ID NO: 16509 - DNA, 28 bp, synthetic construct
  source 1..28: mol_type = other DNA
cgctttggggccaagactgatcctcggg

SEQ ID NO: 16510 - DNA, 28 bp, synthetic construct
  source 1..28: mol_type = other DNA
gcgctttggggccaagactgatcctcgg

SEQ ID NO: 16511 - DNA, 28 bp, synthetic construct
  source 1..28: mol_type = other DNA
acgtggatttgtgcgtcgcgctttgggg

SEQ ID NO: 16512 - DNA, 28 bp, synthetic construct
  source 1..28: mol_type = other DNA
cacgtggatttgtgcgtcgcgctttggg

SEQ ID NO: 16513 - DNA, 28 bp, synthetic construct
  source 1..28: mol_type = other DNA
tcacgtggatttgtgcgtcgcgctttgg

SEQ ID NO: 16514 - DNA, 28 bp, synthetic construct
  source 1..28: mol_type = other DNA
gaaattcaatttgaaaacactcacgtgg

SEQ ID NO: 16515 - DNA, 28 bp, synthetic construct
  source 1..28: mol_type = other DNA
agtggttccacctttctctgcaccctgg

SEQ ID NO: 16516 - DNA, 28 bp, synthetic construct
  source 1..28: mol_type = other DNA
ggttccacctttctctgcaccctggtgg

SEQ ID NO: 16517 - DNA, 28 bp, synthetic construct
  source 1..28: mol_type = other DNA
cactccaccagggtgcagagaaaggtgg

SEQ ID NO: 16518 - DNA, 28 bp, synthetic construct
  source 1..28: mol_type = other DNA
tcacactccaccagggtgcagagaaagg

SEQ ID NO: 16519 - DNA, 28 bp, synthetic construct
  source 1..28: mol_type = other DNA
ttctctgcaccctggtggagtgtgaagg

SEQ ID NO: 16520 - DNA, 28 bp, synthetic construct
  source 1..28: mol_type = other DNA
ccctggtggagtgtgaaggcagcagagg

SEQ ID NO: 16521 - DNA, 28 bp, synthetic construct
  source 1..28: mol_type = other DNA
tcctctgctgccttcacactccaccagg

SEQ ID NO: 16522 - DNA, 28 bp, synthetic construct
  source 1..28: mol_type = other DNA
gtgtgaaggcagcagaggaaccttttgg

SEQ ID NO: 16523 - DNA, 28 bp, synthetic construct
  source 1..28: mol_type = other DNA
tgaaggcagcagaggaaccttttggagg

SEQ ID NO: 16524 - DNA, 28 bp, synthetic construct
  source 1..28: mol_type = other DNA
aggcagcagaggaaccttttggaggagg

SEQ ID NO: 16525 - DNA, 28 bp, synthetic construct
  source 1..28: mol_type = other DNA
cagaggaaccttttggaggaggaagagg

SEQ ID NO: 16526 - DNA, 28 bp, synthetic construct
  source 1..28: mol_type = other DNA
ctctgtgtcctcttcctcctccaaaagg

SEQ ID NO: 16527 - DNA, 28 bp, synthetic construct
  source 1..28: mol_type = other DNA
cttttggaggaggaagaggacacagagg

SEQ ID NO: 16528 - DNA, 28 bp, synthetic construct
  source 1..28: mol_type = other DNA
aagaggacacagaggccctgtagccagg

SEQ ID NO: 16529 - DNA, 28 bp, synthetic construct
  source 1..28: mol_type = other DNA
ggagggatcttggtgcctggctacaggg

SEQ ID NO: 16530 - DNA, 28 bp, synthetic construct
  source 1..28: mol_type = other DNA
gggagggatcttggtgcctggctacagg

SEQ ID NO: 16531 - DNA, 28 bp, synthetic construct
  source 1..28: mol_type = other DNA
gtagccaggcaccaagatccctcccagg

SEQ ID NO: 16532 - DNA, 28 bp, synthetic construct
  source 1..28: mol_type = other DNA
gccaggcaccaagatccctcccaggtgg

SEQ ID NO: 16533 - DNA, 28 bp, synthetic construct
  source 1..28: mol_type = other DNA
gccacctgggagggatcttggtgcctgg

SEQ ID NO: 16534 - DNA, 28 bp, synthetic construct
  source 1..28: mol_type = other DNA
ggcaccaagatccctcccaggtggctgg

SEQ ID NO: 16535 - DNA, 28 bp, synthetic construct
  source 1..28: mol_type = other DNA
gcaccaagatccctcccaggtggctggg

SEQ ID NO: 16536 - DNA, 28 bp, synthetic construct
  source 1..28: mol_type = other DNA
agacccagccacctgggagggatcttgg

SEQ ID NO: 16537 - DNA, 28 bp, synthetic construct
  source 1..28: mol_type = other DNA
gatccctcccaggtggctgggtctgagg

SEQ ID NO: 16538 - DNA, 28 bp, synthetic construct
  source 1..28: mol_type = other DNA
atccctcccaggtggctgggtctgaggg

SEQ ID NO: 16539 - DNA, 28 bp, synthetic construct
  source 1..28: mol_type = other DNA
tccctcccaggtggctgggtctgagggg

SEQ ID NO: 16540 - DNA, 28 bp, synthetic construct
  source 1..28: mol_type = other DNA
tcccctcagacccagccacctgggaggg

SEQ ID NO: 16541 - DNA, 28 bp, synthetic construct
  source 1..28: mol_type = other DNA
ttcccctcagacccagccacctgggagg

SEQ ID NO: 16542 - DNA, 28 bp, synthetic construct
  source 1..28: mol_type = other DNA
gagttcccctcagacccagccacctggg

SEQ ID NO: 16543 - DNA, 28 bp, synthetic construct
  source 1..28: mol_type = other DNA
ggagttcccctcagacccagccacctgg

SEQ ID NO: 16544 - DNA, 28 bp, synthetic construct
  source 1..28: mol_type = other DNA
tctgaggggaactccgagcagccctagg

SEQ ID NO: 16545 - DNA, 28 bp, synthetic construct
  source 1..28: mol_type = other DNA
cagactttgaggacctagggctgctcgg

SEQ ID NO: 16546 - DNA, 28 bp, synthetic construct
  source 1..28: mol_type = other DNA
cgagcagccctaggtcctcaaagtctgg

SEQ ID NO: 16547 - DNA, 28 bp, synthetic construct
  source 1..28: mol_type = other DNA
cacaaatccagactttgaggacctaggg

SEQ ID NO: 16548 - DNA, 28 bp, synthetic construct
  source 1..28: mol_type = other DNA
acacaaatccagactttgaggacctagg

SEQ ID NO: 16549 - DNA, 28 bp, synthetic construct
  source 1..28: mol_type = other DNA
taggtcctcaaagtctggatttgtgtgg

SEQ ID NO: 16550 - DNA, 28 bp, synthetic construct
  source 1..28: mol_type = other DNA
cttttccacacaaatccagactttgagg

SEQ ID NO: 16551 - DNA, 28 bp, synthetic construct
  source 1..28: mol_type = other DNA
ctcaaagtctggatttgtgtggaaaagg

SEQ ID NO: 16552 - DNA, 28 bp, synthetic construct
  source 1..28: mol_type = other DNA
ttgtgtggaaaaggcagctctcacttgg

SEQ ID NO: 16553 - DNA, 28 bp, synthetic construct
  source 1..28: mol_type = other DNA
ggaaaaggcagctctcacttggccttgg

SEQ ID NO: 16554 - DNA, 28 bp, synthetic construct
  source 1..28: mol_type = other DNA
aggcagctctcacttggccttggcgagg

SEQ ID NO: 16555 - DNA, 28 bp, synthetic construct
  source 1..28: mol_type = other DNA
ctctcacttggccttggcgaggcctcgg

SEQ ID NO: 16556 - DNA, 28 bp, synthetic construct
  source 1..28: mol_type = other DNA
cacttggccttggcgaggcctcggttgg

SEQ ID NO: 16557 - DNA, 28 bp, synthetic construct
  source 1..28: mol_type = other DNA
tggccttggcgaggcctcggttggttgg

SEQ ID NO: 16558 - DNA, 28 bp, synthetic construct
  source 1..28: mol_type = other DNA
tcaccaaccaaccgaggcctcgccaagg

SEQ ID NO: 16559 - DNA, 28 bp, synthetic construct
  source 1..28: mol_type = other DNA
cctcggttggttggtgagtgccacacgg

SEQ ID NO: 16560 - DNA, 28 bp, synthetic construct
  source 1..28: mol_type = other DNA
acacggggagaagtgacgctcactacgg

SEQ ID NO: 16561 - DNA, 28 bp, synthetic construct
  source 1..28: mol_type = other DNA
gtcacttctccccgtgtaagagtgctgg

SEQ ID NO: 16562 - DNA, 28 bp, synthetic construct
  source 1..28: mol_type = other DNA
tctccccgtgtaagagtgctggtgaagg

SEQ ID NO: 16563 - DNA, 28 bp, synthetic construct
  source 1..28: mol_type = other DNA
cagccttcaccagcactcttacacgggg

SEQ ID NO: 16564 - DNA, 28 bp, synthetic construct
  source 1..28: mol_type = other DNA
tcagccttcaccagcactcttacacggg

SEQ ID NO: 16565 - DNA, 28 bp, synthetic construct
  source 1..28: mol_type = other DNA
ctcagccttcaccagcactcttacacgg

SEQ ID NO: 16566 - DNA, 28 bp, synthetic construct
  source 1..28: mol_type = other DNA
cgtgtaagagtgctggtgaaggctgagg

SEQ ID NO: 16567 - DNA, 28 bp, synthetic construct
  source 1..28: mol_type = other DNA
aagagtgctggtgaaggctgaggcaagg

SEQ ID NO: 16568 - DNA, 28 bp, synthetic construct
  source 1..28: mol_type = other DNA
agagtgctggtgaaggctgaggcaaggg

SEQ ID NO: 16569 - DNA, 28 bp, synthetic construct
  source 1..28: mol_type = other DNA
ctgaggcaagggcccagaaagattgagg

SEQ ID NO: 16570 - DNA, 28 bp, synthetic construct
  source 1..28: mol_type = other DNA
tgaggcaagggcccagaaagattgaggg

SEQ ID NO: 16571 - DNA, 28 bp, synthetic construct
  source 1..28: mol_type = other DNA
cccagaaagattgagggacaaagacagg

SEQ ID NO: 16572 - DNA, 28 bp, synthetic construct
  source 1..28: mol_type = other DNA
tcctgtctttgtccctcaatctttctgg

SEQ ID NO: 16573 - DNA, 28 bp, synthetic construct
  source 1..28: mol_type = other DNA
ggagcgcccgcattgcccatctgccagg

SEQ ID NO: 16574 - DNA, 28 bp, synthetic construct
  source 1..28: mol_type = other DNA
cgcccgcattgcccatctgccaggctgg

SEQ ID NO: 16575 - DNA, 28 bp, synthetic construct
  source 1..28: mol_type = other DNA
ctccagcctggcagatgggcaatgcggg

SEQ ID NO: 16576 - DNA, 28 bp, synthetic construct
  source 1..28: mol_type = other DNA
ccgcattgcccatctgccaggctggagg

SEQ ID NO: 16577 - DNA, 28 bp, synthetic construct
  source 1..28: mol_type = other DNA
tgaatacacctccagcctggcagatggg

SEQ ID NO: 16578 - DNA, 28 bp, synthetic construct
  source 1..28: mol_type = other DNA
atgaatacacctccagcctggcagatgg

SEQ ID NO: 16579 - DNA, 28 bp, synthetic construct
  source 1..28: mol_type = other DNA
atcaataatgaatacacctccagcctgg

SEQ ID NO: 16580 - DNA, 28 bp, synthetic construct
  source 1..28: mol_type = other DNA
aggctggaggtgtattcattattgatgg

SEQ ID NO: 16581 - DNA, 28 bp, synthetic construct
  source 1..28: mol_type = other DNA
ctggaggtgtattcattattgatggagg

SEQ ID NO: 16582 - DNA, 28 bp, synthetic construct
  source 1..28: mol_type = other DNA
tgctgctcagatatgcagccctgcctgg

SEQ ID NO: 16583 - DNA, 28 bp, synthetic construct
  source 1..28: mol_type = other DNA
gctgctcagatatgcagccctgcctggg

SEQ ID NO: 16584 - DNA, 28 bp, synthetic construct
  source 1..28: mol_type = other DNA
gaagaatgtctcatttacccaggcaggg

SEQ ID NO: 16585 - DNA, 28 bp, synthetic construct
  source 1..28: mol_type = other DNA
tgaagaatgtctcatttacccaggcagg

SEQ ID NO: 16586 - DNA, 28 bp, synthetic construct
  source 1..28: mol_type = other DNA
ttgctgaagaatgtctcatttacccagg

SEQ ID NO: 16587 - DNA, 28 bp, synthetic construct
  source 1..28: mol_type = other DNA
tcaggttatctgagaaagagaggaaggg

SEQ ID NO: 16588 - DNA, 28 bp, synthetic construct
  source 1..28: mol_type = other DNA
ctcaggttatctgagaaagagaggaagg

SEQ ID NO: 16589 - DNA, 28 bp, synthetic construct
  source 1..28: mol_type = other DNA
cttcctctctttctcagataacctgagg

SEQ ID NO: 16590 - DNA, 28 bp, synthetic construct
  source 1..28: mol_type = other DNA
ggtcctcaggttatctgagaaagagagg

SEQ ID NO: 16591 - DNA, 28 bp, synthetic construct
  source 1..28: mol_type = other DNA
tctttctcagataacctgaggaccatgg

SEQ ID NO: 16592 - DNA, 28 bp, synthetic construct
  source 1..28: mol_type = other DNA
aacctgaggaccatggatgctgatgagg

SEQ ID NO: 16593 - DNA, 28 bp, synthetic construct
  source 1..28: mol_type = other DNA
acctgaggaccatggatgctgatgaggg

SEQ ID NO: 16594 - DNA, 28 bp, synthetic construct
  source 1..28: mol_type = other DNA
accctcatcagcatccatggtcctcagg

SEQ ID NO: 16595 - DNA, 28 bp, synthetic construct
  source 1..28: mol_type = other DNA
atgtcttgaccctcatcagcatccatgg

SEQ ID NO: 16596 - DNA, 28 bp, synthetic construct
  source 1..28: mol_type = other DNA
agggtcaagacatgtcccaagtttcagg

SEQ ID NO: 16597 - DNA, 28 bp, synthetic construct
  source 1..28: mol_type = other DNA
tctcataaggtctcacctgaaacttggg

SEQ ID NO: 16598 - DNA, 28 bp, synthetic construct
  source 1..28: mol_type = other DNA
atctcataaggtctcacctgaaacttgg

SEQ ID NO: 16599 - DNA, 28 bp, synthetic construct
  source 1..28: mol_type = other DNA
ggtgagaccttatgagatagctgtgtgg

SEQ ID NO: 16600 - DNA, 28 bp, synthetic construct
  source 1..28: mol_type = other DNA
agactcacacttcttctttctcatcagg

SEQ ID NO: 16601 - DNA, 28 bp, synthetic construct
  source 1..28: mol_type = other DNA
gactcacacttcttctttctcatcaggg

SEQ ID NO: 16602 - DNA, 28 bp, synthetic construct
  source 1..28: mol_type = other DNA
cacacttcttctttctcatcagggaagg

SEQ ID NO: 16603 - DNA, 28 bp, synthetic construct
  source 1..28: mol_type = other DNA
ctcatctggagtatcgcttacagggggg

SEQ ID NO: 16604 - DNA, 28 bp, synthetic construct
  source 1..28: mol_type = other DNA
ccccctgtaagcgatactccagatgagg

SEQ ID NO: 16605 - DNA, 28 bp, synthetic construct
  source 1..28: mol_type = other DNA
cccctgtaagcgatactccagatgaggg

SEQ ID NO: 16606 - DNA, 28 bp, synthetic construct
  source 1..28: mol_type = other DNA
gccctcatctggagtatcgcttacaggg

SEQ ID NO: 16607 - DNA, 28 bp, synthetic construct
  source 1..28: mol_type = other DNA
cgccctcatctggagtatcgcttacagg

SEQ ID NO: 16608 - DNA, 28 bp, synthetic construct
  source 1..28: mol_type = other DNA
tcggcatgggctcatcgccctcatctgg

SEQ ID NO: 16609 - DNA, 28 bp, synthetic construct
  source 1..28: mol_type = other DNA
ggcgatgagcccatgccgatccccgagg

SEQ ID NO: 16610 - DNA, 28 bp, synthetic construct
  source 1..28: mol_type = other DNA
tggagaggtcctcggggatcggcatggg

SEQ ID NO: 16611 - DNA, 28 bp, synthetic construct
  source 1..28: mol_type = other DNA
gtggagaggtcctcggggatcggcatgg

SEQ ID NO: 16612 - DNA, 28 bp, synthetic construct
  source 1..28: mol_type = other DNA
aggtggtggagaggtcctcggggatcgg

SEQ ID NO: 16613 - DNA, 28 bp, synthetic construct
  source 1..28: mol_type = other DNA
atccccgaggacctctccaccacctcgg

SEQ ID NO: 16614 - DNA, 28 bp, synthetic construct
  source 1..28: mol_type = other DNA
tccccgaggacctctccaccacctcggg

SEQ ID NO: 16615 - DNA, 28 bp, synthetic construct
  source 1..28: mol_type = other DNA
tcccgaggtggtggagaggtcctcgggg

SEQ ID NO: 16616 - DNA, 28 bp, synthetic construct
  source 1..28: mol_type = other DNA
ctcccgaggtggtggagaggtcctcggg

SEQ ID NO: 16617 - DNA, 28 bp, synthetic construct
  source 1..28: mol_type = other DNA
ccgaggacctctccaccacctcgggagg

SEQ ID NO: 16618 - DNA, 28 bp, synthetic construct
  source 1..28: mol_type = other DNA
ttgctgtcctcccgaggtggtggagagg

SEQ ID NO: 16619 - DNA, 28 bp, synthetic construct
  source 1..28: mol_type = other DNA
gagctttgctgtcctcccgaggtggtgg

SEQ ID NO: 16620 - DNA, 28 bp, synthetic construct
  source 1..28: mol_type = other DNA
ttggagctttgctgtcctcccgaggtgg

SEQ ID NO: 16621 - DNA, 28 bp, synthetic construct
  source 1..28: mol_type = other DNA
ctcttggagctttgctgtcctcccgagg

SEQ ID NO: 16622 - DNA, 28 bp, synthetic construct
  source 1..28: mol_type = other DNA
caaagctccaagagtgacagagtcgtgg

SEQ ID NO: 16623 - DNA, 28 bp, synthetic construct
  source 1..28: mol_type = other DNA
aaagctccaagagtgacagagtcgtggg

SEQ ID NO: 16624 - DNA, 28 bp, synthetic construct
  source 1..28: mol_type = other DNA
cacttacccacgactctgtcactcttgg

SEQ ID NO: 16625 - DNA, 28 bp, synthetic construct
  source 1..28: mol_type = other DNA
caagagtgacagagtcgtgggtaagtgg

SEQ ID NO: 16626 - DNA, 28 bp, synthetic construct
  source 1..28: mol_type = other DNA
aagagtgacagagtcgtgggtaagtggg

SEQ ID NO: 16627 - DNA, 28 bp, synthetic construct
  source 1..28: mol_type = other DNA
gagtcgtgggtaagtgggtcaccagcgg

SEQ ID NO: 16628 - DNA, 28 bp, synthetic construct
  source 1..28: mol_type = other DNA
ttagtgtttcagaatgagaccaaagcgg

SEQ ID NO: 16629 - DNA, 28 bp, synthetic construct
  source 1..28: mol_type = other DNA
gaagaggttgaaaatgtcaccgctttgg

SEQ ID NO: 16630 - DNA, 28 bp, synthetic construct
  source 1..28: mol_type = other DNA
aaagcggtgacattttcaacctcttcgg

SEQ ID NO: 16631 - DNA, 28 bp, synthetic construct
  source 1..28: mol_type = other DNA
tgaaaaaactgaagagagaccgaagagg

SEQ ID NO: 16632 - DNA, 28 bp, synthetic construct
  source 1..28: mol_type = other DNA
tttttgttgtgcttctatcacttaaagg

SEQ ID NO: 16633 - DNA, 28 bp, synthetic construct
  source 1..28: mol_type = other DNA
tcattagtatttgatttcaacttggagg

SEQ ID NO: 16634 - DNA, 28 bp, synthetic construct
  source 1..28: mol_type = other DNA
atgtcattagtatttgatttcaacttgg

SEQ ID NO: 16635 - DNA, 28 bp, synthetic construct
  source 1..28: mol_type = other DNA
tataaatgtgtttttattatttattagg

SEQ ID NO: 16636 - DNA, 28 bp, synthetic construct
  source 1..28: mol_type = other DNA
tatttattaggaaatttattttacttgg

SEQ ID NO: 16637 - DNA, 28 bp, synthetic construct
  source 1..28: mol_type = other DNA
cttggccctcagccatgacatatcatgg

SEQ ID NO: 16638 - DNA, 28 bp, synthetic construct
  source 1..28: mol_type = other DNA
ttatgccatgatatgtcatggctgaggg

SEQ ID NO: 16639 - DNA, 28 bp, synthetic construct
  source 1..28: mol_type = other DNA
attatgccatgatatgtcatggctgagg

SEQ ID NO: 16640 - DNA, 28 bp, synthetic construct
  source 1..28: mol_type = other DNA
atagtgattatgccatgatatgtcatgg

SEQ ID NO: 16641 - DNA, 28 bp, synthetic construct
  source 1..28: mol_type = other DNA
atgcaaggataagatatacaaatttagg

SEQ ID NO: 16642 - DNA, 28 bp, synthetic construct
  source 1..28: mol_type = other DNA
aatttgtatatcttatccttgcataagg

SEQ ID NO: 16643 - DNA, 28 bp, synthetic construct
  source 1..28: mol_type = other DNA
ttcatagaaagtcttaccttatgcaagg

SEQ ID NO: 16644 - DNA, 28 bp, synthetic construct
  source 1..28: mol_type = other DNA
aaaaaattcttaaaatatgtaagagagg

SEQ ID NO: 16645 - DNA, 28 bp, synthetic construct
  source 1..28: mol_type = other DNA
gcaaatgaaatattgctcataagccagg

SEQ ID NO: 16646 - DNA, 28 bp, synthetic construct
  source 1..28: mol_type = other DNA
gaaatattgctcataagccaggtgatgg

SEQ ID NO: 16647 - DNA, 28 bp, synthetic construct
  source 1..28: mol_type = other DNA
aaaagaggcgtggacagccatcacctgg

SEQ ID NO: 16648 - DNA, 28 bp, synthetic construct
  source 1..28: mol_type = other DNA
aagggtaagcaggggaaaagaggcgtgg

SEQ ID NO: 16649 - DNA, 28 bp, synthetic construct
  source 1..28: mol_type = other DNA
taagcaagggtaagcaggggaaaagagg

SEQ ID NO: 16650 - DNA, 28 bp, synthetic construct
  source 1..28: mol_type = other DNA
ataagatctaagcaagggtaagcagggg

SEQ ID NO: 16651 - DNA, 28 bp, synthetic construct
  source 1..28: mol_type = other DNA
cataagatctaagcaagggtaagcaggg

SEQ ID NO: 16652 - DNA, 28 bp, synthetic construct
  source 1..28: mol_type = other DNA
cctgcttacccttgcttagatcttatgg

SEQ ID NO: 16653 - DNA, 28 bp, synthetic construct
  source 1..28: mol_type = other DNA
agattctaccataagatctaagcaaggg

SEQ ID NO: 16654 - DNA, 28 bp, synthetic construct
  source 1..28: mol_type = other DNA
aagattctaccataagatctaagcaagg

SEQ ID NO: 16655 - DNA, 28 bp, synthetic construct
  source 1..28: mol_type = other DNA
cacagaaagacatgaaagaaagagctgg

SEQ ID NO: 16656 - DNA, 28 bp, synthetic construct
  source 1..28: mol_type = other DNA
tgaaagaaagagctggagaagcctgagg

SEQ ID NO: 16657 - DNA, 28 bp, synthetic construct
  source 1..28: mol_type = other DNA
gaaagaaagagctggagaagcctgaggg

SEQ ID NO: 16658 - DNA, 28 bp, synthetic construct
  source 1..28: mol_type = other DNA
aaagaaagagctggagaagcctgagggg

SEQ ID NO: 16659 - DNA, 28 bp, synthetic construct
  source 1..28: mol_type = other DNA
gaagcctgaggggctgcccagtgagtgg

SEQ ID NO: 16660 - DNA, 28 bp, synthetic construct
  source 1..28: mol_type = other DNA
cagaccactcactgggcagcccctcagg

SEQ ID NO: 16661 - DNA, 28 bp, synthetic construct
  source 1..28: mol_type = other DNA
ggggctgcccagtgagtggtctgctagg

SEQ ID NO: 16662 - DNA, 28 bp, synthetic construct
  source 1..28: mol_type = other DNA
acagcatcctagcagaccactcactggg

SEQ ID NO: 16663 - DNA, 28 bp, synthetic construct
  source 1..28: mol_type = other DNA
cacagcatcctagcagaccactcactgg

SEQ ID NO: 16664 - DNA, 28 bp, synthetic construct
  source 1..28: mol_type = other DNA
ctgctaggatgctgtgccacagcccagg

SEQ ID NO: 16665 - DNA, 28 bp, synthetic construct
  source 1..28: mol_type = other DNA
ggatgctgtgccacagcccaggcacagg

SEQ ID NO: 16666 - DNA, 28 bp, synthetic construct
  source 1..28: mol_type = other DNA
tgctgtgccacagcccaggcacaggagg

SEQ ID NO: 16667 - DNA, 28 bp, synthetic construct
  source 1..28: mol_type = other DNA
gtgccacagcccaggcacaggaggcagg

SEQ ID NO: 16668 - DNA, 28 bp, synthetic construct
  source 1..28: mol_type = other DNA
tgccacagcccaggcacaggaggcaggg

SEQ ID NO: 16669 - DNA, 28 bp, synthetic construct
  source 1..28: mol_type = other DNA
ctccctgcctcctgtgcctgggctgtgg

SEQ ID NO: 16670 - DNA, 28 bp, synthetic construct
  source 1..28: mol_type = other DNA
attgctctccctgcctcctgtgcctggg

SEQ ID NO: 16671 - DNA, 28 bp, synthetic construct
  source 1..28: mol_type = other DNA
cattgctctccctgcctcctgtgcctgg

SEQ ID NO: 16672 - DNA, 28 bp, synthetic construct
  source 1..28: mol_type = other DNA
caggcacaggaggcagggagagcaatgg

SEQ ID NO: 16673 - DNA, 28 bp, synthetic construct
  source 1..28: mol_type = other DNA
aggcacaggaggcagggagagcaatggg

SEQ ID NO: 16674 - DNA, 28 bp, synthetic construct
  source 1..28: mol_type = other DNA
ggcacaggaggcagggagagcaatgggg

SEQ ID NO: 16675 - DNA, 28 bp, synthetic construct
  source 1..28: mol_type = other DNA
tctgctgaatgttggtggaagggaaggg

SEQ ID NO: 16676 - DNA, 28 bp, synthetic construct
  source 1..28: mol_type = other DNA
ttctgctgaatgttggtggaagggaagg

SEQ ID NO: 16677 - DNA, 28 bp, synthetic construct
  source 1..28: mol_type = other DNA
caaattctgctgaatgttggtggaaggg

SEQ ID NO: 16678 - DNA, 28 bp, synthetic construct
  source 1..28: mol_type = other DNA
gcaaattctgctgaatgttggtggaagg

SEQ ID NO: 16679 - DNA, 28 bp, synthetic construct
  source 1..28: mol_type = other DNA
agctgcaaattctgctgaatgttggtgg

SEQ ID NO: 16680 - DNA, 28 bp, synthetic construct
  source 1..28: mol_type = other DNA
tggagctgcaaattctgctgaatgttgg

SEQ ID NO: 16681 - DNA, 28 bp, synthetic construct
  source 1..28: mol_type = other DNA
gcagctccatgtttccaaagcttccagg

SEQ ID NO: 16682 - DNA, 28 bp, synthetic construct
  source 1..28: mol_type = other DNA
cagctccatgtttccaaagcttccaggg

SEQ ID NO: 16683 - DNA, 28 bp, synthetic construct
  source 1..28: mol_type = other DNA
aagtgccctggaagctttggaaacatgg

SEQ ID NO: 16684 - DNA, 28 bp, synthetic construct
  source 1..28: mol_type = other DNA
ctaaatgcaagtgccctggaagctttgg

SEQ ID NO: 16685 - DNA, 28 bp, synthetic construct
  source 1..28: mol_type = other DNA
tctctctctctaaatgcaagtgccctgg

SEQ ID NO: 16686 - DNA, 28 bp, synthetic construct
  source 1..28: mol_type = other DNA
ggctggcagaactgaggaagaggaaagg

SEQ ID NO: 16687 - DNA, 28 bp, synthetic construct
  source 1..28: mol_type = other DNA
agtgtggctggcagaactgaggaagagg

SEQ ID NO: 16688 - DNA, 28 bp, synthetic construct
  source 1..28: mol_type = other DNA
ggcaagagtgtggctggcagaactgagg

SEQ ID NO: 16689 - DNA, 28 bp, synthetic construct
  source 1..28: mol_type = other DNA
ctgctcatcatggcaagagtgtggctgg

SEQ ID NO: 16690 - DNA, 28 bp, synthetic construct
  source 1..28: mol_type = other DNA
gaaactgctcatcatggcaagagtgtgg

SEQ ID NO: 16691 - DNA, 28 bp, synthetic construct
  source 1..28: mol_type = other DNA
agcttttggctgaaactgctcatcatgg

SEQ ID NO: 16692 - DNA, 28 bp, synthetic construct
  source 1..28: mol_type = other DNA
gtgttagggcaggggaaggagcttttgg

SEQ ID NO: 16693 - DNA, 28 bp, synthetic construct
  source 1..28: mol_type = other DNA
ttgcaggaggtgttagggcaggggaagg

SEQ ID NO: 16694 - DNA, 28 bp, synthetic construct
  source 1..28: mol_type = other DNA
ttcccctgccctaacacctcctgcaagg

SEQ ID NO: 16695 - DNA, 28 bp, synthetic construct
  source 1..28: mol_type = other DNA
ggccttgcaggaggtgttagggcagggg

SEQ ID NO: 16696 - DNA, 28 bp, synthetic construct
  source 1..28: mol_type = other DNA
aggccttgcaggaggtgttagggcaggg

SEQ ID NO: 16697 - DNA, 28 bp, synthetic construct
  source 1..28: mol_type = other DNA
caggccttgcaggaggtgttagggcagg

SEQ ID NO: 16698 - DNA, 28 bp, synthetic construct
  source 1..28: mol_type = other DNA
gccctaacacctcctgcaaggcctgagg

SEQ ID NO: 16699 - DNA, 28 bp, synthetic construct
  source 1..28: mol_type = other DNA
acctcaggccttgcaggaggtgttaggg

SEQ ID NO: 16700 - DNA, 28 bp, synthetic construct
  source 1..28: mol_type = other DNA
gacctcaggccttgcaggaggtgttagg

SEQ ID NO: 16701 - DNA, 28 bp, synthetic construct
  source 1..28: mol_type = other DNA
aacacctcctgcaaggcctgaggtctgg

SEQ ID NO: 16702 - DNA, 28 bp, synthetic construct
  source 1..28: mol_type = other DNA
gcttccagacctcaggccttgcaggagg

SEQ ID NO: 16703 - DNA, 28 bp, synthetic construct
  source 1..28: mol_type = other DNA
gtggcttccagacctcaggccttgcagg

SEQ ID NO: 16704 - DNA, 28 bp, synthetic construct
  source 1..28: mol_type = other DNA
caggcgcaggtggcttccagacctcagg

SEQ ID NO: 16705 - DNA, 28 bp, synthetic construct
  source 1..28: mol_type = other DNA
aggtctggaagccacctgcgcctgctgg

SEQ ID NO: 16706 - DNA, 28 bp, synthetic construct
  source 1..28: mol_type = other DNA
gaaaggaggggccagcaggcgcaggtgg

SEQ ID NO: 16707 - DNA, 28 bp, synthetic construct
  source 1..28: mol_type = other DNA
caagaaaggaggggccagcaggcgcagg

SEQ ID NO: 16708 - DNA, 28 bp, synthetic construct
  source 1..28: mol_type = other DNA
cagaaacaagaaaggaggggccagcagg

SEQ ID NO: 16709 - DNA, 28 bp, synthetic construct
  source 1..28: mol_type = other DNA
ggcccctcctttcttgtttctgcaatgg

SEQ ID NO: 16710 - DNA, 28 bp, synthetic construct
  source 1..28: mol_type = other DNA
atccattgcagaaacaagaaaggagggg

SEQ ID NO: 16711 - DNA, 28 bp, synthetic construct
  source 1..28: mol_type = other DNA
catccattgcagaaacaagaaaggaggg

SEQ ID NO: 16712 - DNA, 28 bp, synthetic construct
  source 1..28: mol_type = other DNA
acatccattgcagaaacaagaaaggagg

SEQ ID NO: 16713 - DNA, 28 bp, synthetic construct
  source 1..28: mol_type = other DNA
acaacatccattgcagaaacaagaaagg

SEQ ID NO: 16714 - DNA, 28 bp, synthetic construct
  source 1..28: mol_type = other DNA
tttcttgtttctgcaatggatgttgtgg

SEQ ID NO: 16715 - DNA, 28 bp, synthetic construct
  source 1..28: mol_type = other DNA
ctgcaatggatgttgtggccctgtgagg

SEQ ID NO: 16716 - DNA, 28 bp, synthetic construct
  source 1..28: mol_type = other DNA
tgcaatggatgttgtggccctgtgaggg

SEQ ID NO: 16717 - DNA, 28 bp, synthetic construct
  source 1..28: mol_type = other DNA
acttctttttctcttctccctcacaggg

SEQ ID NO: 16718 - DNA, 28 bp, synthetic construct
  source 1..28: mol_type = other DNA
aacttctttttctcttctccctcacagg

SEQ ID NO: 16719 - DNA, 28 bp, synthetic construct
  source 1..28: mol_type = other DNA
gcaggaggtgaggatagagggaggaggg

SEQ ID NO: 16720 - DNA, 28 bp, synthetic construct
  source 1..28: mol_type = other DNA
ggcaggaggtgaggatagagggaggagg

SEQ ID NO: 16721 - DNA, 28 bp, synthetic construct
  source 1..28: mol_type = other DNA
catggcaggaggtgaggatagagggagg

SEQ ID NO: 16722 - DNA, 28 bp, synthetic construct
  source 1..28: mol_type = other DNA
cagcatggcaggaggtgaggatagaggg

SEQ ID NO: 16723 - DNA, 28 bp, synthetic construct
  source 1..28: mol_type = other DNA
acagcatggcaggaggtgaggatagagg

SEQ ID NO: 16724 - DNA, 28 bp, synthetic construct
  source 1..28: mol_type = other DNA
aagggtgacagcatggcaggaggtgagg

SEQ ID NO: 16725 - DNA, 28 bp, synthetic construct
  source 1..28: mol_type = other DNA
cttataagggtgacagcatggcaggagg

SEQ ID NO: 16726 - DNA, 28 bp, synthetic construct
  source 1..28: mol_type = other DNA
tctcttataagggtgacagcatggcagg

SEQ ID NO: 16727 - DNA, 28 bp, synthetic construct
  source 1..28: mol_type = other DNA
cttctctcttataagggtgacagcatgg

SEQ ID NO: 16728 - DNA, 28 bp, synthetic construct
  source 1..28: mol_type = other DNA
catgctgtcacccttataagagagaagg

SEQ ID NO: 16729 - DNA, 28 bp, synthetic construct
  source 1..28: mol_type = other DNA
atgctgtcacccttataagagagaaggg

SEQ ID NO: 16730 - DNA, 28 bp, synthetic construct
  source 1..28: mol_type = other DNA
gatggttagcccttctctcttataaggg

SEQ ID NO: 16731 - DNA, 28 bp, synthetic construct
  source 1..28: mol_type = other DNA
ggatggttagcccttctctcttataagg

SEQ ID NO: 16732 - DNA, 28 bp, synthetic construct
  source 1..28: mol_type = other DNA
tataagagagaagggctaaccatccagg

SEQ ID NO: 16733 - DNA, 28 bp, synthetic construct
  source 1..28: mol_type = other DNA
tgcatcactggaggattagcctggatgg

SEQ ID NO: 16734 - DNA, 28 bp, synthetic construct
  source 1..28: mol_type = other DNA
atccaggctaatcctccagtgatgcagg

SEQ ID NO: 16735 - DNA, 28 bp, synthetic construct
  source 1..28: mol_type = other DNA
ctcctgcatcactggaggattagcctgg

SEQ ID NO: 16736 - DNA, 28 bp, synthetic construct
  source 1..28: mol_type = other DNA
ggctaatcctccagtgatgcaggagagg

SEQ ID NO: 16737 - DNA, 28 bp, synthetic construct
  source 1..28: mol_type = other DNA
aggatgtcctctcctgcatcactggagg

SEQ ID NO: 16738 - DNA, 28 bp, synthetic construct
  source 1..28: mol_type = other DNA
tccagtgatgcaggagaggacatcctgg

SEQ ID NO: 16739 - DNA, 28 bp, synthetic construct
  source 1..28: mol_type = other DNA
gccaggatgtcctctcctgcatcactgg

SEQ ID NO: 16740 - DNA, 28 bp, synthetic construct
  source 1..28: mol_type = other DNA
gtgatgcaggagaggacatcctggccgg

SEQ ID NO: 16741 - DNA, 28 bp, synthetic construct
  source 1..28: mol_type = other DNA
cctggccggaagagtcagagcttccagg

SEQ ID NO: 16742 - DNA, 28 bp, synthetic construct
  source 1..28: mol_type = other DNA
gctcacctggaagctctgactcttccgg

SEQ ID NO: 16743 - DNA, 28 bp, synthetic construct
  source 1..28: mol_type = other DNA
agagtcagagcttccaggtgagctcagg

SEQ ID NO: 16744 - DNA, 28 bp, synthetic construct
  source 1..28: mol_type = other DNA
gtcagagcttccaggtgagctcaggtgg

SEQ ID NO: 16745 - DNA, 28 bp, synthetic construct
  source 1..28: mol_type = other DNA
tcagagcttccaggtgagctcaggtggg

SEQ ID NO: 16746 - DNA, 28 bp, synthetic construct
  source 1..28: mol_type = other DNA
gggggctgacccacctgagctcacctgg

SEQ ID NO: 16747 - DNA, 28 bp, synthetic construct
  source 1..28: mol_type = other DNA
gtgagctcaggtgggtcagcccccgagg

SEQ ID NO: 16748 - DNA, 28 bp, synthetic construct
  source 1..28: mol_type = other DNA
cagcccccgaggctgtgaagagcccagg

SEQ ID NO: 16749 - DNA, 28 bp, synthetic construct
  source 1..28: mol_type = other DNA
agcccccgaggctgtgaagagcccaggg

SEQ ID NO: 16750 - DNA, 28 bp, synthetic construct
  source 1..28: mol_type = other DNA
gcccccgaggctgtgaagagcccagggg

SEQ ID NO: 16751 - DNA, 28 bp, synthetic construct
  source 1..28: mol_type = other DNA
gcccctgggctcttcacagcctcggggg

SEQ ID NO: 16752 - DNA, 28 bp, synthetic construct
  source 1..28: mol_type = other DNA
ggcccctgggctcttcacagcctcgggg

SEQ ID NO: 16753 - DNA, 28 bp, synthetic construct
  source 1..28: mol_type = other DNA
tggcccctgggctcttcacagcctcggg

SEQ ID NO: 16754 - DNA, 28 bp, synthetic construct
  source 1..28: mol_type = other DNA
ctggcccctgggctcttcacagcctcgg

SEQ ID NO: 16755 - DNA, 28 bp, synthetic construct
  source 1..28: mol_type = other DNA
gcaaaagtggcatctactggcccctggg

SEQ ID NO: 16756 - DNA, 28 bp, synthetic construct
  source 1..28: mol_type = other DNA
agcaaaagtggcatctactggcccctgg

SEQ ID NO: 16757 - DNA, 28 bp, synthetic construct
  source 1..28: mol_type = other DNA
ggccagtagatgccacttttgctccagg

SEQ ID NO: 16758 - DNA, 28 bp, synthetic construct
  source 1..28: mol_type = other DNA
ttcctggagcaaaagtggcatctactgg

SEQ ID NO: 16759 - DNA, 28 bp, synthetic construct
  source 1..28: mol_type = other DNA
ttgaagattcttcctggagcaaaagtgg

SEQ ID NO: 16760 - DNA, 28 bp, synthetic construct
  source 1..28: mol_type = other DNA
aaaggacacagttgaagattcttcctgg

SEQ ID NO: 16761 - DNA, 28 bp, synthetic construct
  source 1..28: mol_type = other DNA
tcttcaactgtgtcctttttattcaagg

SEQ ID NO: 16762 - DNA, 28 bp, synthetic construct
  source 1..28: mol_type = other DNA
cttcaactgtgtcctttttattcaaggg

SEQ ID NO: 16763 - DNA, 28 bp, synthetic construct
  source 1..28: mol_type = other DNA
ttcaactgtgtcctttttattcaagggg

SEQ ID NO: 16764 - DNA, 28 bp, synthetic construct
  source 1..28: mol_type = other DNA
tgaaaagagagccccttgaataaaaagg

SEQ ID NO: 16765 - DNA, 28 bp, synthetic construct
  source 1..28: mol_type = other DNA
aatatgtaaaaggattgtgggatcatgg

SEQ ID NO: 16766 - DNA, 28 bp, synthetic construct
  source 1..28: mol_type = other DNA
ggagagaaatatgtaaaaggattgtggg

SEQ ID NO: 16767 - DNA, 28 bp, synthetic construct
  source 1..28: mol_type = other DNA
tggagagaaatatgtaaaaggattgtgg

SEQ ID NO: 16768 - DNA, 28 bp, synthetic construct
  source 1..28: mol_type = other DNA
acaatccttttacatatttctctccagg

SEQ ID NO: 16769 - DNA, 28 bp, synthetic construct
  source 1..28: mol_type = other DNA
atactcctggagagaaatatgtaaaagg

SEQ ID NO: 16770 - DNA, 28 bp, synthetic construct
  source 1..28: mol_type = other DNA
tctctccaggagtatcacatttctgagg

SEQ ID NO: 16771 - DNA, 28 bp, synthetic construct
  source 1..28: mol_type = other DNA
ctctccaggagtatcacatttctgaggg

SEQ ID NO: 16772 - DNA, 28 bp, synthetic construct
  source 1..28: mol_type = other DNA
agggccctcagaaatgtgatactcctgg

SEQ ID NO: 16773 - DNA, 28 bp, synthetic construct
  source 1..28: mol_type = other DNA
tgagggccctgtgcctgttttctgcagg

SEQ ID NO: 16774 - DNA, 28 bp, synthetic construct
  source 1..28: mol_type = other DNA
caacttcctgcagaaaacaggcacaggg

SEQ ID NO: 16775 - DNA, 28 bp, synthetic construct
  source 1..28: mol_type = other DNA
gcaacttcctgcagaaaacaggcacagg

SEQ ID NO: 16776 - DNA, 28 bp, synthetic construct
  source 1..28: mol_type = other DNA
acaacagcaacttcctgcagaaaacagg

SEQ ID NO: 16777 - DNA, 28 bp, synthetic construct
  source 1..28: mol_type = other DNA
tttctgcaggaagttgctgttgtcccgg

SEQ ID NO: 16778 - DNA, 28 bp, synthetic construct
  source 1..28: mol_type = other DNA
ttctgcaggaagttgctgttgtcccggg

SEQ ID NO: 16779 - DNA, 28 bp, synthetic construct
  source 1..28: mol_type = other DNA
agaggtgctgggggcagggggacccggg

SEQ ID NO: 16780 - DNA, 28 bp, synthetic construct
  source 1..28: mol_type = other DNA
cagaggtgctgggggcagggggacccgg

SEQ ID NO: 16781 - DNA, 28 bp, synthetic construct
  source 1..28: mol_type = other DNA
ttgtaacagaggtgctgggggcaggggg

SEQ ID NO: 16782 - DNA, 28 bp, synthetic construct
  source 1..28: mol_type = other DNA
cttgtaacagaggtgctgggggcagggg

SEQ ID NO: 16783 - DNA, 28 bp, synthetic construct
  source 1..28: mol_type = other DNA
tcttgtaacagaggtgctgggggcaggg

SEQ ID NO: 16784 - DNA, 28 bp, synthetic construct
  source 1..28: mol_type = other DNA
ttcttgtaacagaggtgctgggggcagg

SEQ ID NO: 16785 - DNA, 28 bp, synthetic construct
  source 1..28: mol_type = other DNA
ctgcttcttgtaacagaggtgctggggg

SEQ ID NO: 16786 - DNA, 28 bp, synthetic construct
  source 1..28: mol_type = other DNA
tctgcttcttgtaacagaggtgctgggg

SEQ ID NO: 16787 - DNA, 28 bp, synthetic construct
  source 1..28: mol_type = other DNA
gtctgcttcttgtaacagaggtgctggg

SEQ ID NO: 16788 - DNA, 28 bp, synthetic construct
  source 1..28: mol_type = other DNA
ggtctgcttcttgtaacagaggtgctgg

SEQ ID NO: 16789 - DNA, 28 bp, synthetic construct
  source 1..28: mol_type = other DNA
atgaagggtctgcttcttgtaacagagg

SEQ ID NO: 16790 - DNA, 28 bp, synthetic construct
  source 1..28: mol_type = other DNA
aagaagcagacccttcatgccacactgg

SEQ ID NO: 16791 - DNA, 28 bp, synthetic construct
  source 1..28: mol_type = other DNA
agaagcagacccttcatgccacactggg

SEQ ID NO: 16792 - DNA, 28 bp, synthetic construct
  source 1..28: mol_type = other DNA
gacccttcatgccacactgggacccagg

SEQ ID NO: 16793 - DNA, 28 bp, synthetic construct
  source 1..28: mol_type = other DNA
acccttcatgccacactgggacccaggg

SEQ ID NO: 16794 - DNA, 28 bp, synthetic construct
  source 1..28: mol_type = other DNA
tccctgggtcccagtgtggcatgaaggg

SEQ ID NO: 16795 - DNA, 28 bp, synthetic construct
  source 1..28: mol_type = other DNA
ctccctgggtcccagtgtggcatgaagg

SEQ ID NO: 16796 - DNA, 28 bp, synthetic construct
  source 1..28: mol_type = other DNA
cttcatgccacactgggacccagggagg

SEQ ID NO: 16797 - DNA, 28 bp, synthetic construct
  source 1..28: mol_type = other DNA
cttggggcctccctgggtcccagtgtgg

SEQ ID NO: 16798 - DNA, 28 bp, synthetic construct
  source 1..28: mol_type = other DNA
ctgggacccagggaggccccaagccagg

SEQ ID NO: 16799 - DNA, 28 bp, synthetic construct
  source 1..28: mol_type = other DNA
cagcatcctggcttggggcctccctggg

SEQ ID NO: 16800 - DNA, 28 bp, synthetic construct
  source 1..28: mol_type = other DNA
ccagggaggccccaagccaggatgctgg

SEQ ID NO: 16801 - DNA, 28 bp, synthetic construct
  source 1..28: mol_type = other DNA
cagggaggccccaagccaggatgctggg

SEQ ID NO: 16802 - DNA, 28 bp, synthetic construct
  source 1..28: mol_type = other DNA
actaagatcccagcatcctggcttgggg

SEQ ID NO: 16803 - DNA, 28 bp, synthetic construct
  source 1..28: mol_type = other DNA
tactaagatcccagcatcctggcttggg

SEQ ID NO: 16804 - DNA, 28 bp, synthetic construct
  source 1..28: mol_type = other DNA
ttactaagatcccagcatcctggcttgg

SEQ ID NO: 16805 - DNA, 28 bp, synthetic construct
  source 1..28: mol_type = other DNA
agccaggatgctgggatcttagtaaagg

SEQ ID NO: 16806 - DNA, 28 bp, synthetic construct
  source 1..28: mol_type = other DNA
aacctttactaagatcccagcatcctgg

SEQ ID NO: 16807 - DNA, 28 bp, synthetic construct
  source 1..28: mol_type = other DNA
aggatgctgggatcttagtaaaggttgg

SEQ ID NO: 16808 - DNA, 28 bp, synthetic construct
  source 1..28: mol_type = other DNA
aggttggaatgatgtcagaacatagagg

SEQ ID NO: 16809 - DNA, 28 bp, synthetic construct
  source 1..28: mol_type = other DNA
ttggaatgatgtcagaacatagaggagg

SEQ ID NO: 16810 - DNA, 28 bp, synthetic construct
  source 1..28: mol_type = other DNA
cagaattccccccatagcatcatcctgg

SEQ ID NO: 16811 - DNA, 28 bp, synthetic construct
  source 1..28: mol_type = other DNA
aattccccccatagcatcatcctggagg

SEQ ID NO: 16812 - DNA, 28 bp, synthetic construct
  source 1..28: mol_type = other DNA
attccccccatagcatcatcctggaggg

SEQ ID NO: 16813 - DNA, 28 bp, synthetic construct
  source 1..28: mol_type = other DNA
gcgccctccaggatgatgctatgggggg

SEQ ID NO: 16814 - DNA, 28 bp, synthetic construct
  source 1..28: mol_type = other DNA
agcgccctccaggatgatgctatggggg

SEQ ID NO: 16815 - DNA, 28 bp, synthetic construct
  source 1..28: mol_type = other DNA
cagcgccctccaggatgatgctatgggg

SEQ ID NO: 16816 - DNA, 28 bp, synthetic construct
  source 1..28: mol_type = other DNA
tcagcgccctccaggatgatgctatggg

SEQ ID NO: 16817 - DNA, 28 bp, synthetic construct
  source 1..28: mol_type = other DNA
atcagcgccctccaggatgatgctatgg

SEQ ID NO: 16818 - DNA, 28 bp, synthetic construct
  source 1..28: mol_type = other DNA
cagagcacacaaatcagcgccctccagg

SEQ ID NO: 16819 - DNA, 28 bp, synthetic construct
  source 1..28: mol_type = other DNA
agggcgctgatttgtgtgctctgccagg

SEQ ID NO: 16820 - DNA, 28 bp, synthetic construct
  source 1..28: mol_type = other DNA
gctctgccaggttcatctgtgactcagg

SEQ ID NO: 16821 - DNA, 28 bp, synthetic construct
  source 1..28: mol_type = other DNA
ttaaatcctgagtcacagatgaacctgg

SEQ ID NO: 16822 - DNA, 28 bp, synthetic construct
  source 1..28: mol_type = other DNA
ctgtgactcaggatttaaaagccccagg

SEQ ID NO: 16823 - DNA, 28 bp, synthetic construct
  source 1..28: mol_type = other DNA
actcaggatttaaaagccccaggtgtgg

SEQ ID NO: 16824 - DNA, 28 bp, synthetic construct
  source 1..28: mol_type = other DNA
aggcacagaagggacaccacacctgggg

SEQ ID NO: 16825 - DNA, 28 bp, synthetic construct
  source 1..28: mol_type = other DNA
caggcacagaagggacaccacacctggg

SEQ ID NO: 16826 - DNA, 28 bp, synthetic construct
  source 1..28: mol_type = other DNA
gcaggcacagaagggacaccacacctgg

SEQ ID NO: 16827 - DNA, 28 bp, synthetic construct
  source 1..28: mol_type = other DNA
gtgtggtgtcccttctgtgcctgcaagg

SEQ ID NO: 16828 - DNA, 28 bp, synthetic construct
  source 1..28: mol_type = other DNA
aaagacgcaccttgcaggcacagaaggg

SEQ ID NO: 16829 - DNA, 28 bp, synthetic construct
  source 1..28: mol_type = other DNA
taaagacgcaccttgcaggcacagaagg

SEQ ID NO: 16830 - DNA, 28 bp, synthetic construct
  source 1..28: mol_type = other DNA
gagaactgctaaagacgcaccttgcagg

SEQ ID NO: 16831 - DNA, 28 bp, synthetic construct
  source 1..28: mol_type = other DNA
aaggtgcgtctttagcagttctccctgg

SEQ ID NO: 16832 - DNA, 28 bp, synthetic construct
  source 1..28: mol_type = other DNA
gcgtctttagcagttctccctggtgtgg

SEQ ID NO: 16833 - DNA, 28 bp, synthetic construct
  source 1..28: mol_type = other DNA
ctttagcagttctccctggtgtggaagg

SEQ ID NO: 16834 - DNA, 28 bp, synthetic construct
  source 1..28: mol_type = other DNA
gttctccctggtgtggaaggatcagtgg

SEQ ID NO: 16835 - DNA, 28 bp, synthetic construct
  source 1..28: mol_type = other DNA
aagaaccactgatccttccacaccaggg

SEQ ID NO: 16836 - DNA, 28 bp, synthetic construct
  source 1..28: mol_type = other DNA
caagaaccactgatccttccacaccagg

SEQ ID NO: 16837 - DNA, 28 bp, synthetic construct
  source 1..28: mol_type = other DNA
gaaggatcagtggttcttgcagcctagg

SEQ ID NO: 16838 - DNA, 28 bp, synthetic construct
  source 1..28: mol_type = other DNA
gttgggcttgctgtggagggtgcctagg

SEQ ID NO: 16839 - DNA, 28 bp, synthetic construct
  source 1..28: mol_type = other DNA
gcaccctccacagcaagcccaacacagg

SEQ ID NO: 16840 - DNA, 28 bp, synthetic construct
  source 1..28: mol_type = other DNA
gcacctgtgttgggcttgctgtggaggg

SEQ ID NO: 16841 - DNA, 28 bp, synthetic construct
  source 1..28: mol_type = other DNA
agcacctgtgttgggcttgctgtggagg

SEQ ID NO: 16842 - DNA, 28 bp, synthetic construct
  source 1..28: mol_type = other DNA
cacagcacctgtgttgggcttgctgtgg

SEQ ID NO: 16843 - DNA, 28 bp, synthetic construct
  source 1..28: mol_type = other DNA
gcccaacacaggtgctgtgagcagctgg

SEQ ID NO: 16844 - DNA, 28 bp, synthetic construct
  source 1..28: mol_type = other DNA
accagctgctcacagcacctgtgttggg

SEQ ID NO: 16845 - DNA, 28 bp, synthetic construct
  source 1..28: mol_type = other DNA
aaccagctgctcacagcacctgtgttgg

SEQ ID NO: 16846 - DNA, 28 bp, synthetic construct
  source 1..28: mol_type = other DNA
gtgctgtgagcagctggttcatgaacgg

SEQ ID NO: 16847 - DNA, 28 bp, synthetic construct
  source 1..28: mol_type = other DNA
gcagctggttcatgaacggtgatcctgg

SEQ ID NO: 16848 - DNA, 28 bp, synthetic construct
  source 1..28: mol_type = other DNA
cagctggttcatgaacggtgatcctggg

SEQ ID NO: 16849 - DNA, 28 bp, synthetic construct
  source 1..28: mol_type = other DNA
agctggttcatgaacggtgatcctgggg

SEQ ID NO: 16850 - DNA, 28 bp, synthetic construct
  source 1..28: mol_type = other DNA
catgaacggtgatcctggggagaagagg

SEQ ID NO: 16851 - DNA, 28 bp, synthetic construct
  source 1..28: mol_type = other DNA
gaacggtgatcctggggagaagaggagg

SEQ ID NO: 16852 - DNA, 28 bp, synthetic construct
  source 1..28: mol_type = other DNA
cctggggagaagaggaggatgaaaatgg

SEQ ID NO: 16853 - DNA, 28 bp, synthetic construct
  source 1..28: mol_type = other DNA
ggatgaaaatggaaaaccagtgcaaagg

SEQ ID NO: 16854 - DNA, 28 bp, synthetic construct
  source 1..28: mol_type = other DNA
ccagtgcaaaggtgtgtcatccagttgg

SEQ ID NO: 16855 - DNA, 28 bp, synthetic construct
  source 1..28: mol_type = other DNA
tgtgtcatccagttggttactgctgtgg

SEQ ID NO: 16856 - DNA, 28 bp, synthetic construct
  source 1..28: mol_type = other DNA
gtgtcatccagttggttactgctgtggg

SEQ ID NO: 16857 - DNA, 28 bp, synthetic construct
  source 1..28: mol_type = other DNA
ccagttggttactgctgtgggtgcccgg

SEQ ID NO: 16858 - DNA, 28 bp, synthetic construct
  source 1..28: mol_type = other DNA
cagttggttactgctgtgggtgcccggg

SEQ ID NO: 16859 - DNA, 28 bp, synthetic construct
  source 1..28: mol_type = other DNA
gggggctctggtgggatggaagcccggg

SEQ ID NO: 16860 - DNA, 28 bp, synthetic construct
  source 1..28: mol_type = other DNA
tgggggctctggtgggatggaagcccgg

SEQ ID NO: 16861 - DNA, 28 bp, synthetic construct
  source 1..28: mol_type = other DNA
ctggctagtgggggctctggtgggatgg

SEQ ID NO: 16862 - DNA, 28 bp, synthetic construct
  source 1..28: mol_type = other DNA
catcccaccagagcccccactagccagg

SEQ ID NO: 16863 - DNA, 28 bp, synthetic construct
  source 1..28: mol_type = other DNA
atcccaccagagcccccactagccaggg

SEQ ID NO: 16864 - DNA, 28 bp, synthetic construct
  source 1..28: mol_type = other DNA
tgccctggctagtgggggctctggtggg

SEQ ID NO: 16865 - DNA, 28 bp, synthetic construct
  source 1..28: mol_type = other DNA
ctgccctggctagtgggggctctggtgg

SEQ ID NO: 16866 - DNA, 28 bp, synthetic construct
  source 1..28: mol_type = other DNA
aggctgccctggctagtgggggctctgg

SEQ ID NO: 16867 - DNA, 28 bp, synthetic construct
  source 1..28: mol_type = other DNA
agagcccccactagccagggcagcctgg

SEQ ID NO: 16868 - DNA, 28 bp, synthetic construct
  source 1..28: mol_type = other DNA
gcccccactagccagggcagcctggcgg

SEQ ID NO: 16869 - DNA, 28 bp, synthetic construct
  source 1..28: mol_type = other DNA
tccgccaggctgccctggctagtggggg

SEQ ID NO: 16870 - DNA, 28 bp, synthetic construct
  source 1..28: mol_type = other DNA
ctccgccaggctgccctggctagtgggg

SEQ ID NO: 16871 - DNA, 28 bp, synthetic construct
  source 1..28: mol_type = other DNA
cccactagccagggcagcctggcggagg

SEQ ID NO: 16872 - DNA, 28 bp, synthetic construct
  source 1..28: mol_type = other DNA
acctccgccaggctgccctggctagtgg

SEQ ID NO: 16873 - DNA, 28 bp, synthetic construct
  source 1..28: mol_type = other DNA
gatgctcacctccgccaggctgccctgg

SEQ ID NO: 16874 - DNA, 28 bp, synthetic construct
  source 1..28: mol_type = other DNA
aagcagaatgatgctcacctccgccagg

SEQ ID NO: 16875 - DNA, 28 bp, synthetic construct
  source 1..28: mol_type = other DNA
cggaggtgagcatcattctgctttctgg

SEQ ID NO: 16876 - DNA, 28 bp, synthetic construct
  source 1..28: mol_type = other DNA
attctgctttctggctgcacctgtgtgg

SEQ ID NO: 16877 - DNA, 28 bp, synthetic construct
  source 1..28: mol_type = other DNA
gctttggaacgggctctgtccacacagg

SEQ ID NO: 16878 - DNA, 28 bp, synthetic construct
  source 1..28: mol_type = other DNA
gacagagcccgttccaaagcctcccagg

SEQ ID NO: 16879 - DNA, 28 bp, synthetic construct
  source 1..28: mol_type = other DNA
gcccgttccaaagcctcccaggcacagg

SEQ ID NO: 16880 - DNA, 28 bp, synthetic construct
  source 1..28: mol_type = other DNA
cccgttccaaagcctcccaggcacaggg

SEQ ID NO: 16881 - DNA, 28 bp, synthetic construct
  source 1..28: mol_type = other DNA
gccctgtgcctgggaggctttggaacgg

SEQ ID NO: 16882 - DNA, 28 bp, synthetic construct
  source 1..28: mol_type = other DNA
tgtctgccctgtgcctgggaggctttgg

SEQ ID NO: 16883 - DNA, 28 bp, synthetic construct
  source 1..28: mol_type = other DNA
gcttgatgtctgccctgtgcctgggagg

SEQ ID NO: 16884 - DNA, 28 bp, synthetic construct
  source 1..28: mol_type = other DNA
cttgcttgatgtctgccctgtgcctggg

SEQ ID NO: 16885 - DNA, 28 bp, synthetic construct
  source 1..28: mol_type = other DNA
ccaggcacagggcagacatcaagcaagg

SEQ ID NO: 16886 - DNA, 28 bp, synthetic construct
  source 1..28: mol_type = other DNA
caggcacagggcagacatcaagcaaggg

SEQ ID NO: 16887 - DNA, 28 bp, synthetic construct
  source 1..28: mol_type = other DNA
aggcacagggcagacatcaagcaagggg

SEQ ID NO: 16888 - DNA, 28 bp, synthetic construct
  source 1..28: mol_type = other DNA
gcagacatcaagcaaggggcagagctgg

SEQ ID NO: 16889 - DNA, 28 bp, synthetic construct
  source 1..28: mol_type = other DNA
cagacatcaagcaaggggcagagctggg

SEQ ID NO: 16890 - DNA, 28 bp, synthetic construct
  source 1..28: mol_type = other DNA
agacatcaagcaaggggcagagctgggg

SEQ ID NO: 16891 - DNA, 28 bp, synthetic construct
  source 1..28: mol_type = other DNA
tcaagcaaggggcagagctggggcgagg

SEQ ID NO: 16892 - DNA, 28 bp, synthetic construct
  source 1..28: mol_type = other DNA
caagcaaggggcagagctggggcgaggg

SEQ ID NO: 16893 - DNA, 28 bp, synthetic construct
  source 1..28: mol_type = other DNA
aggggcagagctggggcgagggctctgg

SEQ ID NO: 16894 - DNA, 28 bp, synthetic construct
  source 1..28: mol_type = other DNA
ggggcagagctggggcgagggctctggg

SEQ ID NO: 16895 - DNA, 28 bp, synthetic construct
  source 1..28: mol_type = other DNA
tctgggtgcccccgttattgaacacagg

SEQ ID NO: 16896 - DNA, 28 bp, synthetic construct
  source 1..28: mol_type = other DNA
cccccgttattgaacacaggcctgaagg

SEQ ID NO: 16897 - DNA, 28 bp, synthetic construct
  source 1..28: mol_type = other DNA
ccccgttattgaacacaggcctgaaggg

SEQ ID NO: 16898 - DNA, 28 bp, synthetic construct
  source 1..28: mol_type = other DNA
tcccttcaggcctgtgttcaataacggg

SEQ ID NO: 16899 - DNA, 28 bp, synthetic construct
  source 1..28: mol_type = other DNA
ctcccttcaggcctgtgttcaataacgg

SEQ ID NO: 16900 - DNA, 28 bp, synthetic construct
  source 1..28: mol_type = other DNA
aacacaggcctgaagggagcctaagagg

SEQ ID NO: 16901 - DNA, 28 bp, synthetic construct
  source 1..28: mol_type = other DNA
acaggcctgaagggagcctaagaggtgg

SEQ ID NO: 16902 - DNA, 28 bp, synthetic construct
  source 1..28: mol_type = other DNA
gcctgaagggagcctaagaggtggctgg

SEQ ID NO: 16903 - DNA, 28 bp, synthetic construct
  source 1..28: mol_type = other DNA
gccagccacctcttaggctcccttcagg

SEQ ID NO: 16904 - DNA, 28 bp, synthetic construct
  source 1..28: mol_type = other DNA
gaagggagcctaagaggtggctggcagg

SEQ ID NO: 16905 - DNA, 28 bp, synthetic construct
  source 1..28: mol_type = other DNA
tagtatctcctgccagccacctcttagg

SEQ ID NO: 16906 - DNA, 28 bp, synthetic construct
  source 1..28: mol_type = other DNA
gaggtggctggcaggagatactacaagg

SEQ ID NO: 16907 - DNA, 28 bp, synthetic construct
  source 1..28: mol_type = other DNA
aggagatactacaaggcagaaagacagg

SEQ ID NO: 16908 - DNA, 28 bp, synthetic construct
  source 1..28: mol_type = other DNA
ggagatactacaaggcagaaagacaggg

SEQ ID NO: 16909 - DNA, 28 bp, synthetic construct
  source 1..28: mol_type = other DNA
ttttttaagagagaacaaaaagtcaagg

SEQ ID NO: 16910 - DNA, 28 bp, synthetic construct
  source 1..28: mol_type = other DNA
tgccaaaaagagaacaccaaaatcctgg

SEQ ID NO: 16911 - DNA, 28 bp, synthetic construct
  source 1..28: mol_type = other DNA
ctccaggattttggtgttctctttttgg

SEQ ID NO: 16912 - DNA, 28 bp, synthetic construct
  source 1..28: mol_type = other DNA
agagaacaccaaaatcctggagtcacgg

SEQ ID NO: 16913 - DNA, 28 bp, synthetic construct
  source 1..28: mol_type = other DNA
gagaacaccaaaatcctggagtcacggg

SEQ ID NO: 16914 - DNA, 28 bp, synthetic construct
  source 1..28: mol_type = other DNA
tggaagacccgtgactccaggattttgg

SEQ ID NO: 16915 - DNA, 28 bp, synthetic construct
  source 1..28: mol_type = other DNA
agggtaatggaagacccgtgactccagg

SEQ ID NO: 16916 - DNA, 28 bp, synthetic construct
  source 1..28: mol_type = other DNA
caagcagaaatgctagagagggtaatgg

SEQ ID NO: 16917 - DNA, 28 bp, synthetic construct
  source 1..28: mol_type = other DNA
aaaagacaagcagaaatgctagagaggg

SEQ ID NO: 16918 - DNA, 28 bp, synthetic construct
  source 1..28: mol_type = other DNA
gaaaagacaagcagaaatgctagagagg

SEQ ID NO: 16919 - DNA, 28 bp, synthetic construct
  source 1..28: mol_type = other DNA
tttctgcttgtcttttccctagtattgg

SEQ ID NO: 16920 - DNA, 28 bp, synthetic construct
  source 1..28: mol_type = other DNA
ctttaaaaattcttcaccaatactaggg

SEQ ID NO: 16921 - DNA, 28 bp, synthetic construct
  source 1..28: mol_type = other DNA
actttaaaaattcttcaccaatactagg

SEQ ID NO: 16922 - DNA, 28 bp, synthetic construct
  source 1..28: mol_type = other DNA
ttttaaagtaaccaacccataccgttgg

SEQ ID NO: 16923 - DNA, 28 bp, synthetic construct
  source 1..28: mol_type = other DNA
gtaaccaacccataccgttggttacagg

SEQ ID NO: 16924 - DNA, 28 bp, synthetic construct
  source 1..28: mol_type = other DNA
agggcctgtaaccaacggtatgggttgg

SEQ ID NO: 16925 - DNA, 28 bp, synthetic construct
  source 1..28: mol_type = other DNA
cccataccgttggttacaggccctgtgg

SEQ ID NO: 16926 - DNA, 28 bp, synthetic construct
  source 1..28: mol_type = other DNA
accacagggcctgtaaccaacggtatgg

SEQ ID NO: 16927 - DNA, 28 bp, synthetic construct
  source 1..28: mol_type = other DNA
tggtgaccacagggcctgtaaccaacgg

SEQ ID NO: 16928 - DNA, 28 bp, synthetic construct
  source 1..28: mol_type = other DNA
gttggttacaggccctgtggtcaccagg

SEQ ID NO: 16929 - DNA, 28 bp, synthetic construct
  source 1..28: mol_type = other DNA
atggggagacagcctggtgaccacaggg

SEQ ID NO: 16930 - DNA, 28 bp, synthetic construct
  source 1..28: mol_type = other DNA
catggggagacagcctggtgaccacagg

SEQ ID NO: 16931 - DNA, 28 bp, synthetic construct
  source 1..28: mol_type = other DNA
tggtcaccaggctgtctccccatgatgg

SEQ ID NO: 16932 - DNA, 28 bp, synthetic construct
  source 1..28: mol_type = other DNA
ggtcaccaggctgtctccccatgatggg

SEQ ID NO: 16933 - DNA, 28 bp, synthetic construct
  source 1..28: mol_type = other DNA
gtcaccaggctgtctccccatgatgggg

SEQ ID NO: 16934 - DNA, 28 bp, synthetic construct
  source 1..28: mol_type = other DNA
ccaggctgtctccccatgatggggatgg

SEQ ID NO: 16935 - DNA, 28 bp, synthetic construct
  source 1..28: mol_type = other DNA
gtctccccatgatggggatggagagtgg

SEQ ID NO: 16936 - DNA, 28 bp, synthetic construct
  source 1..28: mol_type = other DNA
ctaaccactctccatccccatcatgggg

SEQ ID NO: 16937 - DNA, 28 bp, synthetic construct
  source 1..28: mol_type = other DNA
actaaccactctccatccccatcatggg

SEQ ID NO: 16938 - DNA, 28 bp, synthetic construct
  source 1..28: mol_type = other DNA
cactaaccactctccatccccatcatgg

SEQ ID NO: 16939 - DNA, 28 bp, synthetic construct
  source 1..28: mol_type = other DNA
cagggcattcaacaagctggaggggagg

SEQ ID NO: 16940 - DNA, 28 bp, synthetic construct
  source 1..28: mol_type = other DNA
cttcagggcattcaacaagctggagggg

SEQ ID NO: 16941 - DNA, 28 bp, synthetic construct
  source 1..28: mol_type = other DNA
acttcagggcattcaacaagctggaggg

SEQ ID NO: 16942 - DNA, 28 bp, synthetic construct
  source 1..28: mol_type = other DNA
aacttcagggcattcaacaagctggagg

SEQ ID NO: 16943 - DNA, 28 bp, synthetic construct
  source 1..28: mol_type = other DNA
ataaacttcagggcattcaacaagctgg

SEQ ID NO: 16944 - DNA, 28 bp, synthetic construct
  source 1..28: mol_type = other DNA
ttgaatgccctgaagtttatctagaagg

SEQ ID NO: 16945 - DNA, 28 bp, synthetic construct
  source 1..28: mol_type = other DNA
tgaatgccctgaagtttatctagaaggg

SEQ ID NO: 16946 - DNA, 28 bp, synthetic construct
  source 1..28: mol_type = other DNA
tatcttcccttctagataaacttcaggg

SEQ ID NO: 16947 - DNA, 28 bp, synthetic construct
  source 1..28: mol_type = other DNA
gtatcttcccttctagataaacttcagg

SEQ ID NO: 16948 - DNA, 28 bp, synthetic construct
  source 1..28: mol_type = other DNA
tctagaagggaagatactcaagcgtagg

SEQ ID NO: 16949 - DNA, 28 bp, synthetic construct
  source 1..28: mol_type = other DNA
aagcgtaggatttcagtgatgcatttgg

SEQ ID NO: 16950 - DNA, 28 bp, synthetic construct
  source 1..28: mol_type = other DNA
tgcttcagcgtcaaaaacgtcactttgg

SEQ ID NO: 16951 - DNA, 28 bp, synthetic construct
  source 1..28: mol_type = other DNA
gcttcagcgtcaaaaacgtcactttggg

SEQ ID NO: 16952 - DNA, 28 bp, synthetic construct
  source 1..28: mol_type = other DNA
cagcgtcaaaaacgtcactttgggtagg

SEQ ID NO: 16953 - DNA, 28 bp, synthetic construct
  source 1..28: mol_type = other DNA
ttgggtaggaacaatacataatgcgtgg

SEQ ID NO: 16954 - DNA, 28 bp, synthetic construct
  source 1..28: mol_type = other DNA
gcaatgccttttgtgacacctgttcagg

SEQ ID NO: 16955 - DNA, 28 bp, synthetic construct
  source 1..28: mol_type = other DNA
gaatctcctgaacaggtgtcacaaaagg

SEQ ID NO: 16956 - DNA, 28 bp, synthetic construct
  source 1..28: mol_type = other DNA
tgacacctgttcaggagattcccatagg

SEQ ID NO: 16957 - DNA, 28 bp, synthetic construct
  source 1..28: mol_type = other DNA
agcttcctatgggaatctcctgaacagg

SEQ ID NO: 16958 - DNA, 28 bp, synthetic construct
  source 1..28: mol_type = other DNA
aggagattcccataggaagcttctgagg

SEQ ID NO: 16959 - DNA, 28 bp, synthetic construct
  source 1..28: mol_type = other DNA
ggactctgcctcagaagcttcctatggg

SEQ ID NO: 16960 - DNA, 28 bp, synthetic construct
  source 1..28: mol_type = other DNA
aggactctgcctcagaagcttcctatgg

SEQ ID NO: 16961 - DNA, 28 bp, synthetic construct
  source 1..28: mol_type = other DNA
aggaagcttctgaggcagagtcctcagg

SEQ ID NO: 16962 - DNA, 28 bp, synthetic construct
  source 1..28: mol_type = other DNA
gcttctgaggcagagtcctcaggtgagg

SEQ ID NO: 16963 - DNA, 28 bp, synthetic construct
  source 1..28: mol_type = other DNA
tctgaggcagagtcctcaggtgaggagg

SEQ ID NO: 16964 - DNA, 28 bp, synthetic construct
  source 1..28: mol_type = other DNA
ctgaggcagagtcctcaggtgaggaggg

SEQ ID NO: 16965 - DNA, 28 bp, synthetic construct
  source 1..28: mol_type = other DNA
tgaggcagagtcctcaggtgaggagggg

SEQ ID NO: 16966 - DNA, 28 bp, synthetic construct
  source 1..28: mol_type = other DNA
gaggcagagtcctcaggtgaggaggggg

SEQ ID NO: 16967 - DNA, 28 bp, synthetic construct
  source 1..28: mol_type = other DNA
agagtcctcaggtgaggagggggacagg

SEQ ID NO: 16968 - DNA, 28 bp, synthetic construct
  source 1..28: mol_type = other DNA
cctcaggtgaggagggggacaggcctgg

SEQ ID NO: 16969 - DNA, 28 bp, synthetic construct
  source 1..28: mol_type = other DNA
ctcaggtgaggagggggacaggcctggg

SEQ ID NO: 16970 - DNA, 28 bp, synthetic construct
  source 1..28: mol_type = other DNA
tgaggagggggacaggcctgggtcttgg

SEQ ID NO: 16971 - DNA, 28 bp, synthetic construct
  source 1..28: mol_type = other DNA
gaggagggggacaggcctgggtcttggg

SEQ ID NO: 16972 - DNA, 28 bp, synthetic construct
  source 1..28: mol_type = other DNA
aggagggggacaggcctgggtcttgggg

SEQ ID NO: 16973 - DNA, 28 bp, synthetic construct
  source 1..28: mol_type = other DNA
ggagggggacaggcctgggtcttggggg

SEQ ID NO: 16974 - DNA, 28 bp, synthetic construct
  source 1..28: mol_type = other DNA
ggggacaggcctgggtcttgggggaagg

SEQ ID NO: 16975 - DNA, 28 bp, synthetic construct
  source 1..28: mol_type = other DNA
gacaggcctgggtcttgggggaaggtgg

SEQ ID NO: 16976 - DNA, 28 bp, synthetic construct
  source 1..28: mol_type = other DNA
tcatctccaccttcccccaagacccagg

SEQ ID NO: 16977 - DNA, 28 bp, synthetic construct
  source 1..28: mol_type = other DNA
accagcctcatgcctctctccccagtgg

SEQ ID NO: 16978 - DNA, 28 bp, synthetic construct
  source 1..28: mol_type = other DNA
gccactggggagagaggcatgaggctgg

SEQ ID NO: 16979 - DNA, 28 bp, synthetic construct
  source 1..28: mol_type = other DNA
tgaggccactggggagagaggcatgagg

SEQ ID NO: 16980 - DNA, 28 bp, synthetic construct
  source 1..28: mol_type = other DNA
tggagactgaggccactggggagagagg

SEQ ID NO: 16981 - DNA, 28 bp, synthetic construct
  source 1..28: mol_type = other DNA
ctccccagtggcctcagtctccatcagg

SEQ ID NO: 16982 - DNA, 28 bp, synthetic construct
  source 1..28: mol_type = other DNA
tgcctgatggagactgaggccactgggg

SEQ ID NO: 16983 - DNA, 28 bp, synthetic construct
  source 1..28: mol_type = other DNA
ttgcctgatggagactgaggccactggg

SEQ ID NO: 16984 - DNA, 28 bp, synthetic construct
  source 1..28: mol_type = other DNA
tttgcctgatggagactgaggccactgg

SEQ ID NO: 16985 - DNA, 28 bp, synthetic construct
  source 1..28: mol_type = other DNA
ctcaagatttgcctgatggagactgagg

SEQ ID NO: 16986 - DNA, 28 bp, synthetic construct
  source 1..28: mol_type = other DNA
aggaggcttctcaagatttgcctgatgg

SEQ ID NO: 16987 - DNA, 28 bp, synthetic construct
  source 1..28: mol_type = other DNA
tcttgagaagcctcctccattctgcagg

SEQ ID NO: 16988 - DNA, 28 bp, synthetic construct
  source 1..28: mol_type = other DNA
cagtcatttgcctgcagaatggaggagg

SEQ ID NO: 16989 - DNA, 28 bp, synthetic construct
  source 1..28: mol_type = other DNA
tctcagtcatttgcctgcagaatggagg

SEQ ID NO: 16990 - DNA, 28 bp, synthetic construct
  source 1..28: mol_type = other DNA
acatctcagtcatttgcctgcagaatgg

SEQ ID NO: 16991 - DNA, 28 bp, synthetic construct
  source 1..28: mol_type = other DNA
agatgtgtgagctctgcttcccaacagg

SEQ ID NO: 16992 - DNA, 28 bp, synthetic construct
  source 1..28: mol_type = other DNA
tgtgtgagctctgcttcccaacaggcgg

SEQ ID NO: 16993 - DNA, 28 bp, synthetic construct
  source 1..28: mol_type = other DNA
gcttcccaacaggcggaaattcacatgg

SEQ ID NO: 16994 - DNA, 28 bp, synthetic construct
  source 1..28: mol_type = other DNA
cttcccaacaggcggaaattcacatggg

SEQ ID NO: 16995 - DNA, 28 bp, synthetic construct
  source 1..28: mol_type = other DNA
ttcccaacaggcggaaattcacatgggg

SEQ ID NO: 16996 - DNA, 28 bp, synthetic construct
  source 1..28: mol_type = other DNA
ttccccatgtgaatttccgcctgttggg

SEQ ID NO: 16997 - DNA, 28 bp, synthetic construct
  source 1..28: mol_type = other DNA
cttccccatgtgaatttccgcctgttgg

SEQ ID NO: 16998 - DNA, 28 bp, synthetic construct
  source 1..28: mol_type = other DNA
caacaggcggaaattcacatggggaagg

SEQ ID NO: 16999 - DNA, 28 bp, synthetic construct
  source 1..28: mol_type = other DNA
aacaggcggaaattcacatggggaaggg

SEQ ID NO: 17000 - DNA, 28 bp, synthetic construct
  source 1..28: mol_type = other DNA
tcacatggggaagggcacctgtgaatgg

SEQ ID NO: 17001 - DNA, 28 bp, synthetic construct
  source 1..28: mol_type = other DNA
ctgatagttctagaaggccattcacagg

SEQ ID NO: 17002 - DNA, 28 bp, synthetic construct
  source 1..28: mol_type = other DNA
ctgtgaatggccttctagaactatcagg

SEQ ID NO: 17003 - DNA, 28 bp, synthetic construct
  source 1..28: mol_type = other DNA
gccttctagaactatcaggaagttctgg

SEQ ID NO: 17004 - DNA, 28 bp, synthetic construct
  source 1..28: mol_type = other DNA
tccagaacttcctgatagttctagaagg

SEQ ID NO: 17005 - DNA, 28 bp, synthetic construct
  source 1..28: mol_type = other DNA
ggatttagtaccctgtgagagcagatgg

SEQ ID NO: 17006 - DNA, 28 bp, synthetic construct
  source 1..28: mol_type = other DNA
agtaccctgtgagagcagatggtcctgg

SEQ ID NO: 17007 - DNA, 28 bp, synthetic construct
  source 1..28: mol_type = other DNA
gtaccctgtgagagcagatggtcctggg

SEQ ID NO: 17008 - DNA, 28 bp, synthetic construct
  source 1..28: mol_type = other DNA
gcacccaggaccatctgctctcacaggg

SEQ ID NO: 17009 - DNA, 28 bp, synthetic construct
  source 1..28: mol_type = other DNA
tgcacccaggaccatctgctctcacagg

SEQ ID NO: 17010 - DNA, 28 bp, synthetic construct
  source 1..28: mol_type = other DNA
gagagcagatggtcctgggtgcactcgg

SEQ ID NO: 17011 - DNA, 28 bp, synthetic construct
  source 1..28: mol_type = other DNA
taggcaggatcatccgagtgcacccagg

SEQ ID NO: 17012 - DNA, 28 bp, synthetic construct
  source 1..28: mol_type = other DNA
actcggatgatcctgcctagccagctgg

SEQ ID NO: 17013 - DNA, 28 bp, synthetic construct
  source 1..28: mol_type = other DNA
cactctgcaatccagctggctaggcagg

SEQ ID NO: 17014 - DNA, 28 bp, synthetic construct
  source 1..28: mol_type = other DNA
ctgcctagccagctggattgcagagtgg

SEQ ID NO: 17015 - DNA, 28 bp, synthetic construct
  source 1..28: mol_type = other DNA
tgaccactctgcaatccagctggctagg

SEQ ID NO: 17016 - DNA, 28 bp, synthetic construct
  source 1..28: mol_type = other DNA
aatgatgaccactctgcaatccagctgg

SEQ ID NO: 17017 - DNA, 28 bp, synthetic construct
  source 1..28: mol_type = other DNA
ggtcatcattatcagtgagctattgagg

SEQ ID NO: 17018 - DNA, 28 bp, synthetic construct
  source 1..28: mol_type = other DNA
gtcatcattatcagtgagctattgaggg

SEQ ID NO: 17019 - DNA, 28 bp, synthetic construct
  source 1..28: mol_type = other DNA
tcatcattatcagtgagctattgagggg

SEQ ID NO: 17020 - DNA, 28 bp, synthetic construct
  source 1..28: mol_type = other DNA
ttgagagcagtcagtgtcatgtataagg

SEQ ID NO: 17021 - DNA, 28 bp, synthetic construct
  source 1..28: mol_type = other DNA
gagcagtcagtgtcatgtataaggatgg

SEQ ID NO: 17022 - DNA, 28 bp, synthetic construct
  source 1..28: mol_type = other DNA
agcagtcagtgtcatgtataaggatggg

SEQ ID NO: 17023 - DNA, 28 bp, synthetic construct
  source 1..28: mol_type = other DNA
gtcagtgtcatgtataaggatgggttgg

SEQ ID NO: 17024 - DNA, 28 bp, synthetic construct
  source 1..28: mol_type = other DNA
tcagtgtcatgtataaggatgggttggg

SEQ ID NO: 17025 - DNA, 28 bp, synthetic construct
  source 1..28: mol_type = other DNA
cagtgtcatgtataaggatgggttgggg

SEQ ID NO: 17026 - DNA, 28 bp, synthetic construct
  source 1..28: mol_type = other DNA
catgtataaggatgggttggggtaccgg

SEQ ID NO: 17027 - DNA, 28 bp, synthetic construct
  source 1..28: mol_type = other DNA
ggggtaccggccaacgcccgccttgagg

SEQ ID NO: 17028 - DNA, 28 bp, synthetic construct
  source 1..28: mol_type = other DNA
accggccaacgcccgccttgaggcctgg

SEQ ID NO: 17029 - DNA, 28 bp, synthetic construct
  source 1..28: mol_type = other DNA
gccaggcctcaaggcgggcgttggccgg

SEQ ID NO: 17030 - DNA, 28 bp, synthetic construct
  source 1..28: mol_type = other DNA
ggcggccaggcctcaaggcgggcgttgg

SEQ ID NO: 17031 - DNA, 28 bp, synthetic construct
  source 1..28: mol_type = other DNA
aacgcccgccttgaggcctggccgccgg

SEQ ID NO: 17032 - DNA, 28 bp, synthetic construct
  source 1..28: mol_type = other DNA
cccgccttgaggcctggccgccggatgg

SEQ ID NO: 17033 - DNA, 28 bp, synthetic construct
  source 1..28: mol_type = other DNA
ccgccttgaggcctggccgccggatggg

SEQ ID NO: 17034 - DNA, 28 bp, synthetic construct
  source 1..28: mol_type = other DNA
ccttgaggcctggccgccggatgggagg

SEQ ID NO: 17035 - DNA, 28 bp, synthetic construct
  source 1..28: mol_type = other DNA
tgctctcgcctcccatccggcggccagg

SEQ ID NO: 17036 - DNA, 28 bp, synthetic construct
  source 1..28: mol_type = other DNA
tcttgtgctctcgcctcccatccggcgg

SEQ ID NO: 17037 - DNA, 28 bp, synthetic construct
  source 1..28: mol_type = other DNA
ctctcttgtgctctcgcctcccatccgg

SEQ ID NO: 17038 - DNA, 28 bp, synthetic construct
  source 1..28: mol_type = other DNA
gggaggcgagagcacaagagagtcctgg

SEQ ID NO: 17039 - DNA, 28 bp, synthetic construct
  source 1..28: mol_type = other DNA
gcgagagcacaagagagtcctggctagg

SEQ ID NO: 17040 - DNA, 28 bp, synthetic construct
  source 1..28: mol_type = other DNA
cctggctaggtgtgccccgctctgcagg

SEQ ID NO: 17041 - DNA, 28 bp, synthetic construct
  source 1..28: mol_type = other DNA
ctggctaggtgtgccccgctctgcaggg

SEQ ID NO: 17042 - DNA, 28 bp, synthetic construct
  source 1..28: mol_type = other DNA
gtggatggtgtggccctgcagagcgggg

SEQ ID NO: 17043 - DNA, 28 bp, synthetic construct
  source 1..28: mol_type = other DNA
agtggatggtgtggccctgcagagcggg

SEQ ID NO: 17044 - DNA, 28 bp, synthetic construct
  source 1..28: mol_type = other DNA
cagtggatggtgtggccctgcagagcgg

SEQ ID NO: 17045 - DNA, 28 bp, synthetic construct
  source 1..28: mol_type = other DNA
cgctctgcagggccacaccatccactgg

SEQ ID NO: 17046 - DNA, 28 bp, synthetic construct
  source 1..28: mol_type = other DNA
ggcacagggtttccagtggatggtgtgg

SEQ ID NO: 17047 - DNA, 28 bp, synthetic construct
  source 1..28: mol_type = other DNA
cagtgggcacagggtttccagtggatgg

SEQ ID NO: 17048 - DNA, 28 bp, synthetic construct
  source 1..28: mol_type = other DNA
catccactggaaaccctgtgcccactgg

SEQ ID NO: 17049 - DNA, 28 bp, synthetic construct
  source 1..28: mol_type = other DNA
atccactggaaaccctgtgcccactggg

SEQ ID NO: 17050 - DNA, 28 bp, synthetic construct
  source 1..28: mol_type = other DNA
agcccagtgggcacagggtttccagtgg

SEQ ID NO: 17051 - DNA, 28 bp, synthetic construct
  source 1..28: mol_type = other DNA
cttagcacgcagcccagtgggcacaggg

SEQ ID NO: 17052 - DNA, 28 bp, synthetic construct
  source 1..28: mol_type = other DNA
tcttagcacgcagcccagtgggcacagg

SEQ ID NO: 17053 - DNA, 28 bp, synthetic construct
  source 1..28: mol_type = other DNA
tgtgcccactgggctgcgtgctaagagg

SEQ ID NO: 17054 - DNA, 28 bp, synthetic construct
  source 1..28: mol_type = other DNA
acagcctcttagcacgcagcccagtggg

SEQ ID NO: 17055 - DNA, 28 bp, synthetic construct
  source 1..28: mol_type = other DNA
cacagcctcttagcacgcagcccagtgg

SEQ ID NO: 17056 - DNA, 28 bp, synthetic construct
  source 1..28: mol_type = other DNA
cactgggctgcgtgctaagaggctgtgg

SEQ ID NO: 17057 - DNA, 28 bp, synthetic construct
  source 1..28: mol_type = other DNA
ttcagtaaaatttggacaagagcattgg

SEQ ID NO: 17058 - DNA, 28 bp, synthetic construct
  source 1..28: mol_type = other DNA
gagagactgcagattcagtaaaatttgg

SEQ ID NO: 17059 - DNA, 28 bp, synthetic construct
  source 1..28: mol_type = other DNA
attcgcaagctaacacattaaactttgg

SEQ ID NO: 17060 - DNA, 28 bp, synthetic construct
  source 1..28: mol_type = other DNA
ataaataaataaataaataaataaatgg

SEQ ID NO: 17061 - DNA, 28 bp, synthetic construct
  source 1..28: mol_type = other DNA
attaaaatttgactgggactttctgagg

SEQ ID NO: 17062 - DNA, 28 bp, synthetic construct
  source 1..28: mol_type = other DNA
tatctgttggaattaaaatttgactggg

SEQ ID NO: 17063 - DNA, 28 bp, synthetic construct
  source 1..28: mol_type = other DNA
atatctgttggaattaaaatttgactgg

SEQ ID NO: 17064 - DNA, 28 bp, synthetic construct
  source 1..28: mol_type = other DNA
ttagaggaaactgctgaatatctgttgg

SEQ ID NO: 17065 - DNA, 28 bp, synthetic construct
  source 1..28: mol_type = other DNA
tttcctctaagaacaatgagagttctgg

SEQ ID NO: 17066 - DNA, 28 bp, synthetic construct
  source 1..28: mol_type = other DNA
ttcctctaagaacaatgagagttctggg

SEQ ID NO: 17067 - DNA, 28 bp, synthetic construct
  source 1..28: mol_type = other DNA
tcctctaagaacaatgagagttctgggg

SEQ ID NO: 17068 - DNA, 28 bp, synthetic construct
  source 1..28: mol_type = other DNA
gccccagaactctcattgttcttagagg

SEQ ID NO: 17069 - DNA, 28 bp, synthetic construct
  source 1..28: mol_type = other DNA
ttctggggctagccagtgtttctcttgg

SEQ ID NO: 17070 - DNA, 28 bp, synthetic construct
  source 1..28: mol_type = other DNA
tagccagtgtttctcttggaaaataagg

SEQ ID NO: 17071 - DNA, 28 bp, synthetic construct
  source 1..28: mol_type = other DNA
cttccttattttccaagagaaacactgg

SEQ ID NO: 17072 - DNA, 28 bp, synthetic construct
  source 1..28: mol_type = other DNA
gtgtttctcttggaaaataaggaagagg

SEQ ID NO: 17073 - DNA, 28 bp, synthetic construct
  source 1..28: mol_type = other DNA
tgtttctcttggaaaataaggaagaggg

SEQ ID NO: 17074 - DNA, 28 bp, synthetic construct
  source 1..28: mol_type = other DNA
cttggaaaataaggaagagggaaagcgg

SEQ ID NO: 17075 - DNA, 28 bp, synthetic construct
  source 1..28: mol_type = other DNA
gtgcattcatttaaaaacctgccctagg

SEQ ID NO: 17076 - DNA, 28 bp, synthetic construct
  source 1..28: mol_type = other DNA
tgcattcatttaaaaacctgccctaggg

SEQ ID NO: 17077 - DNA, 28 bp, synthetic construct
  source 1..28: mol_type = other DNA
attcatttaaaaacctgccctagggagg

SEQ ID NO: 17078 - DNA, 28 bp, synthetic construct
  source 1..28: mol_type = other DNA
acagggaacgctgcctccctagggcagg

SEQ ID NO: 17079 - DNA, 28 bp, synthetic construct
  source 1..28: mol_type = other DNA
gttcacagggaacgctgcctccctaggg

SEQ ID NO: 17080 - DNA, 28 bp, synthetic construct
  source 1..28: mol_type = other DNA
agttcacagggaacgctgcctccctagg

SEQ ID NO: 17081 - DNA, 28 bp, synthetic construct
  source 1..28: mol_type = other DNA
gaggcagcgttccctgtgaactccgagg

SEQ ID NO: 17082 - DNA, 28 bp, synthetic construct
  source 1..28: mol_type = other DNA
gctcactgtggcctcggagttcacaggg

SEQ ID NO: 17083 - DNA, 28 bp, synthetic construct
  source 1..28: mol_type = other DNA
tgctcactgtggcctcggagttcacagg

SEQ ID NO: 17084 - DNA, 28 bp, synthetic construct
  source 1..28: mol_type = other DNA
actccgaggccacagtgagcagagcagg

SEQ ID NO: 17085 - DNA, 28 bp, synthetic construct
  source 1..28: mol_type = other DNA
cagcctgctctgctcactgtggcctcgg

SEQ ID NO: 17086 - DNA, 28 bp, synthetic construct
  source 1..28: mol_type = other DNA
cgaggccacagtgagcagagcaggctgg

SEQ ID NO: 17087 - DNA, 28 bp, synthetic construct
  source 1..28: mol_type = other DNA
ggccacagtgagcagagcaggctggagg

SEQ ID NO: 17088 - DNA, 28 bp, synthetic construct
  source 1..28: mol_type = other DNA
ggcctccagcctgctctgctcactgtgg

SEQ ID NO: 17089 - DNA, 28 bp, synthetic construct
  source 1..28: mol_type = other DNA
tgagcagagcaggctggaggcctcccgg

SEQ ID NO: 17090 - DNA, 28 bp, synthetic construct
  source 1..28: mol_type = other DNA
tggcaggaggggcaggacagccgggagg

SEQ ID NO: 17091 - DNA, 28 bp, synthetic construct
  source 1..28: mol_type = other DNA
atgtggcaggaggggcaggacagccggg

SEQ ID NO: 17092 - DNA, 28 bp, synthetic construct
  source 1..28: mol_type = other DNA
catgtggcaggaggggcaggacagccgg

SEQ ID NO: 17093 - DNA, 28 bp, synthetic construct
  source 1..28: mol_type = other DNA
ttcacaggcatgtggcaggaggggcagg

SEQ ID NO: 17094 - DNA, 28 bp, synthetic construct
  source 1..28: mol_type = other DNA
cattttcacaggcatgtggcaggagggg

SEQ ID NO: 17095 - DNA, 28 bp, synthetic construct
  source 1..28: mol_type = other DNA
gcattttcacaggcatgtggcaggaggg

SEQ ID NO: 17096 - DNA, 28 bp, synthetic construct
  source 1..28: mol_type = other DNA
agcattttcacaggcatgtggcaggagg

SEQ ID NO: 17097 - DNA, 28 bp, synthetic construct
  source 1..28: mol_type = other DNA
tctagcattttcacaggcatgtggcagg

SEQ ID NO: 17098 - DNA, 28 bp, synthetic construct
  source 1..28: mol_type = other DNA
cttatctagcattttcacaggcatgtgg

SEQ ID NO: 17099 - DNA, 28 bp, synthetic construct
  source 1..28: mol_type = other DNA
cacatgcctgtgaaaatgctagataagg

SEQ ID NO: 17100 - DNA, 28 bp, synthetic construct
  source 1..28: mol_type = other DNA
aaaagtccttatctagcattttcacagg

SEQ ID NO: 17101 - DNA, 28 bp, synthetic construct
  source 1..28: mol_type = other DNA
ctcagcaacttccacgctccttcagtgg

SEQ ID NO: 17102 - DNA, 28 bp, synthetic construct
  source 1..28: mol_type = other DNA
tcagcaacttccacgctccttcagtggg

SEQ ID NO: 17103 - DNA, 28 bp, synthetic construct
  source 1..28: mol_type = other DNA
cagcaacttccacgctccttcagtgggg

SEQ ID NO: 17104 - DNA, 28 bp, synthetic construct
  source 1..28: mol_type = other DNA
caaagacatccccactgaaggagcgtgg

SEQ ID NO: 17105 - DNA, 28 bp, synthetic construct
  source 1..28: mol_type = other DNA
tctgagtcaaagacatccccactgaagg

SEQ ID NO: 17106 - DNA, 28 bp, synthetic construct
  source 1..28: mol_type = other DNA
tgtctttgactcagagctctgccactgg

SEQ ID NO: 17107 - DNA, 28 bp, synthetic construct
  source 1..28: mol_type = other DNA
attttctgttcgtggagataaccagtgg

SEQ ID NO: 17108 - DNA, 28 bp, synthetic construct
  source 1..28: mol_type = other DNA
ctccacgaacagaaaatgccacagatgg

SEQ ID NO: 17109 - DNA, 28 bp, synthetic construct
  source 1..28: mol_type = other DNA
tccacgaacagaaaatgccacagatggg

SEQ ID NO: 17110 - DNA, 28 bp, synthetic construct
  source 1..28: mol_type = other DNA
acccatctgtggcattttctgttcgtgg

SEQ ID NO: 17111 - DNA, 28 bp, synthetic construct
  source 1..28: mol_type = other DNA
acaacacagtgaattaacccatctgtgg

SEQ ID NO: 17112 - DNA, 28 bp, synthetic construct
  source 1..28: mol_type = other DNA
gttgttctcattttccctcagtttcagg

SEQ ID NO: 17113 - DNA, 28 bp, synthetic construct
  source 1..28: mol_type = other DNA
caaggagagaaaagcctgaaactgaggg

SEQ ID NO: 17114 - DNA, 28 bp, synthetic construct
  source 1..28: mol_type = other DNA
gcaaggagagaaaagcctgaaactgagg

SEQ ID NO: 17115 - DNA, 28 bp, synthetic construct
  source 1..28: mol_type = other DNA
attttttaagcgaggaaaacaggcaagg

SEQ ID NO: 17116 - DNA, 28 bp, synthetic construct
  source 1..28: mol_type = other DNA
acatcattttttaagcgaggaaaacagg

SEQ ID NO: 17117 - DNA, 28 bp, synthetic construct
  source 1..28: mol_type = other DNA
tgttttcctcgcttaaaaaatgatgtgg

SEQ ID NO: 17118 - DNA, 28 bp, synthetic construct
  source 1..28: mol_type = other DNA
gttttcctcgcttaaaaaatgatgtggg

SEQ ID NO: 17119 - DNA, 28 bp, synthetic construct
  source 1..28: mol_type = other DNA
ttttcctcgcttaaaaaatgatgtgggg

SEQ ID NO: 17120 - DNA, 28 bp, synthetic construct
  source 1..28: mol_type = other DNA
tttcctcgcttaaaaaatgatgtggggg

SEQ ID NO: 17121 - DNA, 28 bp, synthetic construct
  source 1..28: mol_type = other DNA
ggacccccacatcattttttaagcgagg

SEQ ID NO: 17122 - DNA, 28 bp, synthetic construct
  source 1..28: mol_type = other DNA
aaatctatcggggtagatgcgtttaggg

SEQ ID NO: 17123 - DNA, 28 bp, synthetic construct
  source 1..28: mol_type = other DNA
taaatctatcggggtagatgcgtttagg

SEQ ID NO: 17124 - DNA, 28 bp, synthetic construct
  source 1..28: mol_type = other DNA
tggaaaagaaaacataaatctatcgggg

SEQ ID NO: 17125 - DNA, 28 bp, synthetic construct
  source 1..28: mol_type = other DNA
atggaaaagaaaacataaatctatcggg

SEQ ID NO: 17126 - DNA, 28 bp, synthetic construct
  source 1..28: mol_type = other DNA
aatggaaaagaaaacataaatctatcgg

SEQ ID NO: 17127 - DNA, 28 bp, synthetic construct
  source 1..28: mol_type = other DNA
agggctgagacgcaaagtggactaatgg

SEQ ID NO: 17128 - DNA, 28 bp, synthetic construct
  source 1..28: mol_type = other DNA
ttaattttagggctgagacgcaaagtgg

SEQ ID NO: 17129 - DNA, 28 bp, synthetic construct
  source 1..28: mol_type = other DNA
cattataatcaaaaacttaattttaggg

SEQ ID NO: 17130 - DNA, 28 bp, synthetic construct
  source 1..28: mol_type = other DNA
acattataatcaaaaacttaattttagg

SEQ ID NO: 17131 - DNA, 28 bp, synthetic construct
  source 1..28: mol_type = other DNA
aaattaagtttttgattataatgtaagg

SEQ ID NO: 17132 - DNA, 28 bp, synthetic construct
  source 1..28: mol_type = other DNA
aggaagttttaccatattttaactctgg

SEQ ID NO: 17133 - DNA, 28 bp, synthetic construct
  source 1..28: mol_type = other DNA
tatttaaaaagccagagttaaaatatgg

SEQ ID NO: 17134 - DNA, 28 bp, synthetic construct
  source 1..28: mol_type = other DNA
taaatacaaaagaaaaataacagaatgg

SEQ ID NO: 17135 - DNA, 28 bp, synthetic construct
  source 1..28: mol_type = other DNA
aacagaatggccttctagaactatcagg

SEQ ID NO: 17136 - DNA, 28 bp, synthetic construct
  source 1..28: mol_type = other DNA
gccttctagaactatcaggaacttctgg

SEQ ID NO: 17137 - DNA, 28 bp, synthetic construct
  source 1..28: mol_type = other DNA
tccagaagttcctgatagttctagaagg

SEQ ID NO: 17138 - DNA, 28 bp, synthetic construct
  source 1..28: mol_type = other DNA
aggaacttctggatctagtaccctgtgg

SEQ ID NO: 17139 - DNA, 28 bp, synthetic construct
  source 1..28: mol_type = other DNA
ggaacttctggatctagtaccctgtggg

SEQ ID NO: 17140 - DNA, 28 bp, synthetic construct
  source 1..28: mol_type = other DNA
gaacttctggatctagtaccctgtgggg

SEQ ID NO: 17141 - DNA, 28 bp, synthetic construct
  source 1..28: mol_type = other DNA
ggatctagtaccctgtggggacagatgg

SEQ ID NO: 17142 - DNA, 28 bp, synthetic construct
  source 1..28: mol_type = other DNA
tagtaccctgtggggacagatggtctgg

SEQ ID NO: 17143 - DNA, 28 bp, synthetic construct
  source 1..28: mol_type = other DNA
tggctccagaccatctgtccccacaggg

SEQ ID NO: 17144 - DNA, 28 bp, synthetic construct
  source 1..28: mol_type = other DNA
ctggctccagaccatctgtccccacagg

SEQ ID NO: 17145 - DNA, 28 bp, synthetic construct
  source 1..28: mol_type = other DNA
acagatggtctggagccagcgcacttgg

SEQ ID NO: 17146 - DNA, 28 bp, synthetic construct
  source 1..28: mol_type = other DNA
gctgagagagatcatccaagtgcgctgg

SEQ ID NO: 17147 - DNA, 28 bp, synthetic construct
  source 1..28: mol_type = other DNA
acttggatgatctctctcagccatctgg

SEQ ID NO: 17148 - DNA, 28 bp, synthetic construct
  source 1..28: mol_type = other DNA
taacaagttcactctatggtccagatgg

SEQ ID NO: 17149 - DNA, 28 bp, synthetic construct
  source 1..28: mol_type = other DNA
gagggacagtaacaagttcactctatgg

SEQ ID NO: 17150 - DNA, 28 bp, synthetic construct
  source 1..28: mol_type = other DNA
gagtgaacttgttactgtccctccaagg

SEQ ID NO: 17151 - DNA, 28 bp, synthetic construct
  source 1..28: mol_type = other DNA
tgagctcatagttgtcagccttggaggg

SEQ ID NO: 17152 - DNA, 28 bp, synthetic construct
  source 1..28: mol_type = other DNA
atgagctcatagttgtcagccttggagg

SEQ ID NO: 17153 - DNA, 28 bp, synthetic construct
  source 1..28: mol_type = other DNA
agtatgagctcatagttgtcagccttgg

SEQ ID NO: 17154 - DNA, 28 bp, synthetic construct
  source 1..28: mol_type = other DNA
tagcagtttaatttagacccaagaaagg

SEQ ID NO: 17155 - DNA, 28 bp, synthetic construct
  source 1..28: mol_type = other DNA
aattcacacacacacagcctttcttggg

SEQ ID NO: 17156 - DNA, 28 bp, synthetic construct
  source 1..28: mol_type = other DNA
aaattcacacacacacagcctttcttgg

SEQ ID NO: 17157 - DNA, 28 bp, synthetic construct
  source 1..28: mol_type = other DNA
tacacacagacacacacagaaacacagg

SEQ ID NO: 17158 - DNA, 28 bp, synthetic construct
  source 1..28: mol_type = other DNA
gtgtctgtgtgtacatgtgtgtctgtgg

SEQ ID NO: 17159 - DNA, 28 bp, synthetic construct
  source 1..28: mol_type = other DNA
tgtctgtgtgtacatgtgtgtctgtggg

SEQ ID NO: 17160 - DNA, 28 bp, synthetic construct
  source 1..28: mol_type = other DNA
gtctgtgtgtacatgtgtgtctgtgggg

SEQ ID NO: 17161 - DNA, 28 bp, synthetic construct
  source 1..28: mol_type = other DNA
tctgtggggtgtgtctgtgtgtgcacgg

SEQ ID NO: 17162 - DNA, 28 bp, synthetic construct
  source 1..28: mol_type = other DNA
acggctgtgtgtctgtgcgtgtgcatgg

SEQ ID NO: 17163 - DNA, 28 bp, synthetic construct
  source 1..28: mol_type = other DNA
agtgacagaaagggaagtaagagtaagg

SEQ ID NO: 17164 - DNA, 28 bp, synthetic construct
  source 1..28: mol_type = other DNA
aagaattatggagaagtgacagaaaggg

SEQ ID NO: 17165 - DNA, 28 bp, synthetic construct
  source 1..28: mol_type = other DNA
aaagaattatggagaagtgacagaaagg

SEQ ID NO: 17166 - DNA, 28 bp, synthetic construct
  source 1..28: mol_type = other DNA
cacttctccataattctttgtatttcgg

SEQ ID NO: 17167 - DNA, 28 bp, synthetic construct
  source 1..28: mol_type = other DNA
tctccataattctttgtatttcggttgg

SEQ ID NO: 17168 - DNA, 28 bp, synthetic construct
  source 1..28: mol_type = other DNA
ctccataattctttgtatttcggttggg

SEQ ID NO: 17169 - DNA, 28 bp, synthetic construct
  source 1..28: mol_type = other DNA
agcccaaccgaaatacaaagaattatgg

SEQ ID NO: 17170 - DNA, 28 bp, synthetic construct
  source 1..28: mol_type = other DNA
ataattctttgtatttcggttgggctgg

SEQ ID NO: 17171 - DNA, 28 bp, synthetic construct
  source 1..28: mol_type = other DNA
gtatttcggttgggctggtatctcgcgg

SEQ ID NO: 17172 - DNA, 28 bp, synthetic construct
  source 1..28: mol_type = other DNA
tttcggttgggctggtatctcgcggcgg

SEQ ID NO: 17173 - DNA, 28 bp, synthetic construct
  source 1..28: mol_type = other DNA
atgaaatataggaatgcaggaaaagagg

SEQ ID NO: 17174 - DNA, 28 bp, synthetic construct
  source 1..28: mol_type = other DNA
agcaaataatgaaatataggaatgcagg

SEQ ID NO: 17175 - DNA, 28 bp, synthetic construct
  source 1..28: mol_type = other DNA
ggaacaagagcaaataatgaaatatagg

SEQ ID NO: 17176 - DNA, 28 bp, synthetic construct
  source 1..28: mol_type = other DNA
cattatttgctcttgttcctcttctagg

SEQ ID NO: 17177 - DNA, 28 bp, synthetic construct
  source 1..28: mol_type = other DNA
attatttgctcttgttcctcttctaggg

SEQ ID NO: 17178 - DNA, 28 bp, synthetic construct
  source 1..28: mol_type = other DNA
ggctatattgtaaaagccctagaagagg

SEQ ID NO: 17179 - DNA, 28 bp, synthetic construct
  source 1..28: mol_type = other DNA
cttctagggcttttacaatatagccagg

SEQ ID NO: 17180 - DNA, 28 bp, synthetic construct
  source 1..28: mol_type = other DNA
ctagggcttttacaatatagccaggagg

SEQ ID NO: 17181 - DNA, 28 bp, synthetic construct
  source 1..28: mol_type = other DNA
cttttacaatatagccaggaggatgtgg

SEQ ID NO: 17182 - DNA, 28 bp, synthetic construct
  source 1..28: mol_type = other DNA
ttgtaactgggtttccacatcctcctgg

SEQ ID NO: 17183 - DNA, 28 bp, synthetic construct
  source 1..28: mol_type = other DNA
tgtgcttgtgtgtcatcttgtaactggg

SEQ ID NO: 17184 - DNA, 28 bp, synthetic construct
  source 1..28: mol_type = other DNA
ctgtgcttgtgtgtcatcttgtaactgg

SEQ ID NO: 17185 - DNA, 28 bp, synthetic construct
  source 1..28: mol_type = other DNA
agcacagtgtcacaatcgctgtgcttgg

SEQ ID NO: 17186 - DNA, 28 bp, synthetic construct
  source 1..28: mol_type = other DNA
gcacagtgtcacaatcgctgtgcttggg

SEQ ID NO: 17187 - DNA, 28 bp, synthetic construct
  source 1..28: mol_type = other DNA
atcgctgtgcttgggccctacctcctgg

SEQ ID NO: 17188 - DNA, 28 bp, synthetic construct
  source 1..28: mol_type = other DNA
gcttgggccctacctcctggagaccagg

SEQ ID NO: 17189 - DNA, 28 bp, synthetic construct
  source 1..28: mol_type = other DNA
cttgggccctacctcctggagaccaggg

SEQ ID NO: 17190 - DNA, 28 bp, synthetic construct
  source 1..28: mol_type = other DNA
gggccctacctcctggagaccagggtgg

SEQ ID NO: 17191 - DNA, 28 bp, synthetic construct
  source 1..28: mol_type = other DNA
ggccctacctcctggagaccagggtggg

SEQ ID NO: 17192 - DNA, 28 bp, synthetic construct
  source 1..28: mol_type = other DNA
gtcccaccctggtctccaggaggtaggg

SEQ ID NO: 17193 - DNA, 28 bp, synthetic construct
  source 1..28: mol_type = other DNA
cgtcccaccctggtctccaggaggtagg

SEQ ID NO: 17194 - DNA, 28 bp, synthetic construct
  source 1..28: mol_type = other DNA
ctacctcctggagaccagggtgggacgg

SEQ ID NO: 17195 - DNA, 28 bp, synthetic construct
  source 1..28: mol_type = other DNA
acaccgtcccaccctggtctccaggagg

SEQ ID NO: 17196 - DNA, 28 bp, synthetic construct
  source 1..28: mol_type = other DNA
gagacaccgtcccaccctggtctccagg

SEQ ID NO: 17197 - DNA, 28 bp, synthetic construct
  source 1..28: mol_type = other DNA
ggagaccagggtgggacggtgtctctgg

SEQ ID NO: 17198 - DNA, 28 bp, synthetic construct
  source 1..28: mol_type = other DNA
catatccagagacaccgtcccaccctgg

SEQ ID NO: 17199 - DNA, 28 bp, synthetic construct
  source 1..28: mol_type = other DNA
cagggtgggacggtgtctctggatatgg

SEQ ID NO: 17200 - DNA, 28 bp, synthetic construct
  source 1..28: mol_type = other DNA
ggtgggacggtgtctctggatatggagg

SEQ ID NO: 17201 - DNA, 28 bp, synthetic construct
  source 1..28: mol_type = other DNA
gtgggacggtgtctctggatatggaggg

SEQ ID NO: 17202 - DNA, 28 bp, synthetic construct
  source 1..28: mol_type = other DNA
gacggtgtctctggatatggagggaagg

SEQ ID NO: 17203 - DNA, 28 bp, synthetic construct
  source 1..28: mol_type = other DNA
acggtgtctctggatatggagggaaggg

SEQ ID NO: 17204 - DNA, 28 bp, synthetic construct
  source 1..28: mol_type = other DNA
gtgtctctggatatggagggaagggcgg

SEQ ID NO: 17205 - DNA, 28 bp, synthetic construct
  source 1..28: mol_type = other DNA
atatggagggaagggcggaagatcacgg

SEQ ID NO: 17206 - DNA, 28 bp, synthetic construct
  source 1..28: mol_type = other DNA
tatggagggaagggcggaagatcacggg

SEQ ID NO: 17207 - DNA, 28 bp, synthetic construct
  source 1..28: mol_type = other DNA
atggagggaagggcggaagatcacgggg

SEQ ID NO: 17208 - DNA, 28 bp, synthetic construct
  source 1..28: mol_type = other DNA
gagggaagggcggaagatcacggggtgg

SEQ ID NO: 17209 - DNA, 28 bp, synthetic construct
  source 1..28: mol_type = other DNA
gggcggaagatcacggggtggcagaagg

SEQ ID NO: 17210 - DNA, 28 bp, synthetic construct
  source 1..28: mol_type = other DNA
cggggtggcagaaggcccgactgtccgg

SEQ ID NO: 17211 - DNA, 28 bp, synthetic construct
  source 1..28: mol_type = other DNA
cagaaggcccgactgtccggtcttctgg

SEQ ID NO: 17212 - DNA, 28 bp, synthetic construct
  source 1..28: mol_type = other DNA
cccgactgtccggtcttctggaagctgg

SEQ ID NO: 17213 - DNA, 28 bp, synthetic construct
  source 1..28: mol_type = other DNA
ccgactgtccggtcttctggaagctggg

SEQ ID NO: 17214 - DNA, 28 bp, synthetic construct
  source 1..28: mol_type = other DNA
cgactgtccggtcttctggaagctgggg

SEQ ID NO: 17215 - DNA, 28 bp, synthetic construct
  source 1..28: mol_type = other DNA
cacgagaccccagcttccagaagaccgg

SEQ ID NO: 17216 - DNA, 28 bp, synthetic construct
  source 1..28: mol_type = other DNA
cggtcttctggaagctggggtctcgtgg

SEQ ID NO: 17217 - DNA, 28 bp, synthetic construct
  source 1..28: mol_type = other DNA
ctggaagctggggtctcgtggtcgctgg

SEQ ID NO: 17218 - DNA, 28 bp, synthetic construct
  source 1..28: mol_type = other DNA
tggaagctggggtctcgtggtcgctggg

SEQ ID NO: 17219 - DNA, 28 bp, synthetic construct
  source 1..28: mol_type = other DNA
agctggggtctcgtggtcgctgggctgg

SEQ ID NO: 17220 - DNA, 28 bp, synthetic construct
  source 1..28: mol_type = other DNA
tggggtctcgtggtcgctgggctggtgg

SEQ ID NO: 17221 - DNA, 28 bp, synthetic construct
  source 1..28: mol_type = other DNA
tctaaaacctagagtaaccgagagcagg

SEQ ID NO: 17222 - DNA, 28 bp, synthetic construct
  source 1..28: mol_type = other DNA
cagtcatcctgctctcggttactctagg

SEQ ID NO: 17223 - DNA, 28 bp, synthetic construct
  source 1..28: mol_type = other DNA
gtcaggggtgcagtcatcctgctctcgg

SEQ ID NO: 17224 - DNA, 28 bp, synthetic construct
  source 1..28: mol_type = other DNA
actgcacccctgactgccgactcaccgg

SEQ ID NO: 17225 - DNA, 28 bp, synthetic construct
  source 1..28: mol_type = other DNA
ctgcacccctgactgccgactcaccggg

SEQ ID NO: 17226 - DNA, 28 bp, synthetic construct
  source 1..28: mol_type = other DNA
cgaagcccggtgagtcggcagtcagggg

SEQ ID NO: 17227 - DNA, 28 bp, synthetic construct
  source 1..28: mol_type = other DNA
ccctgactgccgactcaccgggcttcgg

SEQ ID NO: 17228 - DNA, 28 bp, synthetic construct
  source 1..28: mol_type = other DNA
tccgaagcccggtgagtcggcagtcagg

SEQ ID NO: 17229 - DNA, 28 bp, synthetic construct
  source 1..28: mol_type = other DNA
tgactgccgactcaccgggcttcggagg

SEQ ID NO: 17230 - DNA, 28 bp, synthetic construct
  source 1..28: mol_type = other DNA
gactgccgactcaccgggcttcggaggg

SEQ ID NO: 17231 - DNA, 28 bp, synthetic construct
  source 1..28: mol_type = other DNA
catggccctccgaagcccggtgagtcgg

SEQ ID NO: 17232 - DNA, 28 bp, synthetic construct
  source 1..28: mol_type = other DNA
cgactcaccgggcttcggagggccatgg

SEQ ID NO: 17233 - DNA, 28 bp, synthetic construct
  source 1..28: mol_type = other DNA
gactcaccgggcttcggagggccatggg

SEQ ID NO: 17234 - DNA, 28 bp, synthetic construct
  source 1..28: mol_type = other DNA
cacacacccatggccctccgaagcccgg

SEQ ID NO: 17235 - DNA, 28 bp, synthetic construct
  source 1..28: mol_type = other DNA
gatcacaagtggaatcacacacccatgg

SEQ ID NO: 17236 - DNA, 28 bp, synthetic construct
  source 1..28: mol_type = other DNA
gctggggaagtaggaggatcacaagtgg

SEQ ID NO: 17237 - DNA, 28 bp, synthetic construct
  source 1..28: mol_type = other DNA
atcctcctacttccccagcccaccctgg

SEQ ID NO: 17238 - DNA, 28 bp, synthetic construct
  source 1..28: mol_type = other DNA
caccagggtgggctggggaagtaggagg

SEQ ID NO: 17239 - DNA, 28 bp, synthetic construct
  source 1..28: mol_type = other DNA
ctcctacttccccagcccaccctggtgg

SEQ ID NO: 17240 - DNA, 28 bp, synthetic construct
  source 1..28: mol_type = other DNA
gaccaccagggtgggctggggaagtagg

SEQ ID NO: 17241 - DNA, 28 bp, synthetic construct
  source 1..28: mol_type = other DNA
agtgggagaccaccagggtgggctgggg

SEQ ID NO: 17242 - DNA, 28 bp, synthetic construct
  source 1..28: mol_type = other DNA
aagtgggagaccaccagggtgggctggg

SEQ ID NO: 17243 - DNA, 28 bp, synthetic construct
  source 1..28: mol_type = other DNA
gaagtgggagaccaccagggtgggctgg

SEQ ID NO: 17244 - DNA, 28 bp, synthetic construct
  source 1..28: mol_type = other DNA
gagagaagtgggagaccaccagggtggg

SEQ ID NO: 17245 - DNA, 28 bp, synthetic construct
  source 1..28: mol_type = other DNA
agagagaagtgggagaccaccagggtgg

SEQ ID NO: 17246 - DNA, 28 bp, synthetic construct
  source 1..28: mol_type = other DNA
gagagagagaagtgggagaccaccaggg

SEQ ID NO: 17247 - DNA, 28 bp, synthetic construct
  source 1..28: mol_type = other DNA
agagagagagaagtgggagaccaccagg

SEQ ID NO: 17248 - DNA, 28 bp, synthetic construct
  source 1..28: mol_type = other DNA
tctcccacttctctctctctgcctgtgg

SEQ ID NO: 17249 - DNA, 28 bp, synthetic construct
  source 1..28: mol_type = other DNA
actccacaggcagagagagagaagtggg

SEQ ID NO: 17250 - DNA, 28 bp, synthetic construct
  source 1..28: mol_type = other DNA
cactccacaggcagagagagagaagtgg

SEQ ID NO: 17251 - DNA, 28 bp, synthetic construct
  source 1..28: mol_type = other DNA
gaaggagtcggttataacactccacagg

SEQ ID NO: 17252 - DNA, 28 bp, synthetic construct
  source 1..28: mol_type = other DNA
agtgttataaccgactccttcttctagg

SEQ ID NO: 17253 - DNA, 28 bp, synthetic construct
  source 1..28: mol_type = other DNA
gatggagatgcctagaagaaggagtcgg

SEQ ID NO: 17254 - DNA, 28 bp, synthetic construct
  source 1..28: mol_type = other DNA
ggttgggatggagatgcctagaagaagg

SEQ ID NO: 17255 - DNA, 28 bp, synthetic construct
  source 1..28: mol_type = other DNA
taagggaactggtctggggttgggatgg

SEQ ID NO: 17256 - DNA, 28 bp, synthetic construct
  source 1..28: mol_type = other DNA
ggtttaagggaactggtctggggttggg

SEQ ID NO: 17257 - DNA, 28 bp, synthetic construct
  source 1..28: mol_type = other DNA
tggtttaagggaactggtctggggttgg

SEQ ID NO: 17258 - DNA, 28 bp, synthetic construct
  source 1..28: mol_type = other DNA
gaggtggtttaagggaactggtctgggg

SEQ ID NO: 17259 - DNA, 28 bp, synthetic construct
  source 1..28: mol_type = other DNA
ggaggtggtttaagggaactggtctggg

SEQ ID NO: 17260 - DNA, 28 bp, synthetic construct
  source 1..28: mol_type = other DNA
gggaggtggtttaagggaactggtctgg

SEQ ID NO: 17261 - DNA, 28 bp, synthetic construct
  source 1..28: mol_type = other DNA
gtggtgggaggtggtttaagggaactgg

SEQ ID NO: 17262 - DNA, 28 bp, synthetic construct
  source 1..28: mol_type = other DNA
gttcccttaaaccacctcccaccacagg

SEQ ID NO: 17263 - DNA, 28 bp, synthetic construct
  source 1..28: mol_type = other DNA
ggtcctgtggtgggaggtggtttaaggg

SEQ ID NO: 17264 - DNA, 28 bp, synthetic construct
  source 1..28: mol_type = other DNA
gggtcctgtggtgggaggtggtttaagg

SEQ ID NO: 17265 - DNA, 28 bp, synthetic construct
  source 1..28: mol_type = other DNA
cttgtgggggtcctgtggtgggaggtgg

SEQ ID NO: 17266 - DNA, 28 bp, synthetic construct
  source 1..28: mol_type = other DNA
ctgcttgtgggggtcctgtggtgggagg

SEQ ID NO: 17267 - DNA, 28 bp, synthetic construct
  source 1..28: mol_type = other DNA
ctcccaccacaggacccccacaagcagg

SEQ ID NO: 17268 - DNA, 28 bp, synthetic construct
  source 1..28: mol_type = other DNA
tcccaccacaggacccccacaagcaggg

SEQ ID NO: 17269 - DNA, 28 bp, synthetic construct
  source 1..28: mol_type = other DNA
tccctgcttgtgggggtcctgtggtggg

SEQ ID NO: 17270 - DNA, 28 bp, synthetic construct
  source 1..28: mol_type = other DNA
gtccctgcttgtgggggtcctgtggtgg

SEQ ID NO: 17271 - DNA, 28 bp, synthetic construct
  source 1..28: mol_type = other DNA
gaggtccctgcttgtgggggtcctgtgg

SEQ ID NO: 17272 - DNA, 28 bp, synthetic construct
  source 1..28: mol_type = other DNA
aactgtgagaggtccctgcttgtggggg

SEQ ID NO: 17273 - DNA, 28 bp, synthetic construct
  source 1..28: mol_type = other DNA
gaactgtgagaggtccctgcttgtgggg

SEQ ID NO: 17274 - DNA, 28 bp, synthetic construct
  source 1..28: mol_type = other DNA
ggaactgtgagaggtccctgcttgtggg

SEQ ID NO: 17275 - DNA, 28 bp, synthetic construct
  source 1..28: mol_type = other DNA
aggaactgtgagaggtccctgcttgtgg

SEQ ID NO: 17276 - DNA, 28 bp, synthetic construct
  source 1..28: mol_type = other DNA
gggacctctcacagttcctgttgcctgg

SEQ ID NO: 17277 - DNA, 28 bp, synthetic construct
  source 1..28: mol_type = other DNA
ggacctctcacagttcctgttgcctggg

SEQ ID NO: 17278 - DNA, 28 bp, synthetic construct
  source 1..28: mol_type = other DNA
gacctctcacagttcctgttgcctgggg

SEQ ID NO: 17279 - DNA, 28 bp, synthetic construct
  source 1..28: mol_type = other DNA
gtccccaggcaacaggaactgtgagagg

SEQ ID NO: 17280 - DNA, 28 bp, synthetic construct
  source 1..28: mol_type = other DNA
agctgagatgaagtccccaggcaacagg

SEQ ID NO: 17281 - DNA, 28 bp, synthetic construct
  source 1..28: mol_type = other DNA
cctggggacttcatctcagcttccaagg

SEQ ID NO: 17282 - DNA, 28 bp, synthetic construct
  source 1..28: mol_type = other DNA
acttcatctcagcttccaaggcctctgg

SEQ ID NO: 17283 - DNA, 28 bp, synthetic construct
  source 1..28: mol_type = other DNA
ctcagcttccaaggcctctggaaccagg

SEQ ID NO: 17284 - DNA, 28 bp, synthetic construct
  source 1..28: mol_type = other DNA
atgcagggcctggttccagaggccttgg

SEQ ID NO: 17285 - DNA, 28 bp, synthetic construct
  source 1..28: mol_type = other DNA
gcctctggaaccaggccctgcatcctgg

SEQ ID NO: 17286 - DNA, 28 bp, synthetic construct
  source 1..28: mol_type = other DNA
cctctggaaccaggccctgcatcctggg

SEQ ID NO: 17287 - DNA, 28 bp, synthetic construct
  source 1..28: mol_type = other DNA
acagtcatgcccaggatgcagggcctgg

SEQ ID NO: 17288 - DNA, 28 bp, synthetic construct
  source 1..28: mol_type = other DNA
tggggacagtcatgcccaggatgcaggg

SEQ ID NO: 17289 - DNA, 28 bp, synthetic construct
  source 1..28: mol_type = other DNA
atggggacagtcatgcccaggatgcagg

SEQ ID NO: 17290 - DNA, 28 bp, synthetic construct
  source 1..28: mol_type = other DNA
gagaatcatggggacagtcatgcccagg

SEQ ID NO: 17291 - DNA, 28 bp, synthetic construct
  source 1..28: mol_type = other DNA
gtggtggctggctcagagaatcatgggg

SEQ ID NO: 17292 - DNA, 28 bp, synthetic construct
  source 1..28: mol_type = other DNA
ggtggtggctggctcagagaatcatggg

SEQ ID NO: 17293 - DNA, 28 bp, synthetic construct
  source 1..28: mol_type = other DNA
gggtggtggctggctcagagaatcatgg

SEQ ID NO: 17294 - DNA, 28 bp, synthetic construct
  source 1..28: mol_type = other DNA
ggtgggggggtggtggggtggtggctgg

SEQ ID NO: 17295 - DNA, 28 bp, synthetic construct
  source 1..28: mol_type = other DNA
tggcggtgggggggtggtggggtggtgg

SEQ ID NO: 17296 - DNA, 28 bp, synthetic construct
  source 1..28: mol_type = other DNA
acttggcggtgggggggtggtggggtgg

SEQ ID NO: 17297 - DNA, 28 bp, synthetic construct
  source 1..28: mol_type = other DNA
tggacttggcggtgggggggtggtgggg

SEQ ID NO: 17298 - DNA, 28 bp, synthetic construct
  source 1..28: mol_type = other DNA
gtggacttggcggtgggggggtggtggg

SEQ ID NO: 17299 - DNA, 28 bp, synthetic construct
  source 1..28: mol_type = other DNA
agtggacttggcggtgggggggtggtgg

SEQ ID NO: 17300 - DNA, 28 bp, synthetic construct
  source 1..28: mol_type = other DNA
agcagtggacttggcggtgggggggtgg

SEQ ID NO: 17301 - DNA, 28 bp, synthetic construct
  source 1..28: mol_type = other DNA
gtcagcagtggacttggcggtggggggg

SEQ ID NO: 17302 - DNA, 28 bp, synthetic construct
  source 1..28: mol_type = other DNA
ggtcagcagtggacttggcggtgggggg

SEQ ID NO: 17303 - DNA, 28 bp, synthetic construct
  source 1..28: mol_type = other DNA
gggtcagcagtggacttggcggtggggg

SEQ ID NO: 17304 - DNA, 28 bp, synthetic construct
  source 1..28: mol_type = other DNA
agggtcagcagtggacttggcggtgggg

SEQ ID NO: 17305 - DNA, 28 bp, synthetic construct
  source 1..28: mol_type = other DNA
cagggtcagcagtggacttggcggtggg

SEQ ID NO: 17306 - DNA, 28 bp, synthetic construct
  source 1..28: mol_type = other DNA
gcagggtcagcagtggacttggcggtgg

SEQ ID NO: 17307 - DNA, 28 bp, synthetic construct
  source 1..28: mol_type = other DNA
acagcagggtcagcagtggacttggcgg

SEQ ID NO: 17308 - DNA, 28 bp, synthetic construct
  source 1..28: mol_type = other DNA
gctacagcagggtcagcagtggacttgg

SEQ ID NO: 17309 - DNA, 28 bp, synthetic construct
  source 1..28: mol_type = other DNA
tggggggctacagcagggtcagcagtgg

SEQ ID NO: 17310 - DNA, 28 bp, synthetic construct
  source 1..28: mol_type = other DNA
caagtggaggtggggggctacagcaggg

SEQ ID NO: 17311 - DNA, 28 bp, synthetic construct
  source 1..28: mol_type = other DNA
acaagtggaggtggggggctacagcagg

SEQ ID NO: 17312 - DNA, 28 bp, synthetic construct
  source 1..28: mol_type = other DNA
gggaatctcaacaagtggaggtgggggg

SEQ ID NO: 17313 - DNA, 28 bp, synthetic construct
  source 1..28: mol_type = other DNA
agggaatctcaacaagtggaggtggggg

SEQ ID NO: 17314 - DNA, 28 bp, synthetic construct
  source 1..28: mol_type = other DNA
gagggaatctcaacaagtggaggtgggg

SEQ ID NO: 17315 - DNA, 28 bp, synthetic construct
  source 1..28: mol_type = other DNA
agagggaatctcaacaagtggaggtggg

SEQ ID NO: 17316 - DNA, 28 bp, synthetic construct
  source 1..28: mol_type = other DNA
aagagggaatctcaacaagtggaggtgg

SEQ ID NO: 17317 - DNA, 28 bp, synthetic construct
  source 1..28: mol_type = other DNA
aggaagagggaatctcaacaagtggagg

SEQ ID NO: 17318 - DNA, 28 bp, synthetic construct
  source 1..28: mol_type = other DNA
agcaggaagagggaatctcaacaagtgg

SEQ ID NO: 17319 - DNA, 28 bp, synthetic construct
  source 1..28: mol_type = other DNA
acattcaaaatgagaagcaggaagaggg

SEQ ID NO: 17320 - DNA, 28 bp, synthetic construct
  source 1..28: mol_type = other DNA
gacattcaaaatgagaagcaggaagagg

SEQ ID NO: 17321 - DNA, 28 bp, synthetic construct
  source 1..28: mol_type = other DNA
aagggtgacattcaaaatgagaagcagg

SEQ ID NO: 17322 - DNA, 28 bp, synthetic construct
  source 1..28: mol_type = other DNA
aggggggttgtgagaagtcacagaaggg

SEQ ID NO: 17323 - DNA, 28 bp, synthetic construct
  source 1..28: mol_type = other DNA
caggggggttgtgagaagtcacagaagg

SEQ ID NO: 17324 - DNA, 28 bp, synthetic construct
  source 1..28: mol_type = other DNA
cccccctgccacccctccctccagttgg

SEQ ID NO: 17325 - DNA, 28 bp, synthetic construct
  source 1..28: mol_type = other DNA
gccaactggagggaggggtggcaggggg

SEQ ID NO: 17326 - DNA, 28 bp, synthetic construct
  source 1..28: mol_type = other DNA
tgccaactggagggaggggtggcagggg

SEQ ID NO: 17327 - DNA, 28 bp, synthetic construct
  source 1..28: mol_type = other DNA
atgccaactggagggaggggtggcaggg

SEQ ID NO: 17328 - DNA, 28 bp, synthetic construct
  source 1..28: mol_type = other DNA
catgccaactggagggaggggtggcagg

SEQ ID NO: 17329 - DNA, 28 bp, synthetic construct
  source 1..28: mol_type = other DNA
ctgccacccctccctccagttggcatgg

SEQ ID NO: 17330 - DNA, 28 bp, synthetic construct
  source 1..28: mol_type = other DNA
aagccatgccaactggagggaggggtgg

SEQ ID NO: 17331 - DNA, 28 bp, synthetic construct
  source 1..28: mol_type = other DNA
actaagccatgccaactggagggagggg

SEQ ID NO: 17332 - DNA, 28 bp, synthetic construct
  source 1..28: mol_type = other DNA
gactaagccatgccaactggagggaggg

SEQ ID NO: 17333 - DNA, 28 bp, synthetic construct
  source 1..28: mol_type = other DNA
agactaagccatgccaactggagggagg

SEQ ID NO: 17334 - DNA, 28 bp, synthetic construct
  source 1..28: mol_type = other DNA
ggaagactaagccatgccaactggaggg

SEQ ID NO: 17335 - DNA, 28 bp, synthetic construct
  source 1..28: mol_type = other DNA
aggaagactaagccatgccaactggagg

SEQ ID NO: 17336 - DNA, 28 bp, synthetic construct
  source 1..28: mol_type = other DNA
cttaggaagactaagccatgccaactgg

SEQ ID NO: 17337 - DNA, 28 bp, synthetic construct
  source 1..28: mol_type = other DNA
gtactgggaagcagcacatgttcttagg

SEQ ID NO: 17338 - DNA, 28 bp, synthetic construct
  source 1..28: mol_type = other DNA
gaacatgtgctgcttcccagtacccagg

SEQ ID NO: 17339 - DNA, 28 bp, synthetic construct
  source 1..28: mol_type = other DNA
aacatgtgctgcttcccagtacccaggg

SEQ ID NO: 17340 - DNA, 28 bp, synthetic construct
  source 1..28: mol_type = other DNA
acggtgcacagcagccctgggtactggg

SEQ ID NO: 17341 - DNA, 28 bp, synthetic construct
  source 1..28: mol_type = other DNA
cacggtgcacagcagccctgggtactgg

SEQ ID NO: 17342 - DNA, 28 bp, synthetic construct
  source 1..28: mol_type = other DNA
cagtacccagggctgctgtgcaccgtgg

SEQ ID NO: 17343 - DNA, 28 bp, synthetic construct
  source 1..28: mol_type = other DNA
acgtgccacggtgcacagcagccctggg

SEQ ID NO: 17344 - DNA, 28 bp, synthetic construct
  source 1..28: mol_type = other DNA
cacgtgccacggtgcacagcagccctgg

SEQ ID NO: 17345 - DNA, 28 bp, synthetic construct
  source 1..28: mol_type = other DNA
gctgtgcaccgtggcacgtgagtttcgg

SEQ ID NO: 17346 - DNA, 28 bp, synthetic construct
  source 1..28: mol_type = other DNA
aagatgcaccgaaactcacgtgccacgg

SEQ ID NO: 17347 - DNA, 28 bp, synthetic construct
  source 1..28: mol_type = other DNA
gatgttgcaatttataaacagcaggagg

SEQ ID NO: 17348 - DNA, 28 bp, synthetic construct
  source 1..28: mol_type = other DNA
agggatgttgcaatttataaacagcagg

SEQ ID NO: 17349 - DNA, 28 bp, synthetic construct
  source 1..28: mol_type = other DNA
tgctgtttataaattgcaacatccctgg

SEQ ID NO: 17350 - DNA, 28 bp, synthetic construct
  source 1..28: mol_type = other DNA
aattgcaacatccctggacagatcttgg

SEQ ID NO: 17351 - DNA, 28 bp, synthetic construct
  source 1..28: mol_type = other DNA
agagggaaaatccaagatctgtccaggg

SEQ ID NO: 17352 - DNA, 28 bp, synthetic construct
  source 1..28: mol_type = other DNA
tagagggaaaatccaagatctgtccagg

SEQ ID NO: 17353 - DNA, 28 bp, synthetic construct
  source 1..28: mol_type = other DNA
ttggattttccctctataatttctctgg

SEQ ID NO: 17354 - DNA, 28 bp, synthetic construct
  source 1..28: mol_type = other DNA
agggagtctccagagaaattatagaggg

SEQ ID NO: 17355 - DNA, 28 bp, synthetic construct
  source 1..28: mol_type = other DNA
gagggagtctccagagaaattatagagg

SEQ ID NO: 17356 - DNA, 28 bp, synthetic construct
  source 1..28: mol_type = other DNA
tctataatttctctggagactccctcgg

SEQ ID NO: 17357 - DNA, 28 bp, synthetic construct
  source 1..28: mol_type = other DNA
ctataatttctctggagactccctcggg

SEQ ID NO: 17358 - DNA, 28 bp, synthetic construct
  source 1..28: mol_type = other DNA
tataatttctctggagactccctcgggg

SEQ ID NO: 17359 - DNA, 28 bp, synthetic construct
  source 1..28: mol_type = other DNA
ccctcggggtttgcacacacatctgtgg

SEQ ID NO: 17360 - DNA, 28 bp, synthetic construct
  source 1..28: mol_type = other DNA
tccacagatgtgtgtgcaaaccccgagg

SEQ ID NO: 17361 - DNA, 28 bp, synthetic construct
  source 1..28: mol_type = other DNA
acacacatctgtggaatgcccaagttgg

SEQ ID NO: 17362 - DNA, 28 bp, synthetic construct
  source 1..28: mol_type = other DNA
atctgtggaatgcccaagttggagatgg

SEQ ID NO: 17363 - DNA, 28 bp, synthetic construct
  source 1..28: mol_type = other DNA
catcagggaggaccatctccaacttggg

SEQ ID NO: 17364 - DNA, 28 bp, synthetic construct
  source 1..28: mol_type = other DNA
acatcagggaggaccatctccaacttgg

SEQ ID NO: 17365 - DNA, 28 bp, synthetic construct
  source 1..28: mol_type = other DNA
agatggtcctccctgatgtgtagtgtgg

SEQ ID NO: 17366 - DNA, 28 bp, synthetic construct
  source 1..28: mol_type = other DNA
gatggtcctccctgatgtgtagtgtggg

SEQ ID NO: 17367 - DNA, 28 bp, synthetic construct
  source 1..28: mol_type = other DNA
gaatagcccacactacacatcagggagg

SEQ ID NO: 17368 - DNA, 28 bp, synthetic construct
  source 1..28: mol_type = other DNA
tctgaatagcccacactacacatcaggg

SEQ ID NO: 17369 - DNA, 28 bp, synthetic construct
  source 1..28: mol_type = other DNA
ctctgaatagcccacactacacatcagg

SEQ ID NO: 17370 - DNA, 28 bp, synthetic construct
  source 1..28: mol_type = other DNA
ctgatgtgtagtgtgggctattcagagg

SEQ ID NO: 17371 - DNA, 28 bp, synthetic construct
  source 1..28: mol_type = other DNA
tgatgtgtagtgtgggctattcagaggg

SEQ ID NO: 17372 - DNA, 28 bp, synthetic construct
  source 1..28: mol_type = other DNA
tagctgttaatgagtttatgaaatgagg

SEQ ID NO: 17373 - DNA, 28 bp, synthetic construct
  source 1..28: mol_type = other DNA
tcatttcataaactcattaacagctagg

SEQ ID NO: 17374 - DNA, 28 bp, synthetic construct
  source 1..28: mol_type = other DNA
cattaacagctaggacgcgaagacttgg

SEQ ID NO: 17375 - DNA, 28 bp, synthetic construct
  source 1..28: mol_type = other DNA
cgcgaagacttggagaagttagctcagg

SEQ ID NO: 17376 - DNA, 28 bp, synthetic construct
  source 1..28: mol_type = other DNA
cttggagaagttagctcaggacacacgg

SEQ ID NO: 17377 - DNA, 28 bp, synthetic construct
  source 1..28: mol_type = other DNA
agaagttagctcaggacacacggagtgg

SEQ ID NO: 17378 - DNA, 28 bp, synthetic construct
  source 1..28: mol_type = other DNA
gaagttagctcaggacacacggagtggg

SEQ ID NO: 17379 - DNA, 28 bp, synthetic construct
  source 1..28: mol_type = other DNA
gttagctcaggacacacggagtgggagg

SEQ ID NO: 17380 - DNA, 28 bp, synthetic construct
  source 1..28: mol_type = other DNA
ttagctcaggacacacggagtgggaggg

SEQ ID NO: 17381 - DNA, 28 bp, synthetic construct
  source 1..28: mol_type = other DNA
gctcaggacacacggagtgggagggagg

SEQ ID NO: 17382 - DNA, 28 bp, synthetic construct
  source 1..28: mol_type = other DNA
gggagggaggcaacgagttaagaaatgg

SEQ ID NO: 17383 - DNA, 28 bp, synthetic construct
  source 1..28: mol_type = other DNA
ggagggaggcaacgagttaagaaatggg

SEQ ID NO: 17384 - DNA, 28 bp, synthetic construct
  source 1..28: mol_type = other DNA
aggcaacgagttaagaaatgggctttgg

SEQ ID NO: 17385 - DNA, 28 bp, synthetic construct
  source 1..28: mol_type = other DNA
aatgggctttggagtgcctcgaatttgg

SEQ ID NO: 17386 - DNA, 28 bp, synthetic construct
  source 1..28: mol_type = other DNA
aaaagaaaagtggaggccaaattcgagg

SEQ ID NO: 17387 - DNA, 28 bp, synthetic construct
  source 1..28: mol_type = other DNA
gtaagacagtagaaaagaaaagtggagg

SEQ ID NO: 17388 - DNA, 28 bp, synthetic construct
  source 1..28: mol_type = other DNA
caggtaagacagtagaaaagaaaagtgg

SEQ ID NO: 17389 - DNA, 28 bp, synthetic construct
  source 1..28: mol_type = other DNA
cacttttcttttctactgtcttacctgg

SEQ ID NO: 17390 - DNA, 28 bp, synthetic construct
  source 1..28: mol_type = other DNA
cttttctactgtcttacctggtcttagg

SEQ ID NO: 17391 - DNA, 28 bp, synthetic construct
  source 1..28: mol_type = other DNA
tctactgtcttacctggtcttaggcagg

SEQ ID NO: 17392 - DNA, 28 bp, synthetic construct
  source 1..28: mol_type = other DNA
ctgtcttacctggtcttaggcaggtcgg

SEQ ID NO: 17393 - DNA, 28 bp, synthetic construct
  source 1..28: mol_type = other DNA
tgtcttacctggtcttaggcaggtcggg

SEQ ID NO: 17394 - DNA, 28 bp, synthetic construct
  source 1..28: mol_type = other DNA
atggtcacccgacctgcctaagaccagg

SEQ ID NO: 17395 - DNA, 28 bp, synthetic construct
  source 1..28: mol_type = other DNA
gtcttaggcaggtcgggtgaccatctgg

SEQ ID NO: 17396 - DNA, 28 bp, synthetic construct
  source 1..28: mol_type = other DNA
ggcaggtcgggtgaccatctggagtcgg

SEQ ID NO: 17397 - DNA, 28 bp, synthetic construct
  source 1..28: mol_type = other DNA
aaatgagagaaactccgactccagatgg

SEQ ID NO: 17398 - DNA, 28 bp, synthetic construct
  source 1..28: mol_type = other DNA
gtcggagtttctctcatttgtaaagcgg

SEQ ID NO: 17399 - DNA, 28 bp, synthetic construct
  source 1..28: mol_type = other DNA
tcggagtttctctcatttgtaaagcggg

SEQ ID NO: 17400 - DNA, 28 bp, synthetic construct
  source 1..28: mol_type = other DNA
cggagtttctctcatttgtaaagcgggg

SEQ ID NO: 17401 - DNA, 28 bp, synthetic construct
  source 1..28: mol_type = other DNA
ggagtttctctcatttgtaaagcggggg

SEQ ID NO: 17402 - DNA, 28 bp, synthetic construct
  source 1..28: mol_type = other DNA
aaagcgggggtgatatttttctcacagg

SEQ ID NO: 17403 - DNA, 28 bp, synthetic construct
  source 1..28: mol_type = other DNA
aagcgggggtgatatttttctcacaggg

SEQ ID NO: 17404 - DNA, 28 bp, synthetic construct
  source 1..28: mol_type = other DNA
atatttttctcacagggctgcttcaagg

SEQ ID NO: 17405 - DNA, 28 bp, synthetic construct
  source 1..28: mol_type = other DNA
tatttttctcacagggctgcttcaaggg

SEQ ID NO: 17406 - DNA, 28 bp, synthetic construct
  source 1..28: mol_type = other DNA
tcaagggttaacaaagttaatgtctagg

SEQ ID NO: 17407 - DNA, 28 bp, synthetic construct
  source 1..28: mol_type = other DNA
gggttaacaaagttaatgtctaggaagg

SEQ ID NO: 17408 - DNA, 28 bp, synthetic construct
  source 1..28: mol_type = other DNA
aaggacatagcatagcaccttcacctgg

SEQ ID NO: 17409 - DNA, 28 bp, synthetic construct
  source 1..28: mol_type = other DNA
gcaccttcacctggttgcaagcccctgg

SEQ ID NO: 17410 - DNA, 28 bp, synthetic construct
  source 1..28: mol_type = other DNA
actccaggggcttgcaaccaggtgaagg

SEQ ID NO: 17411 - DNA, 28 bp, synthetic construct
  source 1..28: mol_type = other DNA
catgtgactccaggggcttgcaaccagg

SEQ ID NO: 17412 - DNA, 28 bp, synthetic construct
  source 1..28: mol_type = other DNA
ctggttgcaagcccctggagtcacatgg

SEQ ID NO: 17413 - DNA, 28 bp, synthetic construct
  source 1..28: mol_type = other DNA
cacagctgttgccatgtgactccagggg

SEQ ID NO: 17414 - DNA, 28 bp, synthetic construct
  source 1..28: mol_type = other DNA
ccctggagtcacatggcaacagctgtgg

SEQ ID NO: 17415 - DNA, 28 bp, synthetic construct
  source 1..28: mol_type = other DNA
tccacagctgttgccatgtgactccagg

SEQ ID NO: 17416 - DNA, 28 bp, synthetic construct
  source 1..28: mol_type = other DNA
gtcacatggcaacagctgtggaaccagg

SEQ ID NO: 17417 - DNA, 28 bp, synthetic construct
  source 1..28: mol_type = other DNA
taacatgtaagtcaagtcatttacctgg

SEQ ID NO: 17418 - DNA, 28 bp, synthetic construct
  source 1..28: mol_type = other DNA
cgctcttagttgttcgatttgtaaatgg

SEQ ID NO: 17419 - DNA, 28 bp, synthetic construct
  source 1..28: mol_type = other DNA
gctcttagttgttcgatttgtaaatggg

SEQ ID NO: 17420 - DNA, 28 bp, synthetic construct
  source 1..28: mol_type = other DNA
ggaaatatctggaaacgactaatttggg

SEQ ID NO: 17421 - DNA, 28 bp, synthetic construct
  source 1..28: mol_type = other DNA
aggaaatatctggaaacgactaatttgg

SEQ ID NO: 17422 - DNA, 28 bp, synthetic construct
  source 1..28: mol_type = other DNA
aaattagtcgtttccagatatttcctgg

SEQ ID NO: 17423 - DNA, 28 bp, synthetic construct
  source 1..28: mol_type = other DNA
tcgtttccagatatttcctggtaaatgg

SEQ ID NO: 17424 - DNA, 28 bp, synthetic construct
  source 1..28: mol_type = other DNA
caacaaccatttaccaggaaatatctgg

SEQ ID NO: 17425 - DNA, 28 bp, synthetic construct
  source 1..28: mol_type = other DNA
ttttatgattcaacaaccatttaccagg

SEQ ID NO: 17426 - DNA, 28 bp, synthetic construct
  source 1..28: mol_type = other DNA
ttgttgaatcataaaactagaaagatgg

SEQ ID NO: 17427 - DNA, 28 bp, synthetic construct
  source 1..28: mol_type = other DNA
tgttgaatcataaaactagaaagatggg

SEQ ID NO: 17428 - DNA, 28 bp, synthetic construct
  source 1..28: mol_type = other DNA
ataaaactagaaagatgggaaagaaagg

SEQ ID NO: 17429 - DNA, 28 bp, synthetic construct
  source 1..28: mol_type = other DNA
taaaactagaaagatgggaaagaaaggg

SEQ ID NO: 17430 - DNA, 28 bp, synthetic construct
  source 1..28: mol_type = other DNA
aactagaaagatgggaaagaaagggagg

SEQ ID NO: 17431 - DNA, 28 bp, synthetic construct
  source 1..28: mol_type = other DNA
caacaacacttcttcgaagtaagggggg

SEQ ID NO: 17432 - DNA, 28 bp, synthetic construct
  source 1..28: mol_type = other DNA
tcaacaacacttcttcgaagtaaggggg

SEQ ID NO: 17433 - DNA, 28 bp, synthetic construct
  source 1..28: mol_type = other DNA
atcaacaacacttcttcgaagtaagggg

SEQ ID NO: 17434 - DNA, 28 bp, synthetic construct
  source 1..28: mol_type = other DNA
catcaacaacacttcttcgaagtaaggg

SEQ ID NO: 17435 - DNA, 28 bp, synthetic construct
  source 1..28: mol_type = other DNA
acatcaacaacacttcttcgaagtaagg

SEQ ID NO: 17436 - DNA, 28 bp, synthetic construct
  source 1..28: mol_type = other DNA
cttcgaagaagtgttgttgatgtgaagg

SEQ ID NO: 17437 - DNA, 28 bp, synthetic construct
  source 1..28: mol_type = other DNA
aagaagtgttgttgatgtgaaggacagg

SEQ ID NO: 17438 - DNA, 28 bp, synthetic construct
  source 1..28: mol_type = other DNA
tcctaagaaacagctgatatctactagg

SEQ ID NO: 17439 - DNA, 28 bp, synthetic construct
  source 1..28: mol_type = other DNA
tcctagtagatatcagctgtttcttagg

SEQ ID NO: 17440 - DNA, 28 bp, synthetic construct
  source 1..28: mol_type = other DNA
ttgaagtttcttcctaagagatgtgagg

SEQ ID NO: 17441 - DNA, 28 bp, synthetic construct
  source 1..28: mol_type = other DNA
cttctgtcaaaacctcacatctcttagg

SEQ ID NO: 17442 - DNA, 28 bp, synthetic construct
  source 1..28: mol_type = other DNA
gatgtgaggttttgacagaagtgccagg

SEQ ID NO: 17443 - DNA, 28 bp, synthetic construct
  source 1..28: mol_type = other DNA
tttgacagaagtgccaggaagccagagg

SEQ ID NO: 17444 - DNA, 28 bp, synthetic construct
  source 1..28: mol_type = other DNA
cactactcacacacctctggcttcctgg

SEQ ID NO: 17445 - DNA, 28 bp, synthetic construct
  source 1..28: mol_type = other DNA
caggaagccagaggtgtgtgagtagtgg

SEQ ID NO: 17446 - DNA, 28 bp, synthetic construct
  source 1..28: mol_type = other DNA
aggaagccagaggtgtgtgagtagtggg

SEQ ID NO: 17447 - DNA, 28 bp, synthetic construct
  source 1..28: mol_type = other DNA
gattggcccactactcacacacctctgg

SEQ ID NO: 17448 - DNA, 28 bp, synthetic construct
  source 1..28: mol_type = other DNA
tgagtagtgggccaatctcgcgtgaagg

SEQ ID NO: 17449 - DNA, 28 bp, synthetic construct
  source 1..28: mol_type = other DNA
gtgggccaatctcgcgtgaaggctgtgg

SEQ ID NO: 17450 - DNA, 28 bp, synthetic construct
  source 1..28: mol_type = other DNA
tgggccaatctcgcgtgaaggctgtggg

SEQ ID NO: 17451 - DNA, 28 bp, synthetic construct
  source 1..28: mol_type = other DNA
ccaatctcgcgtgaaggctgtgggacgg

SEQ ID NO: 17452 - DNA, 28 bp, synthetic construct
  source 1..28: mol_type = other DNA
caatctcgcgtgaaggctgtgggacggg

SEQ ID NO: 17453 - DNA, 28 bp, synthetic construct
  source 1..28: mol_type = other DNA
aatctcgcgtgaaggctgtgggacgggg

SEQ ID NO: 17454 - DNA, 28 bp, synthetic construct
  source 1..28: mol_type = other DNA
tcgcgtgaaggctgtgggacggggcagg

SEQ ID NO: 17455 - DNA, 28 bp, synthetic construct
  source 1..28: mol_type = other DNA
tgaaggctgtgggacggggcaggagagg

SEQ ID NO: 17456 - DNA, 28 bp, synthetic construct
  source 1..28: mol_type = other DNA
gaaggctgtgggacggggcaggagaggg

SEQ ID NO: 17457 - DNA, 28 bp, synthetic construct
  source 1..28: mol_type = other DNA
aaggctgtgggacggggcaggagagggg

SEQ ID NO: 17458 - DNA, 28 bp, synthetic construct
  source 1..28: mol_type = other DNA
ccagcatttcctgagcgccagctaatgg

SEQ ID NO: 17459 - DNA, 28 bp, synthetic construct
  source 1..28: mol_type = other DNA
gcatttcctgagcgccagctaatggcgg

SEQ ID NO: 17460 - DNA, 28 bp, synthetic construct
  source 1..28: mol_type = other DNA
catttcctgagcgccagctaatggcggg

SEQ ID NO: 17461 - DNA, 28 bp, synthetic construct
  source 1..28: mol_type = other DNA
atttcctgagcgccagctaatggcgggg

SEQ ID NO: 17462 - DNA, 28 bp, synthetic construct
  source 1..28: mol_type = other DNA
aggtccccgccattagctggcgctcagg

SEQ ID NO: 17463 - DNA, 28 bp, synthetic construct
  source 1..28: mol_type = other DNA
tgagcgccagctaatggcggggacctgg

SEQ ID NO: 17464 - DNA, 28 bp, synthetic construct
  source 1..28: mol_type = other DNA
aaggtgccaggtccccgccattagctgg

SEQ ID NO: 17465 - DNA, 28 bp, synthetic construct
  source 1..28: mol_type = other DNA
tggagagtcacagagcaaaggtgccagg

SEQ ID NO: 17466 - DNA, 28 bp, synthetic construct
  source 1..28: mol_type = other DNA
atacagctggagagtcacagagcaaagg

SEQ ID NO: 17467 - DNA, 28 bp, synthetic construct
  source 1..28: mol_type = other DNA
tttgctctgtgactctccagctgtatgg

SEQ ID NO: 17468 - DNA, 28 bp, synthetic construct
  source 1..28: mol_type = other DNA
gactctccagctgtatggtgacatgagg

SEQ ID NO: 17469 - DNA, 28 bp, synthetic construct
  source 1..28: mol_type = other DNA
ctccagctgtatggtgacatgaggctgg

SEQ ID NO: 17470 - DNA, 28 bp, synthetic construct
  source 1..28: mol_type = other DNA
cgccagcctcatgtcaccatacagctgg

SEQ ID NO: 17471 - DNA, 28 bp, synthetic construct
  source 1..28: mol_type = other DNA
ggtgacatgaggctggcgttttctttgg

SEQ ID NO: 17472 - DNA, 28 bp, synthetic construct
  source 1..28: mol_type = other DNA
ggcgttttctttggtttcatacgtgagg

SEQ ID NO: 17473 - DNA, 28 bp, synthetic construct
  source 1..28: mol_type = other DNA
tttggtttcatacgtgaggaagctgagg

SEQ ID NO: 17474 - DNA, 28 bp, synthetic construct
  source 1..28: mol_type = other DNA
tttcatacgtgaggaagctgaggcttgg

SEQ ID NO: 17475 - DNA, 28 bp, synthetic construct
  source 1..28: mol_type = other DNA
ctgaggcttggtgatgtcctgtgcatgg

SEQ ID NO: 17476 - DNA, 28 bp, synthetic construct
  source 1..28: mol_type = other DNA
gcttggtgatgtcctgtgcatggctcgg

SEQ ID NO: 17477 - DNA, 28 bp, synthetic construct
  source 1..28: mol_type = other DNA
tagctctggagtccgagccatgcacagg

SEQ ID NO: 17478 - DNA, 28 bp, synthetic construct
  source 1..28: mol_type = other DNA
tggctcggactccagagctactcagagg

SEQ ID NO: 17479 - DNA, 28 bp, synthetic construct
  source 1..28: mol_type = other DNA
ggactccagagctactcagaggcagagg

SEQ ID NO: 17480 - DNA, 28 bp, synthetic construct
  source 1..28: mol_type = other DNA
gacggcctctgcctctgagtagctctgg

SEQ ID NO: 17481 - DNA, 28 bp, synthetic construct
  source 1..28: mol_type = other DNA
gcagaggccgtctgtaaacaccttcagg

SEQ ID NO: 17482 - DNA, 28 bp, synthetic construct
  source 1..28: mol_type = other DNA
gaggccgtctgtaaacaccttcaggtgg

SEQ ID NO: 17483 - DNA, 28 bp, synthetic construct
  source 1..28: mol_type = other DNA
ccgtctgtaaacaccttcaggtggttgg

SEQ ID NO: 17484 - DNA, 28 bp, synthetic construct
  source 1..28: mol_type = other DNA
tctgtaaacaccttcaggtggttggagg

SEQ ID NO: 17485 - DNA, 28 bp, synthetic construct
  source 1..28: mol_type = other DNA
taaacaccttcaggtggttggaggcagg

SEQ ID NO: 17486 - DNA, 28 bp, synthetic construct
  source 1..28: mol_type = other DNA
aaacaccttcaggtggttggaggcaggg

SEQ ID NO: 17487 - DNA, 28 bp, synthetic construct
  source 1..28: mol_type = other DNA
cagcaccctgcctccaaccacctgaagg

SEQ ID NO: 17488 - DNA, 28 bp, synthetic construct
  source 1..28: mol_type = other DNA
gccaatgctgatcactcacaagccaagg

SEQ ID NO: 17489 - DNA, 28 bp, synthetic construct
  source 1..28: mol_type = other DNA
gccttggcttgtgagtgatcagcattgg

SEQ ID NO: 17490 - DNA, 28 bp, synthetic construct
  source 1..28: mol_type = other DNA
actcacaagccaaggctttattgtaagg

SEQ ID NO: 17491 - DNA, 28 bp, synthetic construct
  source 1..28: mol_type = other DNA
ctcacaagccaaggctttattgtaaggg

SEQ ID NO: 17492 - DNA, 28 bp, synthetic construct
  source 1..28: mol_type = other DNA
ttatttagcccttacaataaagccttgg

SEQ ID NO: 17493 - DNA, 28 bp, synthetic construct
  source 1..28: mol_type = other DNA
acatatgcctagcatttatacagcacgg

SEQ ID NO: 17494 - DNA, 28 bp, synthetic construct
  source 1..28: mol_type = other DNA
catatgcctagcatttatacagcacggg

SEQ ID NO: 17495 - DNA, 28 bp, synthetic construct
  source 1..28: mol_type = other DNA
atatgcctagcatttatacagcacgggg

SEQ ID NO: 17496 - DNA, 28 bp, synthetic construct
  source 1..28: mol_type = other DNA
aaaagccccgtgctgtataaatgctagg

SEQ ID NO: 17497 - DNA, 28 bp, synthetic construct
  source 1..28: mol_type = other DNA
gcatttatacagcacggggctttttagg

SEQ ID NO: 17498 - DNA, 28 bp, synthetic construct
  source 1..28: mol_type = other DNA
tttttaggaaatagtgagacgaccatgg

SEQ ID NO: 17499 - DNA, 28 bp, synthetic construct
  source 1..28: mol_type = other DNA
aggaaatagtgagacgaccatggagagg

SEQ ID NO: 17500 - DNA, 28 bp, synthetic construct
  source 1..28: mol_type = other DNA
aaatagtgagacgaccatggagaggtgg

SEQ ID NO: 17501 - DNA, 28 bp, synthetic construct
  source 1..28: mol_type = other DNA
tagtgagacgaccatggagaggtggagg

SEQ ID NO: 17502 - DNA, 28 bp, synthetic construct
  source 1..28: mol_type = other DNA
ccatggagaggtggaggaagagagaagg

SEQ ID NO: 17503 - DNA, 28 bp, synthetic construct
  source 1..28: mol_type = other DNA
catggagaggtggaggaagagagaaggg

SEQ ID NO: 17504 - DNA, 28 bp, synthetic construct
  source 1..28: mol_type = other DNA
tatagttctcttaagaaactctttaagg

SEQ ID NO: 17505 - DNA, 28 bp, synthetic construct
  source 1..28: mol_type = other DNA
agagaactatatattacaaagtccttgg

SEQ ID NO: 17506 - DNA, 28 bp, synthetic construct
  source 1..28: mol_type = other DNA
caaagtccttggagttttttttccctgg

SEQ ID NO: 17507 - DNA, 28 bp, synthetic construct
  source 1..28: mol_type = other DNA
gtctaaccagggaaaaaaaactccaagg

SEQ ID NO: 17508 - DNA, 28 bp, synthetic construct
  source 1..28: mol_type = other DNA
tttcatgtaaacttatgtctaaccaggg

SEQ ID NO: 17509 - DNA, 28 bp, synthetic construct
  source 1..28: mol_type = other DNA
gtttcatgtaaacttatgtctaaccagg

SEQ ID NO: 17510 - DNA, 28 bp, synthetic construct
  source 1..28: mol_type = other DNA
acataagtttacatgaaacgttaaacgg

SEQ ID NO: 17511 - DNA, 28 bp, synthetic construct
  source 1..28: mol_type = other DNA
gtgagaagacataaggaaggagatgtgg

SEQ ID NO: 17512 - DNA, 28 bp, synthetic construct
  source 1..28: mol_type = other DNA
aagtggctgtgagaagacataaggaagg

SEQ ID NO: 17513 - DNA, 28 bp, synthetic construct
  source 1..28: mol_type = other DNA
tcacaagtggctgtgagaagacataagg

SEQ ID NO: 17514 - DNA, 28 bp, synthetic construct
  source 1..28: mol_type = other DNA
tgtatcttgataagaaactcacaagtgg

SEQ ID NO: 17515 - DNA, 28 bp, synthetic construct
  source 1..28: mol_type = other DNA
agtttcttatcaagatacagaattatgg

SEQ ID NO: 17516 - DNA, 28 bp, synthetic construct
  source 1..28: mol_type = other DNA
caagatacagaattatggccaagtgcgg

SEQ ID NO: 17517 - DNA, 28 bp, synthetic construct
  source 1..28: mol_type = other DNA
gattacacgtgtgagctaccgcacttgg

SEQ ID NO: 17518 - DNA, 28 bp, synthetic construct
  source 1..28: mol_type = other DNA
gtaatcccagcactttgagagactgagg

SEQ ID NO: 17519 - DNA, 28 bp, synthetic construct
  source 1..28: mol_type = other DNA
atcccagcactttgagagactgaggtgg

SEQ ID NO: 17520 - DNA, 28 bp, synthetic construct
  source 1..28: mol_type = other DNA
ttccacctcagtctctcaaagtgctggg

SEQ ID NO: 17521 - DNA, 28 bp, synthetic construct
  source 1..28: mol_type = other DNA
cttccacctcagtctctcaaagtgctgg

SEQ ID NO: 17522 - DNA, 28 bp, synthetic construct
  source 1..28: mol_type = other DNA
cagcactttgagagactgaggtggaagg

SEQ ID NO: 17523 - DNA, 28 bp, synthetic construct
  source 1..28: mol_type = other DNA
tgaggtggaaggatcatgtgtgctcagg

SEQ ID NO: 17524 - DNA, 28 bp, synthetic construct
  source 1..28: mol_type = other DNA
gtgctcaggagtttcagaccaacctagg

SEQ ID NO: 17525 - DNA, 28 bp, synthetic construct
  source 1..28: mol_type = other DNA
gagtttcagaccaacctaggcaatatgg

SEQ ID NO: 17526 - DNA, 28 bp, synthetic construct
  source 1..28: mol_type = other DNA
cagggttttaccatattgcctaggttgg

SEQ ID NO: 17527 - DNA, 28 bp, synthetic construct
  source 1..28: mol_type = other DNA
gagacagggttttaccatattgcctagg

SEQ ID NO: 17528 - DNA, 28 bp, synthetic construct
  source 1..28: mol_type = other DNA
atttttgtatttttttgtagagacaggg

SEQ ID NO: 17529 - DNA, 28 bp, synthetic construct
  source 1..28: mol_type = other DNA
aatttttgtatttttttgtagagacagg

SEQ ID NO: 17530 - DNA, 28 bp, synthetic construct
  source 1..28: mol_type = other DNA
tctacaaaaaaatacaaaaattagctgg

SEQ ID NO: 17531 - DNA, 28 bp, synthetic construct
  source 1..28: mol_type = other DNA
ctacaaaaaaatacaaaaattagctggg

SEQ ID NO: 17532 - DNA, 28 bp, synthetic construct
  source 1..28: mol_type = other DNA
aaaaaatacaaaaattagctgggcatgg

SEQ ID NO: 17533 - DNA, 28 bp, synthetic construct
  source 1..28: mol_type = other DNA
aaatacaaaaattagctgggcatggtgg

SEQ ID NO: 17534 - DNA, 28 bp, synthetic construct
  source 1..28: mol_type = other DNA
catggtggcatattccaatagttccagg

SEQ ID NO: 17535 - DNA, 28 bp, synthetic construct
  source 1..28: mol_type = other DNA
gcatattccaatagttccaggcactcgg

SEQ ID NO: 17536 - DNA, 28 bp, synthetic construct
  source 1..28: mol_type = other DNA
catattccaatagttccaggcactcggg

SEQ ID NO: 17537 - DNA, 28 bp, synthetic construct
  source 1..28: mol_type = other DNA
attccaatagttccaggcactcgggagg

SEQ ID NO: 17538 - DNA, 28 bp, synthetic construct
  source 1..28: mol_type = other DNA
cagcctcccgagtgcctggaactattgg

SEQ ID NO: 17539 - DNA, 28 bp, synthetic construct
  source 1..28: mol_type = other DNA
ttccaggcactcgggaggctgagacagg

SEQ ID NO: 17540 - DNA, 28 bp, synthetic construct
  source 1..28: mol_type = other DNA
ctcctgtctcagcctcccgagtgcctgg

SEQ ID NO: 17541 - DNA, 28 bp, synthetic construct
  source 1..28: mol_type = other DNA
caggcactcgggaggctgagacaggagg

SEQ ID NO: 17542 - DNA, 28 bp, synthetic construct
  source 1..28: mol_type = other DNA
gacaggaggattgcttgagcccaagagg

SEQ ID NO: 17543 - DNA, 28 bp, synthetic construct
  source 1..28: mol_type = other DNA
cagctcactgcagtcttgacctcttggg

SEQ ID NO: 17544 - DNA, 28 bp, synthetic construct
  source 1..28: mol_type = other DNA
acagctcactgcagtcttgacctcttgg

SEQ ID NO: 17545 - DNA, 28 bp, synthetic construct
  source 1..28: mol_type = other DNA
gtgatcgagccactgcactacagcctgg

SEQ ID NO: 17546 - DNA, 28 bp, synthetic construct
  source 1..28: mol_type = other DNA
tgatcgagccactgcactacagcctggg

SEQ ID NO: 17547 - DNA, 28 bp, synthetic construct
  source 1..28: mol_type = other DNA
ctctgtggcccaggctgtagtgcagtgg

SEQ ID NO: 17548 - DNA, 28 bp, synthetic construct
  source 1..28: mol_type = other DNA
gagacaggatcttgctctgtggcccagg

SEQ ID NO: 17549 - DNA, 28 bp, synthetic construct
  source 1..28: mol_type = other DNA
ttttttgagacaggatcttgctctgtgg

SEQ ID NO: 17550 - DNA, 28 bp, synthetic construct
  source 1..28: mol_type = other DNA
tttattttattttattttttgagacagg

SEQ ID NO: 17551 - DNA, 28 bp, synthetic construct
  source 1..28: mol_type = other DNA
caattccttgctcagaaatctctacagg

SEQ ID NO: 17552 - DNA, 28 bp, synthetic construct
  source 1..28: mol_type = other DNA
gcacacctgtagagatttctgagcaagg

SEQ ID NO: 17553 - DNA, 28 bp, synthetic construct
  source 1..28: mol_type = other DNA
acaggtgtgcttctttgttaagaaatgg

SEQ ID NO: 17554 - DNA, 28 bp, synthetic construct
  source 1..28: mol_type = other DNA
ggtgtgcttctttgttaagaaatggagg

SEQ ID NO: 17555 - DNA, 28 bp, synthetic construct
  source 1..28: mol_type = other DNA
ctggtctctacaagactcagaagtcagg

SEQ ID NO: 17556 - DNA, 28 bp, synthetic construct
  source 1..28: mol_type = other DNA
ggcagaaggctgcaggagtcagatctgg

SEQ ID NO: 17557 - DNA, 28 bp, synthetic construct
  source 1..28: mol_type = other DNA
tcctgcagccttctgcccacagagctgg

SEQ ID NO: 17558 - DNA, 28 bp, synthetic construct
  source 1..28: mol_type = other DNA
gccagctctgtgggcagaaggctgcagg

SEQ ID NO: 17559 - DNA, 28 bp, synthetic construct
  source 1..28: mol_type = other DNA
gcagccttctgcccacagagctggcagg

SEQ ID NO: 17560 - DNA, 28 bp, synthetic construct
  source 1..28: mol_type = other DNA
gccttctgcccacagagctggcaggcgg

SEQ ID NO: 17561 - DNA, 28 bp, synthetic construct
  source 1..28: mol_type = other DNA
ccttctgcccacagagctggcaggcggg

SEQ ID NO: 17562 - DNA, 28 bp, synthetic construct
  source 1..28: mol_type = other DNA
cttctgcccacagagctggcaggcgggg

SEQ ID NO: 17563 - DNA, 28 bp, synthetic construct
  source 1..28: mol_type = other DNA
ttctgcccacagagctggcaggcggggg

SEQ ID NO: 17564 - DNA, 28 bp, synthetic construct
  source 1..28: mol_type = other DNA
acattcccccgcctgccagctctgtggg

SEQ ID NO: 17565 - DNA, 28 bp, synthetic construct
  source 1..28: mol_type = other DNA
cacattcccccgcctgccagctctgtgg

SEQ ID NO: 17566 - DNA, 28 bp, synthetic construct
  source 1..28: mol_type = other DNA
caggcgggggaatgtgcgcagagtgagg

SEQ ID NO: 17567 - DNA, 28 bp, synthetic construct
  source 1..28: mol_type = other DNA
gcgggggaatgtgcgcagagtgaggagg

SEQ ID NO: 17568 - DNA, 28 bp, synthetic construct
  source 1..28: mol_type = other DNA
ggagctgatctgacattccgaacagtgg

SEQ ID NO: 17569 - DNA, 28 bp, synthetic construct
  source 1..28: mol_type = other DNA
caaataggcagcagtctccactgttcgg

SEQ ID NO: 17570 - DNA, 28 bp, synthetic construct
  source 1..28: mol_type = other DNA
cgaacagtggagactgctgcctatttgg

SEQ ID NO: 17571 - DNA, 28 bp, synthetic construct
  source 1..28: mol_type = other DNA
cagaaggacagtggtgcggccaaatagg

SEQ ID NO: 17572 - DNA, 28 bp, synthetic construct
  source 1..28: mol_type = other DNA
ttggccgcaccactgtccttctgcatgg

SEQ ID NO: 17573 - DNA, 28 bp, synthetic construct
  source 1..28: mol_type = other DNA
ttttccatgcagaaggacagtggtgcgg

SEQ ID NO: 17574 - DNA, 28 bp, synthetic construct
  source 1..28: mol_type = other DNA
gtgacttttccatgcagaaggacagtgg

SEQ ID NO: 17575 - DNA, 28 bp, synthetic construct
  source 1..28: mol_type = other DNA
atttactgtgacttttccatgcagaagg

SEQ ID NO: 17576 - DNA, 28 bp, synthetic construct
  source 1..28: mol_type = other DNA
tgcatggaaaagtcacagtaaataatgg

SEQ ID NO: 17577 - DNA, 28 bp, synthetic construct
  source 1..28: mol_type = other DNA
aggcagctcagtaaaatcgactcacagg

SEQ ID NO: 17578 - DNA, 28 bp, synthetic construct
  source 1..28: mol_type = other DNA
tgcctttttaaatatatgtgtagaaagg

SEQ ID NO: 17579 - DNA, 28 bp, synthetic construct
  source 1..28: mol_type = other DNA
gcctttttaaatatatgtgtagaaaggg

SEQ ID NO: 17580 - DNA, 28 bp, synthetic construct
  source 1..28: mol_type = other DNA
gccctttctacacatatatttaaaaagg

SEQ ID NO: 17581 - DNA, 28 bp, synthetic construct
  source 1..28: mol_type = other DNA
atacacatgtacacacgtgcacacgtgg

SEQ ID NO: 17582 - DNA, 28 bp, synthetic construct
  source 1..28: mol_type = other DNA
ggtgggtgcatctggtctggtgcactgg

SEQ ID NO: 17583 - DNA, 28 bp, synthetic construct
  source 1..28: mol_type = other DNA
tggaattgggtgggtgcatctggtctgg

SEQ ID NO: 17584 - DNA, 28 bp, synthetic construct
  source 1..28: mol_type = other DNA
gagcgtggaattgggtgggtgcatctgg

SEQ ID NO: 17585 - DNA, 28 bp, synthetic construct
  source 1..28: mol_type = other DNA
ggggctgaggagcgtggaattgggtggg

SEQ ID NO: 17586 - DNA, 28 bp, synthetic construct
  source 1..28: mol_type = other DNA
aggggctgaggagcgtggaattgggtgg

SEQ ID NO: 17587 - DNA, 28 bp, synthetic construct
  source 1..28: mol_type = other DNA
gcaaggggctgaggagcgtggaattggg

SEQ ID NO: 17588 - DNA, 28 bp, synthetic construct
  source 1..28: mol_type = other DNA
agcaaggggctgaggagcgtggaattgg

SEQ ID NO: 17589 - DNA, 28 bp, synthetic construct
  source 1..28: mol_type = other DNA
gaggaaagcaaggggctgaggagcgtgg

SEQ ID NO: 17590 - DNA, 28 bp, synthetic construct
  source 1..28: mol_type = other DNA
gtctgcagaggaaagcaaggggctgagg

SEQ ID NO: 17591 - DNA, 28 bp, synthetic construct
  source 1..28: mol_type = other DNA
ctggctgtctgcagaggaaagcaagggg

SEQ ID NO: 17592 - DNA, 28 bp, synthetic construct
  source 1..28: mol_type = other DNA
actggctgtctgcagaggaaagcaaggg

SEQ ID NO: 17593 - DNA, 28 bp, synthetic construct
  source 1..28: mol_type = other DNA
aactggctgtctgcagaggaaagcaagg

SEQ ID NO: 17594 - DNA, 28 bp, synthetic construct
  source 1..28: mol_type = other DNA
ctgtagctgaactggctgtctgcagagg

SEQ ID NO: 17595 - DNA, 28 bp, synthetic construct
  source 1..28: mol_type = other DNA
caatctggcataactgtagctgaactgg

SEQ ID NO: 17596 - DNA, 28 bp, synthetic construct
  source 1..28: mol_type = other DNA
ggtaaagatcagagtgcaggcaatctgg

SEQ ID NO: 17597 - DNA, 28 bp, synthetic construct
  source 1..28: mol_type = other DNA
ctggtgatggtaaagatcagagtgcagg

SEQ ID NO: 17598 - DNA, 28 bp, synthetic construct
  source 1..28: mol_type = other DNA
tgagctcaagctgagagtctggtgatgg

SEQ ID NO: 17599 - DNA, 28 bp, synthetic construct
  source 1..28: mol_type = other DNA
caggcatgagctcaagctgagagtctgg

SEQ ID NO: 17600 - DNA, 28 bp, synthetic construct
  source 1..28: mol_type = other DNA
gctcatgcctgagaaatccactttctgg

SEQ ID NO: 17601 - DNA, 28 bp, synthetic construct
  source 1..28: mol_type = other DNA
ctcatgcctgagaaatccactttctggg

SEQ ID NO: 17602 - DNA, 28 bp, synthetic construct
  source 1..28: mol_type = other DNA
atgcctgagaaatccactttctgggagg

SEQ ID NO: 17603 - DNA, 28 bp, synthetic construct
  source 1..28: mol_type = other DNA
cttcctcccagaaagtggatttctcagg

SEQ ID NO: 17604 - DNA, 28 bp, synthetic construct
  source 1..28: mol_type = other DNA
ctgagaaatccactttctgggaggaagg

SEQ ID NO: 17605 - DNA, 28 bp, synthetic construct
  source 1..28: mol_type = other DNA
tttcttctgccttcctcccagaaagtgg

SEQ ID NO: 17606 - DNA, 28 bp, synthetic construct
  source 1..28: mol_type = other DNA
gggaggaaggcagaagaaactgccaagg

SEQ ID NO: 17607 - DNA, 28 bp, synthetic construct
  source 1..28: mol_type = other DNA
ggaaggcagaagaaactgccaaggcagg

SEQ ID NO: 17608 - DNA, 28 bp, synthetic construct
  source 1..28: mol_type = other DNA
ggaggtcaagtcttcagtcctgccttgg

SEQ ID NO: 17609 - DNA, 28 bp, synthetic construct
  source 1..28: mol_type = other DNA
ctgaagacttgacctccacctgtagtgg

SEQ ID NO: 17610 - DNA, 28 bp, synthetic construct
  source 1..28: mol_type = other DNA
tgaagacttgacctccacctgtagtggg

SEQ ID NO: 17611 - DNA, 28 bp, synthetic construct
  source 1..28: mol_type = other DNA
gaagacttgacctccacctgtagtgggg

SEQ ID NO: 17612 - DNA, 28 bp, synthetic construct
  source 1..28: mol_type = other DNA
cttgacctccacctgtagtggggtcagg

SEQ ID NO: 17613 - DNA, 28 bp, synthetic construct
  source 1..28: mol_type = other DNA
ggtgacctgaccccactacaggtggagg

SEQ ID NO: 17614 - DNA, 28 bp, synthetic construct
  source 1..28: mol_type = other DNA
tctggtgacctgaccccactacaggtgg

SEQ ID NO: 17615 - DNA, 28 bp, synthetic construct
  source 1..28: mol_type = other DNA
acctgtagtggggtcaggtcaccagagg

SEQ ID NO: 17616 - DNA, 28 bp, synthetic construct
  source 1..28: mol_type = other DNA
gcctctggtgacctgaccccactacagg

SEQ ID NO: 17617 - DNA, 28 bp, synthetic construct
  source 1..28: mol_type = other DNA
gtagtggggtcaggtcaccagaggctgg

SEQ ID NO: 17618 - DNA, 28 bp, synthetic construct
  source 1..28: mol_type = other DNA
gtcaccagaggctggctgactccccagg

SEQ ID NO: 17619 - DNA, 28 bp, synthetic construct
  source 1..28: mol_type = other DNA
aaatcctggggagtcagccagcctctgg

SEQ ID NO: 17620 - DNA, 28 bp, synthetic construct
  source 1..28: mol_type = other DNA
tgtaatactctgctgagaaatcctgggg

SEQ ID NO: 17621 - DNA, 28 bp, synthetic construct
  source 1..28: mol_type = other DNA
gtgtaatactctgctgagaaatcctggg

SEQ ID NO: 17622 - DNA, 28 bp, synthetic construct
  source 1..28: mol_type = other DNA
tgtgtaatactctgctgagaaatcctgg

SEQ ID NO: 17623 - DNA, 28 bp, synthetic construct
  source 1..28: mol_type = other DNA
aagtggttgctaatctttaaggaagggg

SEQ ID NO: 17624 - DNA, 28 bp, synthetic construct
  source 1..28: mol_type = other DNA
taagtggttgctaatctttaaggaaggg

SEQ ID NO: 17625 - DNA, 28 bp, synthetic construct
  source 1..28: mol_type = other DNA
ttaagtggttgctaatctttaaggaagg

SEQ ID NO: 17626 - DNA, 28 bp, synthetic construct
  source 1..28: mol_type = other DNA
gtctttaagtggttgctaatctttaagg

SEQ ID NO: 17627 - DNA, 28 bp, synthetic construct
  source 1..28: mol_type = other DNA
aaccacttaaagacacaaagtgtgcagg

SEQ ID NO: 17628 - DNA, 28 bp, synthetic construct
  source 1..28: mol_type = other DNA
gtcctgcacactttgtgtctttaagtgg

SEQ ID NO: 17629 - DNA, 28 bp, synthetic construct
  source 1..28: mol_type = other DNA
cacaaagtgtgcaggactgtacccatgg

SEQ ID NO: 17630 - DNA, 28 bp, synthetic construct
  source 1..28: mol_type = other DNA
gcaggactgtacccatggccgagagcgg

SEQ ID NO: 17631 - DNA, 28 bp, synthetic construct
  source 1..28: mol_type = other DNA
ggactgtacccatggccgagagcggcgg

SEQ ID NO: 17632 - DNA, 28 bp, synthetic construct
  source 1..28: mol_type = other DNA
gactgtacccatggccgagagcggcggg

SEQ ID NO: 17633 - DNA, 28 bp, synthetic construct
  source 1..28: mol_type = other DNA
tcttaatcccgccgctctcggccatggg

SEQ ID NO: 17634 - DNA, 28 bp, synthetic construct
  source 1..28: mol_type = other DNA
ctcttaatcccgccgctctcggccatgg

SEQ ID NO: 17635 - DNA, 28 bp, synthetic construct
  source 1..28: mol_type = other DNA
catggccgagagcggcgggattaagagg

SEQ ID NO: 17636 - DNA, 28 bp, synthetic construct
  source 1..28: mol_type = other DNA
atggccgagagcggcgggattaagaggg

SEQ ID NO: 17637 - DNA, 28 bp, synthetic construct
  source 1..28: mol_type = other DNA
gttgccctcttaatcccgccgctctcgg

SEQ ID NO: 17638 - DNA, 28 bp, synthetic construct
  source 1..28: mol_type = other DNA
tgactcagcacagaggaggagggatggg

SEQ ID NO: 17639 - DNA, 28 bp, synthetic construct
  source 1..28: mol_type = other DNA
gtgactcagcacagaggaggagggatgg

SEQ ID NO: 17640 - DNA, 28 bp, synthetic construct
  source 1..28: mol_type = other DNA
gaaggtgactcagcacagaggaggaggg

SEQ ID NO: 17641 - DNA, 28 bp, synthetic construct
  source 1..28: mol_type = other DNA
agaaggtgactcagcacagaggaggagg

SEQ ID NO: 17642 - DNA, 28 bp, synthetic construct
  source 1..28: mol_type = other DNA
agcagaaggtgactcagcacagaggagg

SEQ ID NO: 17643 - DNA, 28 bp, synthetic construct
  source 1..28: mol_type = other DNA
cctctgtgctgagtcaccttctgcttgg

SEQ ID NO: 17644 - DNA, 28 bp, synthetic construct
  source 1..28: mol_type = other DNA
gtcaccttctgcttggaattctgacagg

SEQ ID NO: 17645 - DNA, 28 bp, synthetic construct
  source 1..28: mol_type = other DNA
tcaccttctgcttggaattctgacaggg

SEQ ID NO: 17646 - DNA, 28 bp, synthetic construct
  source 1..28: mol_type = other DNA
ggtccctgtcagaattccaagcagaagg

SEQ ID NO: 17647 - DNA, 28 bp, synthetic construct
  source 1..28: mol_type = other DNA
gcttggaattctgacagggacccgttgg

SEQ ID NO: 17648 - DNA, 28 bp, synthetic construct
  source 1..28: mol_type = other DNA
cttggaattctgacagggacccgttggg

SEQ ID NO: 17649 - DNA, 28 bp, synthetic construct
  source 1..28: mol_type = other DNA
ttctgacagggacccgttgggcttctgg

SEQ ID NO: 17650 - DNA, 28 bp, synthetic construct
  source 1..28: mol_type = other DNA
gacagggacccgttgggcttctggaagg

SEQ ID NO: 17651 - DNA, 28 bp, synthetic construct
  source 1..28: mol_type = other DNA
acagggacccgttgggcttctggaaggg

SEQ ID NO: 17652 - DNA, 28 bp, synthetic construct
  source 1..28: mol_type = other DNA
gggacccgttgggcttctggaagggagg

SEQ ID NO: 17653 - DNA, 28 bp, synthetic construct
  source 1..28: mol_type = other DNA
ggacccgttgggcttctggaagggaggg

SEQ ID NO: 17654 - DNA, 28 bp, synthetic construct
  source 1..28: mol_type = other DNA
tgtccctcccttccagaagcccaacggg

SEQ ID NO: 17655 - DNA, 28 bp, synthetic construct
  source 1..28: mol_type = other DNA
ctgtccctcccttccagaagcccaacgg

SEQ ID NO: 17656 - DNA, 28 bp, synthetic construct
  source 1..28: mol_type = other DNA
ggcttctggaagggagggacagcagagg

SEQ ID NO: 17657 - DNA, 28 bp, synthetic construct
  source 1..28: mol_type = other DNA
cagaggatccaccctctgtgtgtcctgg

SEQ ID NO: 17658 - DNA, 28 bp, synthetic construct
  source 1..28: mol_type = other DNA
agaggatccaccctctgtgtgtcctggg

SEQ ID NO: 17659 - DNA, 28 bp, synthetic construct
  source 1..28: mol_type = other DNA
gaggatccaccctctgtgtgtcctgggg

SEQ ID NO: 17660 - DNA, 28 bp, synthetic construct
  source 1..28: mol_type = other DNA
aggatccaccctctgtgtgtcctggggg

SEQ ID NO: 17661 - DNA, 28 bp, synthetic construct
  source 1..28: mol_type = other DNA
aatctcccccaggacacacagagggtgg

SEQ ID NO: 17662 - DNA, 28 bp, synthetic construct
  source 1..28: mol_type = other DNA
agtaatctcccccaggacacacagaggg

SEQ ID NO: 17663 - DNA, 28 bp, synthetic construct
  source 1..28: mol_type = other DNA
aagtaatctcccccaggacacacagagg

SEQ ID NO: 17664 - DNA, 28 bp, synthetic construct
  source 1..28: mol_type = other DNA
tgtcctgggggagattacttatctctgg

SEQ ID NO: 17665 - DNA, 28 bp, synthetic construct
  source 1..28: mol_type = other DNA
aggccagagataagtaatctcccccagg

SEQ ID NO: 17666 - DNA, 28 bp, synthetic construct
  source 1..28: mol_type = other DNA
tacttatctctggcctccctgaagcagg

SEQ ID NO: 17667 - DNA, 28 bp, synthetic construct
  source 1..28: mol_type = other DNA
acttatctctggcctccctgaagcaggg

SEQ ID NO: 17668 - DNA, 28 bp, synthetic construct
  source 1..28: mol_type = other DNA
tctctggcctccctgaagcagggcctgg

SEQ ID NO: 17669 - DNA, 28 bp, synthetic construct
  source 1..28: mol_type = other DNA
ctctggcctccctgaagcagggcctggg

SEQ ID NO: 17670 - DNA, 28 bp, synthetic construct
  source 1..28: mol_type = other DNA
cagaagcccaggccctgcttcagggagg

SEQ ID NO: 17671 - DNA, 28 bp, synthetic construct
  source 1..28: mol_type = other DNA
ctccctgaagcagggcctgggcttctgg

SEQ ID NO: 17672 - DNA, 28 bp, synthetic construct
  source 1..28: mol_type = other DNA
ttccagaagcccaggccctgcttcaggg

SEQ ID NO: 17673 - DNA, 28 bp, synthetic construct
  source 1..28: mol_type = other DNA
attccagaagcccaggccctgcttcagg

SEQ ID NO: 17674 - DNA, 28 bp, synthetic construct
  source 1..28: mol_type = other DNA
agggcctgggcttctggaatctttgagg

SEQ ID NO: 17675 - DNA, 28 bp, synthetic construct
  source 1..28: mol_type = other DNA
tcagcctcaaagattccagaagcccagg

SEQ ID NO: 17676 - DNA, 28 bp, synthetic construct
  source 1..28: mol_type = other DNA
tttgaggctgacaccctgccagccctgg

SEQ ID NO: 17677 - DNA, 28 bp, synthetic construct
  source 1..28: mol_type = other DNA
ttgaggctgacaccctgccagccctggg

SEQ ID NO: 17678 - DNA, 28 bp, synthetic construct
  source 1..28: mol_type = other DNA
tgaggctgacaccctgccagccctgggg

SEQ ID NO: 17679 - DNA, 28 bp, synthetic construct
  source 1..28: mol_type = other DNA
acaccctgccagccctggggatgagagg

SEQ ID NO: 17680 - DNA, 28 bp, synthetic construct
  source 1..28: mol_type = other DNA
caccctgccagccctggggatgagaggg

SEQ ID NO: 17681 - DNA, 28 bp, synthetic construct
  source 1..28: mol_type = other DNA
ttccctctcatccccagggctggcaggg

SEQ ID NO: 17682 - DNA, 28 bp, synthetic construct
  source 1..28: mol_type = other DNA
attccctctcatccccagggctggcagg

SEQ ID NO: 17683 - DNA, 28 bp, synthetic construct
  source 1..28: mol_type = other DNA
tgccagccctggggatgagagggaatgg

SEQ ID NO: 17684 - DNA, 28 bp, synthetic construct
  source 1..28: mol_type = other DNA
ggccattccctctcatccccagggctgg

SEQ ID NO: 17685 - DNA, 28 bp, synthetic construct
  source 1..28: mol_type = other DNA
acacggccattccctctcatccccaggg

SEQ ID NO: 17686 - DNA, 28 bp, synthetic construct
  source 1..28: mol_type = other DNA
gacacggccattccctctcatccccagg

SEQ ID NO: 17687 - DNA, 28 bp, synthetic construct
  source 1..28: mol_type = other DNA
tggccgtgtctgtctgcagagcctgagg

SEQ ID NO: 17688 - DNA, 28 bp, synthetic construct
  source 1..28: mol_type = other DNA
ccgtgtctgtctgcagagcctgaggagg

SEQ ID NO: 17689 - DNA, 28 bp, synthetic construct
  source 1..28: mol_type = other DNA
tggaggctgtgctcagctcctcctcagg

SEQ ID NO: 17690 - DNA, 28 bp, synthetic construct
  source 1..28: mol_type = other DNA
agcgatcaactgaagagaactctggagg

SEQ ID NO: 17691 - DNA, 28 bp, synthetic construct
  source 1..28: mol_type = other DNA
ctaagcgatcaactgaagagaactctgg

SEQ ID NO: 17692 - DNA, 28 bp, synthetic construct
  source 1..28: mol_type = other DNA
cagagttctcttcagttgatcgcttagg

SEQ ID NO: 17693 - DNA, 28 bp, synthetic construct
  source 1..28: mol_type = other DNA
agttctcttcagttgatcgcttaggtgg

SEQ ID NO: 17694 - DNA, 28 bp, synthetic construct
  source 1..28: mol_type = other DNA
ttcagttgatcgcttaggtggacaaagg

SEQ ID NO: 17695 - DNA, 28 bp, synthetic construct
  source 1..28: mol_type = other DNA
cttaggtggacaaaggccacagaaatgg

SEQ ID NO: 17696 - DNA, 28 bp, synthetic construct
  source 1..28: mol_type = other DNA
gctgaggagtttaaatccatttctgtgg

SEQ ID NO: 17697 - DNA, 28 bp, synthetic construct
  source 1..28: mol_type = other DNA
gaacaaacatgcaaagaaagggctgagg

SEQ ID NO: 17698 - DNA, 28 bp, synthetic construct
  source 1..28: mol_type = other DNA
aaatgagaacaaacatgcaaagaaaggg

SEQ ID NO: 17699 - DNA, 28 bp, synthetic construct
  source 1..28: mol_type = other DNA
caaatgagaacaaacatgcaaagaaagg

SEQ ID NO: 17700 - DNA, 28 bp, synthetic construct
  source 1..28: mol_type = other DNA
tgcatttcacacgttcttgaggtgtagg

SEQ ID NO: 17701 - DNA, 28 bp, synthetic construct
  source 1..28: mol_type = other DNA
tgtatgtgcatttcacacgttcttgagg

SEQ ID NO: 17702 - DNA, 28 bp, synthetic construct
  source 1..28: mol_type = other DNA
aatgcacatacaataaccccatttcagg

SEQ ID NO: 17703 - DNA, 28 bp, synthetic construct
  source 1..28: mol_type = other DNA
aagctggacttggcttcctgaaatgggg

SEQ ID NO: 17704 - DNA, 28 bp, synthetic construct
  source 1..28: mol_type = other DNA
taagctggacttggcttcctgaaatggg

SEQ ID NO: 17705 - DNA, 28 bp, synthetic construct
  source 1..28: mol_type = other DNA
ttaagctggacttggcttcctgaaatgg

SEQ ID NO: 17706 - DNA, 28 bp, synthetic construct
  source 1..28: mol_type = other DNA
aatgttttgactgttaagctggacttgg

SEQ ID NO: 17707 - DNA, 28 bp, synthetic construct
  source 1..28: mol_type = other DNA
gaaggaaatgttttgactgttaagctgg

SEQ ID NO: 17708 - DNA, 28 bp, synthetic construct
  source 1..28: mol_type = other DNA
ggcaaagtgaaggactaaagactgaagg

SEQ ID NO: 17709 - DNA, 28 bp, synthetic construct
  source 1..28: mol_type = other DNA
tgtaaaagggagttcggcaaagtgaagg

SEQ ID NO: 17710 - DNA, 28 bp, synthetic construct
  source 1..28: mol_type = other DNA
cactttgccgaactcccttttacaccgg

SEQ ID NO: 17711 - DNA, 28 bp, synthetic construct
  source 1..28: mol_type = other DNA
gttgctgccggtgtaaaagggagttcgg

SEQ ID NO: 17712 - DNA, 28 bp, synthetic construct
  source 1..28: mol_type = other DNA
ttaaactgttgctgccggtgtaaaaggg

SEQ ID NO: 17713 - DNA, 28 bp, synthetic construct
  source 1..28: mol_type = other DNA
gttaaactgttgctgccggtgtaaaagg

SEQ ID NO: 17714 - DNA, 28 bp, synthetic construct
  source 1..28: mol_type = other DNA
aagcaacaggttaaactgttgctgccgg

SEQ ID NO: 17715 - DNA, 28 bp, synthetic construct
  source 1..28: mol_type = other DNA
agtagcacactcttacagaagcaacagg

SEQ ID NO: 17716 - DNA, 28 bp, synthetic construct
  source 1..28: mol_type = other DNA
tgttgcttctgtaagagtgtgctactgg

SEQ ID NO: 17717 - DNA, 28 bp, synthetic construct
  source 1..28: mol_type = other DNA
gttgcttctgtaagagtgtgctactggg

SEQ ID NO: 17718 - DNA, 28 bp, synthetic construct
  source 1..28: mol_type = other DNA
tgtaactgcacacgtgttttagatgtgg

SEQ ID NO: 17719 - DNA, 28 bp, synthetic construct
  source 1..28: mol_type = other DNA
gagcacatgctaaacagttgatcaaagg

SEQ ID NO: 17720 - DNA, 28 bp, synthetic construct
  source 1..28: mol_type = other DNA
cagttgatcaaaggctcttgccttgtgg

SEQ ID NO: 17721 - DNA, 28 bp, synthetic construct
  source 1..28: mol_type = other DNA
cagagtgtctgcagcgtgggccacaagg

SEQ ID NO: 17722 - DNA, 28 bp, synthetic construct
  source 1..28: mol_type = other DNA
gcagtcgtcagagtgtctgcagcgtggg

SEQ ID NO: 17723 - DNA, 28 bp, synthetic construct
  source 1..28: mol_type = other DNA
ggcagtcgtcagagtgtctgcagcgtgg

SEQ ID NO: 17724 - DNA, 28 bp, synthetic construct
  source 1..28: mol_type = other DNA
agggacgacatggggctgcggagctcgg

SEQ ID NO: 17725 - DNA, 28 bp, synthetic construct
  source 1..28: mol_type = other DNA
gtgcggaagggacgacatggggctgcgg

SEQ ID NO: 17726 - DNA, 28 bp, synthetic construct
  source 1..28: mol_type = other DNA
caggcagtgcggaagggacgacatgggg

SEQ ID NO: 17727 - DNA, 28 bp, synthetic construct
  source 1..28: mol_type = other DNA
gcaggcagtgcggaagggacgacatggg

SEQ ID NO: 17728 - DNA, 28 bp, synthetic construct
  source 1..28: mol_type = other DNA
agcaggcagtgcggaagggacgacatgg

SEQ ID NO: 17729 - DNA, 28 bp, synthetic construct
  source 1..28: mol_type = other DNA
gagaggcacagcaggcagtgcggaaggg

SEQ ID NO: 17730 - DNA, 28 bp, synthetic construct
  source 1..28: mol_type = other DNA
ggagaggcacagcaggcagtgcggaagg

SEQ ID NO: 17731 - DNA, 28 bp, synthetic construct
  source 1..28: mol_type = other DNA
gagaggagaggcacagcaggcagtgcgg

SEQ ID NO: 17732 - DNA, 28 bp, synthetic construct
  source 1..28: mol_type = other DNA
gcctgctgtgcctctcctctccatgtgg

SEQ ID NO: 17733 - DNA, 28 bp, synthetic construct
  source 1..28: mol_type = other DNA
gccacatggagaggagaggcacagcagg

SEQ ID NO: 17734 - DNA, 28 bp, synthetic construct
  source 1..28: mol_type = other DNA
gctgtgcctctcctctccatgtggcagg

SEQ ID NO: 17735 - DNA, 28 bp, synthetic construct
  source 1..28: mol_type = other DNA
ctgtgcctctcctctccatgtggcaggg

SEQ ID NO: 17736 - DNA, 28 bp, synthetic construct
  source 1..28: mol_type = other DNA
gtgttccctgccacatggagaggagagg

SEQ ID NO: 17737 - DNA, 28 bp, synthetic construct
  source 1..28: mol_type = other DNA
tggctgtgttccctgccacatggagagg

SEQ ID NO: 17738 - DNA, 28 bp, synthetic construct
  source 1..28: mol_type = other DNA
atgactggctgtgttccctgccacatgg

SEQ ID NO: 17739 - DNA, 28 bp, synthetic construct
  source 1..28: mol_type = other DNA
gggaacacagccagtcatcaccatgtgg

SEQ ID NO: 17740 - DNA, 28 bp, synthetic construct
  source 1..28: mol_type = other DNA
ccagtcatcaccatgtggctctgcccgg

SEQ ID NO: 17741 - DNA, 28 bp, synthetic construct
  source 1..28: mol_type = other DNA
tggggcagcgccgggcagagccacatgg

SEQ ID NO: 17742 - DNA, 28 bp, synthetic construct
  source 1..28: mol_type = other DNA
tgtcaggacatgctggggcagcgccggg

SEQ ID NO: 17743 - DNA, 28 bp, synthetic construct
  source 1..28: mol_type = other DNA
ctgtcaggacatgctggggcagcgccgg

SEQ ID NO: 17744 - DNA, 28 bp, synthetic construct
  source 1..28: mol_type = other DNA
cggcgctgccccagcatgtcctgacagg

SEQ ID NO: 17745 - DNA, 28 bp, synthetic construct
  source 1..28: mol_type = other DNA
ggcgctgccccagcatgtcctgacaggg

SEQ ID NO: 17746 - DNA, 28 bp, synthetic construct
  source 1..28: mol_type = other DNA
atctaggccctgtcaggacatgctgggg

SEQ ID NO: 17747 - DNA, 28 bp, synthetic construct
  source 1..28: mol_type = other DNA
tatctaggccctgtcaggacatgctggg

SEQ ID NO: 17748 - DNA, 28 bp, synthetic construct
  source 1..28: mol_type = other DNA
atatctaggccctgtcaggacatgctgg

SEQ ID NO: 17749 - DNA, 28 bp, synthetic construct
  source 1..28: mol_type = other DNA
agcatgtcctgacagggcctagatatgg

SEQ ID NO: 17750 - DNA, 28 bp, synthetic construct
  source 1..28: mol_type = other DNA
gtcctgacagggcctagatatggaaagg

SEQ ID NO: 17751 - DNA, 28 bp, synthetic construct
  source 1..28: mol_type = other DNA
cacctttccatatctaggccctgtcagg

SEQ ID NO: 17752 - DNA, 28 bp, synthetic construct
  source 1..28: mol_type = other DNA
ctgacagggcctagatatggaaaggtgg

SEQ ID NO: 17753 - DNA, 28 bp, synthetic construct
  source 1..28: mol_type = other DNA
catggagagccacctttccatatctagg

SEQ ID NO: 17754 - DNA, 28 bp, synthetic construct
  source 1..28: mol_type = other DNA
gcaggaggggcttggggtgtgtgcatgg

SEQ ID NO: 17755 - DNA, 28 bp, synthetic construct
  source 1..28: mol_type = other DNA
tcacacggcgggcaggaggggcttgggg

SEQ ID NO: 17756 - DNA, 28 bp, synthetic construct
  source 1..28: mol_type = other DNA
gtcacacggcgggcaggaggggcttggg

SEQ ID NO: 17757 - DNA, 28 bp, synthetic construct
  source 1..28: mol_type = other DNA
ggtcacacggcgggcaggaggggcttgg

SEQ ID NO: 17758 - DNA, 28 bp, synthetic construct
  source 1..28: mol_type = other DNA
gtgtgggtcacacggcgggcaggagggg

SEQ ID NO: 17759 - DNA, 28 bp, synthetic construct
  source 1..28: mol_type = other DNA
agtgtgggtcacacggcgggcaggaggg

SEQ ID NO: 17760 - DNA, 28 bp, synthetic construct
  source 1..28: mol_type = other DNA
gagtgtgggtcacacggcgggcaggagg

SEQ ID NO: 17761 - DNA, 28 bp, synthetic construct
  source 1..28: mol_type = other DNA
taagagtgtgggtcacacggcgggcagg

SEQ ID NO: 17762 - DNA, 28 bp, synthetic construct
  source 1..28: mol_type = other DNA
gcccgccgtgtgacccacactcttatgg

SEQ ID NO: 17763 - DNA, 28 bp, synthetic construct
  source 1..28: mol_type = other DNA
cccgccgtgtgacccacactcttatggg

SEQ ID NO: 17764 - DNA, 28 bp, synthetic construct
  source 1..28: mol_type = other DNA
gcccataagagtgtgggtcacacggcgg

SEQ ID NO: 17765 - DNA, 28 bp, synthetic construct
  source 1..28: mol_type = other DNA
gctgcccataagagtgtgggtcacacgg

SEQ ID NO: 17766 - DNA, 28 bp, synthetic construct
  source 1..28: mol_type = other DNA
ataactgggctgcccataagagtgtggg

SEQ ID NO: 17767 - DNA, 28 bp, synthetic construct
  source 1..28: mol_type = other DNA
aataactgggctgcccataagagtgtgg

SEQ ID NO: 17768 - DNA, 28 bp, synthetic construct
  source 1..28: mol_type = other DNA
ggaagggaaatgctacaaaataactggg

SEQ ID NO: 17769 - DNA, 28 bp, synthetic construct
  source 1..28: mol_type = other DNA
aggaagggaaatgctacaaaataactgg

SEQ ID NO: 17770 - DNA, 28 bp, synthetic construct
  source 1..28: mol_type = other DNA
gtagcatttcccttccttatcattttgg

SEQ ID NO: 17771 - DNA, 28 bp, synthetic construct
  source 1..28: mol_type = other DNA
atcactgggccaaaatgataaggaaggg

SEQ ID NO: 17772 - DNA, 28 bp, synthetic construct
  source 1..28: mol_type = other DNA
gatcactgggccaaaatgataaggaagg

SEQ ID NO: 17773 - DNA, 28 bp, synthetic construct
  source 1..28: mol_type = other DNA
gctggatcactgggccaaaatgataagg

SEQ ID NO: 17774 - DNA, 28 bp, synthetic construct
  source 1..28: mol_type = other DNA
taagggagatttgtgctggatcactggg

SEQ ID NO: 17775 - DNA, 28 bp, synthetic construct
  source 1..28: mol_type = other DNA
ataagggagatttgtgctggatcactgg

SEQ ID NO: 17776 - DNA, 28 bp, synthetic construct
  source 1..28: mol_type = other DNA
ttattctaataagggagatttgtgctgg

SEQ ID NO: 17777 - DNA, 28 bp, synthetic construct
  source 1..28: mol_type = other DNA
aaatctcccttattagaataaaatttgg

SEQ ID NO: 17778 - DNA, 28 bp, synthetic construct
  source 1..28: mol_type = other DNA
gtcattccaaattttattctaataaggg

SEQ ID NO: 17779 - DNA, 28 bp, synthetic construct
  source 1..28: mol_type = other DNA
tgtcattccaaattttattctaataagg

SEQ ID NO: 17780 - DNA, 28 bp, synthetic construct
  source 1..28: mol_type = other DNA
taaatttcatttttcacttatattgagg

SEQ ID NO: 17781 - DNA, 28 bp, synthetic construct
  source 1..28: mol_type = other DNA
gatcgtggcaggggtgaagagtgtgagg

SEQ ID NO: 17782 - DNA, 28 bp, synthetic construct
  source 1..28: mol_type = other DNA
aggctcttgtcagggatcgtggcagggg

SEQ ID NO: 17783 - DNA, 28 bp, synthetic construct
  source 1..28: mol_type = other DNA
aaggctcttgtcagggatcgtggcaggg

SEQ ID NO: 17784 - DNA, 28 bp, synthetic construct
  source 1..28: mol_type = other DNA
gaaggctcttgtcagggatcgtggcagg

SEQ ID NO: 17785 - DNA, 28 bp, synthetic construct
  source 1..28: mol_type = other DNA
ataggaaggctcttgtcagggatcgtgg

SEQ ID NO: 17786 - DNA, 28 bp, synthetic construct
  source 1..28: mol_type = other DNA
tgattagataggaaggctcttgtcaggg

SEQ ID NO: 17787 - DNA, 28 bp, synthetic construct
  source 1..28: mol_type = other DNA
atgattagataggaaggctcttgtcagg

SEQ ID NO: 17788 - DNA, 28 bp, synthetic construct
  source 1..28: mol_type = other DNA
ctggaggaacaatgattagataggaagg

SEQ ID NO: 17789 - DNA, 28 bp, synthetic construct
  source 1..28: mol_type = other DNA
agggctggaggaacaatgattagatagg

SEQ ID NO: 17790 - DNA, 28 bp, synthetic construct
  source 1..28: mol_type = other DNA
ggctgaagaaaactaagagggctggagg

SEQ ID NO: 17791 - DNA, 28 bp, synthetic construct
  source 1..28: mol_type = other DNA
aaaggctgaagaaaactaagagggctgg

SEQ ID NO: 17792 - DNA, 28 bp, synthetic construct
  source 1..28: mol_type = other DNA
caagaaaggctgaagaaaactaagaggg

SEQ ID NO: 17793 - DNA, 28 bp, synthetic construct
  source 1..28: mol_type = other DNA
tcaagaaaggctgaagaaaactaagagg

SEQ ID NO: 17794 - DNA, 28 bp, synthetic construct
  source 1..28: mol_type = other DNA
aaagggacattcaggcaatcaagaaagg

SEQ ID NO: 17795 - DNA, 28 bp, synthetic construct
  source 1..28: mol_type = other DNA
aaaaggagaagggaaagggacattcagg

SEQ ID NO: 17796 - DNA, 28 bp, synthetic construct
  source 1..28: mol_type = other DNA
tcatgctttaaaaggagaagggaaaggg

SEQ ID NO: 17797 - DNA, 28 bp, synthetic construct
  source 1..28: mol_type = other DNA
ttcatgctttaaaaggagaagggaaagg

SEQ ID NO: 17798 - DNA, 28 bp, synthetic construct
  source 1..28: mol_type = other DNA
cttggttcatgctttaaaaggagaaggg

SEQ ID NO: 17799 - DNA, 28 bp, synthetic construct
  source 1..28: mol_type = other DNA
gcttggttcatgctttaaaaggagaagg

SEQ ID NO: 17800 - DNA, 28 bp, synthetic construct
  source 1..28: mol_type = other DNA
aagaaagcttggttcatgctttaaaagg

SEQ ID NO: 17801 - DNA, 28 bp, synthetic construct
  source 1..28: mol_type = other DNA
ataatgagaacggggtaagaaagcttgg

SEQ ID NO: 17802 - DNA, 28 bp, synthetic construct
  source 1..28: mol_type = other DNA
aaatgcaaaaatgataatgagaacgggg

SEQ ID NO: 17803 - DNA, 28 bp, synthetic construct
  source 1..28: mol_type = other DNA
aaaatgcaaaaatgataatgagaacggg

SEQ ID NO: 17804 - DNA, 28 bp, synthetic construct
  source 1..28: mol_type = other DNA
gaaaatgcaaaaatgataatgagaacgg

SEQ ID NO: 17805 - DNA, 28 bp, synthetic construct
  source 1..28: mol_type = other DNA
atgattctccttaaattataaaacttgg

SEQ ID NO: 17806 - DNA, 28 bp, synthetic construct
  source 1..28: mol_type = other DNA
tgattctccttaaattataaaacttggg

SEQ ID NO: 17807 - DNA, 28 bp, synthetic construct
  source 1..28: mol_type = other DNA
gattctccttaaattataaaacttgggg

SEQ ID NO: 17808 - DNA, 28 bp, synthetic construct
  source 1..28: mol_type = other DNA
attctccttaaattataaaacttggggg

SEQ ID NO: 17809 - DNA, 28 bp, synthetic construct
  source 1..28: mol_type = other DNA
aattacccccaagttttataatttaagg

SEQ ID NO: 17810 - DNA, 28 bp, synthetic construct
  source 1..28: mol_type = other DNA
tataaaacttgggggtaatttctagagg

SEQ ID NO: 17811 - DNA, 28 bp, synthetic construct
  source 1..28: mol_type = other DNA
cactgagtagacagaagcactatgatgg

SEQ ID NO: 17812 - DNA, 28 bp, synthetic construct
  source 1..28: mol_type = other DNA
ttcttccaaaaaagagtaagcaagaagg

SEQ ID NO: 17813 - DNA, 28 bp, synthetic construct
  source 1..28: mol_type = other DNA
tgtaaccttcttgcttactcttttttgg

SEQ ID NO: 17814 - DNA, 28 bp, synthetic construct
  source 1..28: mol_type = other DNA
agagtaagcaagaaggttacaacactgg

SEQ ID NO: 17815 - DNA, 28 bp, synthetic construct
  source 1..28: mol_type = other DNA
gagtaagcaagaaggttacaacactggg

SEQ ID NO: 17816 - DNA, 28 bp, synthetic construct
  source 1..28: mol_type = other DNA
ttcaacaggttgaagaacaggcttaggg

SEQ ID NO: 17817 - DNA, 28 bp, synthetic construct
  source 1..28: mol_type = other DNA
attcaacaggttgaagaacaggcttagg

SEQ ID NO: 17818 - DNA, 28 bp, synthetic construct
  source 1..28: mol_type = other DNA
gaaaacattcaacaggttgaagaacagg

SEQ ID NO: 17819 - DNA, 28 bp, synthetic construct
  source 1..28: mol_type = other DNA
aacaatttaggggaaaacattcaacagg

SEQ ID NO: 17820 - DNA, 28 bp, synthetic construct
  source 1..28: mol_type = other DNA
gaatgttttcccctaaattgttatatgg

SEQ ID NO: 17821 - DNA, 28 bp, synthetic construct
  source 1..28: mol_type = other DNA
cccctaaattgttatatggagatcctgg

SEQ ID NO: 17822 - DNA, 28 bp, synthetic construct
  source 1..28: mol_type = other DNA
tccaggatctccatataacaatttaggg

SEQ ID NO: 17823 - DNA, 28 bp, synthetic construct
  source 1..28: mol_type = other DNA
gtccaggatctccatataacaatttagg

SEQ ID NO: 17824 - DNA, 28 bp, synthetic construct
  source 1..28: mol_type = other DNA
aattgttatatggagatcctggacccgg

SEQ ID NO: 17825 - DNA, 28 bp, synthetic construct
  source 1..28: mol_type = other DNA
atatggagatcctggacccggaagttgg

SEQ ID NO: 17826 - DNA, 28 bp, synthetic construct
  source 1..28: mol_type = other DNA
ttcatgtcagccaacttccgggtccagg

SEQ ID NO: 17827 - DNA, 28 bp, synthetic construct
  source 1..28: mol_type = other DNA
acccggaagttggctgacatgaaacagg

SEQ ID NO: 17828 - DNA, 28 bp, synthetic construct
  source 1..28: mol_type = other DNA
gcctgtttcatgtcagccaacttccggg

SEQ ID NO: 17829 - DNA, 28 bp, synthetic construct
  source 1..28: mol_type = other DNA
ggcctgtttcatgtcagccaacttccgg

SEQ ID NO: 17830 - DNA, 28 bp, synthetic construct
  source 1..28: mol_type = other DNA
ttggctgacatgaaacaggcctagcagg

SEQ ID NO: 17831 - DNA, 28 bp, synthetic construct
  source 1..28: mol_type = other DNA
tggctgacatgaaacaggcctagcaggg

SEQ ID NO: 17832 - DNA, 28 bp, synthetic construct
  source 1..28: mol_type = other DNA
tgaaacaggcctagcagggcagctgagg

SEQ ID NO: 17833 - DNA, 28 bp, synthetic construct
  source 1..28: mol_type = other DNA
ggagcatttcctcagctgccctgctagg

SEQ ID NO: 17834 - DNA, 28 bp, synthetic construct
  source 1..28: mol_type = other DNA
gcagctgaggaaatgctccaacctcagg

SEQ ID NO: 17835 - DNA, 28 bp, synthetic construct
  source 1..28: mol_type = other DNA
aggaaatgctccaacctcaggatccagg

SEQ ID NO: 17836 - DNA, 28 bp, synthetic construct
  source 1..28: mol_type = other DNA
gtgcaatcttcctggatcctgaggttgg

SEQ ID NO: 17837 - DNA, 28 bp, synthetic construct
  source 1..28: mol_type = other DNA
cctcaggatccaggaagattgcacatgg

SEQ ID NO: 17838 - DNA, 28 bp, synthetic construct
  source 1..28: mol_type = other DNA
gttttggtgccatgtgcaatcttcctgg

SEQ ID NO: 17839 - DNA, 28 bp, synthetic construct
  source 1..28: mol_type = other DNA
aggattagcttttaaatgattgttttgg

SEQ ID NO: 17840 - DNA, 28 bp, synthetic construct
  source 1..28: mol_type = other DNA
aaaacaatcatttaaaagctaatcctgg

SEQ ID NO: 17841 - DNA, 28 bp, synthetic construct
  source 1..28: mol_type = other DNA
aatcatttaaaagctaatcctggccagg

SEQ ID NO: 17842 - DNA, 28 bp, synthetic construct
  source 1..28: mol_type = other DNA
aaaagctaatcctggccaggcacagtgg

SEQ ID NO: 17843 - DNA, 28 bp, synthetic construct
  source 1..28: mol_type = other DNA
caggcgtgagccactgtgcctggccagg

SEQ ID NO: 17844 - DNA, 28 bp, synthetic construct
  source 1..28: mol_type = other DNA
gattacaggcgtgagccactgtgcctgg

SEQ ID NO: 17845 - DNA, 28 bp, synthetic construct
  source 1..28: mol_type = other DNA
gctcacgcctgtaatcccagcactttgg

SEQ ID NO: 17846 - DNA, 28 bp, synthetic construct
  source 1..28: mol_type = other DNA
ctcacgcctgtaatcccagcactttggg

SEQ ID NO: 17847 - DNA, 28 bp, synthetic construct
  source 1..28: mol_type = other DNA
acgcctgtaatcccagcactttgggagg

SEQ ID NO: 17848 - DNA, 28 bp, synthetic construct
  source 1..28: mol_type = other DNA
cggcctcccaaagtgctgggattacagg

SEQ ID NO: 17849 - DNA, 28 bp, synthetic construct
  source 1..28: mol_type = other DNA
gtaatcccagcactttgggaggccgagg

SEQ ID NO: 17850 - DNA, 28 bp, synthetic construct
  source 1..28: mol_type = other DNA
atcccagcactttgggaggccgaggtgg

SEQ ID NO: 17851 - DNA, 28 bp, synthetic construct
  source 1..28: mol_type = other DNA
tcccagcactttgggaggccgaggtggg

SEQ ID NO: 17852 - DNA, 28 bp, synthetic construct
  source 1..28: mol_type = other DNA
gcccacctcggcctcccaaagtgctggg

SEQ ID NO: 17853 - DNA, 28 bp, synthetic construct
  source 1..28: mol_type = other DNA
agcccacctcggcctcccaaagtgctgg

SEQ ID NO: 17854 - DNA, 28 bp, synthetic construct
  source 1..28: mol_type = other DNA
gggaggccgaggtgggctgatcacaagg

SEQ ID NO: 17855 - DNA, 28 bp, synthetic construct
  source 1..28: mol_type = other DNA
tcttgaccttgtgatcagcccacctcgg

SEQ ID NO: 17856 - DNA, 28 bp, synthetic construct
  source 1..28: mol_type = other DNA
gagatcgagaccatcctgaccaacatgg

SEQ ID NO: 17857 - DNA, 28 bp, synthetic construct
  source 1..28: mol_type = other DNA
tggggtttcaccatgttggtcaggatgg

SEQ ID NO: 17858 - DNA, 28 bp, synthetic construct
  source 1..28: mol_type = other DNA
gagatggggtttcaccatgttggtcagg

SEQ ID NO: 17859 - DNA, 28 bp, synthetic construct
  source 1..28: mol_type = other DNA
tggtagagatggggtttcaccatgttgg

SEQ ID NO: 17860 - DNA, 28 bp, synthetic construct
  source 1..28: mol_type = other DNA
aatatttgtacttttggtagagatgggg

SEQ ID NO: 17861 - DNA, 28 bp, synthetic construct
  source 1..28: mol_type = other DNA
taatatttgtacttttggtagagatggg

SEQ ID NO: 17862 - DNA, 28 bp, synthetic construct
  source 1..28: mol_type = other DNA
ctaatatttgtacttttggtagagatgg

SEQ ID NO: 17863 - DNA, 28 bp, synthetic construct
  source 1..28: mol_type = other DNA
ctctaccaaaagtacaaatattagctgg

SEQ ID NO: 17864 - DNA, 28 bp, synthetic construct
  source 1..28: mol_type = other DNA
tctaccaaaagtacaaatattagctggg

SEQ ID NO: 17865 - DNA, 28 bp, synthetic construct
  source 1..28: mol_type = other DNA
catgcccagctaatatttgtacttttgg

SEQ ID NO: 17866 - DNA, 28 bp, synthetic construct
  source 1..28: mol_type = other DNA
caaaagtacaaatattagctgggcatgg

SEQ ID NO: 17867 - DNA, 28 bp, synthetic construct
  source 1..28: mol_type = other DNA
aagtacaaatattagctgggcatggtgg

SEQ ID NO: 17868 - DNA, 28 bp, synthetic construct
  source 1..28: mol_type = other DNA
gtgcgcgcctgtagtcccagctacccgg

SEQ ID NO: 17869 - DNA, 28 bp, synthetic construct
  source 1..28: mol_type = other DNA
tgcgcgcctgtagtcccagctacccggg

SEQ ID NO: 17870 - DNA, 28 bp, synthetic construct
  source 1..28: mol_type = other DNA
gcgcctgtagtcccagctacccgggagg

SEQ ID NO: 17871 - DNA, 28 bp, synthetic construct
  source 1..28: mol_type = other DNA
cagcctcccgggtagctgggactacagg

SEQ ID NO: 17872 - DNA, 28 bp, synthetic construct
  source 1..28: mol_type = other DNA
gtagtcccagctacccgggaggctgagg

SEQ ID NO: 17873 - DNA, 28 bp, synthetic construct
  source 1..28: mol_type = other DNA
tcccagctacccgggaggctgaggcagg

SEQ ID NO: 17874 - DNA, 28 bp, synthetic construct
  source 1..28: mol_type = other DNA
tcctgcctcagcctcccgggtagctggg

SEQ ID NO: 17875 - DNA, 28 bp, synthetic construct
  source 1..28: mol_type = other DNA
ctcctgcctcagcctcccgggtagctgg

SEQ ID NO: 17876 - DNA, 28 bp, synthetic construct
  source 1..28: mol_type = other DNA
agtgattctcctgcctcagcctcccggg

SEQ ID NO: 17877 - DNA, 28 bp, synthetic construct
  source 1..28: mol_type = other DNA
aagtgattctcctgcctcagcctcccgg

SEQ ID NO: 17878 - DNA, 28 bp, synthetic construct
  source 1..28: mol_type = other DNA
ctgaggcaggagaatcacttgaacccgg

SEQ ID NO: 17879 - DNA, 28 bp, synthetic construct
  source 1..28: mol_type = other DNA
tgaggcaggagaatcacttgaacccggg

SEQ ID NO: 17880 - DNA, 28 bp, synthetic construct
  source 1..28: mol_type = other DNA
ggcaggagaatcacttgaacccgggagg

SEQ ID NO: 17881 - DNA, 28 bp, synthetic construct
  source 1..28: mol_type = other DNA
aggagaatcacttgaacccgggaggagg

SEQ ID NO: 17882 - DNA, 28 bp, synthetic construct
  source 1..28: mol_type = other DNA
agaatcacttgaacccgggaggaggagg

SEQ ID NO: 17883 - DNA, 28 bp, synthetic construct
  source 1..28: mol_type = other DNA
tggctcactgcaacctcctcctcccggg

SEQ ID NO: 17884 - DNA, 28 bp, synthetic construct
  source 1..28: mol_type = other DNA
ttggctcactgcaacctcctcctcccgg

SEQ ID NO: 17885 - DNA, 28 bp, synthetic construct
  source 1..28: mol_type = other DNA
aggctggagtgcagtggcatgatcttgg

SEQ ID NO: 17886 - DNA, 28 bp, synthetic construct
  source 1..28: mol_type = other DNA
aagatcatgccactgcactccagcctgg

SEQ ID NO: 17887 - DNA, 28 bp, synthetic construct
  source 1..28: mol_type = other DNA
gctctgtcaccaggctggagtgcagtgg

SEQ ID NO: 17888 - DNA, 28 bp, synthetic construct
  source 1..28: mol_type = other DNA
atggagtcttgctctgtcaccaggctgg

SEQ ID NO: 17889 - DNA, 28 bp, synthetic construct
  source 1..28: mol_type = other DNA
tgagatggagtcttgctctgtcaccagg

SEQ ID NO: 17890 - DNA, 28 bp, synthetic construct
  source 1..28: mol_type = other DNA
ttagctttttttttcttttttgagatgg

SEQ ID NO: 17891 - DNA, 28 bp, synthetic construct
  source 1..28: mol_type = other DNA
aggttcaaaatgatggttcttttatggg

SEQ ID NO: 17892 - DNA, 28 bp, synthetic construct
  source 1..28: mol_type = other DNA
caggttcaaaatgatggttcttttatgg

SEQ ID NO: 17893 - DNA, 28 bp, synthetic construct
  source 1..28: mol_type = other DNA
aaaggaaacagcaggttcaaaatgatgg

SEQ ID NO: 17894 - DNA, 28 bp, synthetic construct
  source 1..28: mol_type = other DNA
taaagagtacaagaaaggaaacagcagg

SEQ ID NO: 17895 - DNA, 28 bp, synthetic construct
  source 1..28: mol_type = other DNA
tgggtacttctaaagagtacaagaaagg

SEQ ID NO: 17896 - DNA, 28 bp, synthetic construct
  source 1..28: mol_type = other DNA
acccatttctccctttctaagccatagg

SEQ ID NO: 17897 - DNA, 28 bp, synthetic construct
  source 1..28: mol_type = other DNA
acctatggcttagaaagggagaaatggg

SEQ ID NO: 17898 - DNA, 28 bp, synthetic construct
  source 1..28: mol_type = other DNA
cacctatggcttagaaagggagaaatgg

SEQ ID NO: 17899 - DNA, 28 bp, synthetic construct
  source 1..28: mol_type = other DNA
aattaatacacctatggcttagaaaggg

SEQ ID NO: 17900 - DNA, 28 bp, synthetic construct
  source 1..28: mol_type = other DNA
caattaatacacctatggcttagaaagg

SEQ ID NO: 17901 - DNA, 28 bp, synthetic construct
  source 1..28: mol_type = other DNA
ctttctaagccataggtgtattaattgg

SEQ ID NO: 17902 - DNA, 28 bp, synthetic construct
  source 1..28: mol_type = other DNA
gaaaaagctccaattaatacacctatgg

SEQ ID NO: 17903 - DNA, 28 bp, synthetic construct
  source 1..28: mol_type = other DNA
gtgttaataaaacaaaaacaaaaatagg

SEQ ID NO: 17904 - DNA, 28 bp, synthetic construct
  source 1..28: mol_type = other DNA
aataaaacaaaaacaaaaataggactgg

SEQ ID NO: 17905 - DNA, 28 bp, synthetic construct
  source 1..28: mol_type = other DNA
ctttctctcttcatgtagtacaactagg

SEQ ID NO: 17906 - DNA, 28 bp, synthetic construct
  source 1..28: mol_type = other DNA
ctagttgtactacatgaagagagaaagg

SEQ ID NO: 17907 - DNA, 28 bp, synthetic construct
  source 1..28: mol_type = other DNA
tagttgtactacatgaagagagaaaggg

SEQ ID NO: 17908 - DNA, 28 bp, synthetic construct
  source 1..28: mol_type = other DNA
catgaagagagaaagggccagacattgg

SEQ ID NO: 17909 - DNA, 28 bp, synthetic construct
  source 1..28: mol_type = other DNA
cagaagattaggaaaaaccaatgtctgg

SEQ ID NO: 17910 - DNA, 28 bp, synthetic construct
  source 1..28: mol_type = other DNA
gatttggagaacttgacagaagattagg

SEQ ID NO: 17911 - DNA, 28 bp, synthetic construct
  source 1..28: mol_type = other DNA
gtcaagttctccaaatcatctgctctgg

SEQ ID NO: 17912 - DNA, 28 bp, synthetic construct
  source 1..28: mol_type = other DNA
agttctccaaatcatctgctctggaagg

SEQ ID NO: 17913 - DNA, 28 bp, synthetic construct
  source 1..28: mol_type = other DNA
gagctaccttccagagcagatgatttgg

SEQ ID NO: 17914 - DNA, 28 bp, synthetic construct
  source 1..28: mol_type = other DNA
tgctctggaaggtagctccaacagctgg

SEQ ID NO: 17915 - DNA, 28 bp, synthetic construct
  source 1..28: mol_type = other DNA
gctctggaaggtagctccaacagctggg

SEQ ID NO: 17916 - DNA, 28 bp, synthetic construct
  source 1..28: mol_type = other DNA
atgctttacttcaaatcccagctgttgg

SEQ ID NO: 17917 - DNA, 28 bp, synthetic construct
  source 1..28: mol_type = other DNA
gatttgaagtaaagcatagtgactttgg

SEQ ID NO: 17918 - DNA, 28 bp, synthetic construct
  source 1..28: mol_type = other DNA
tgcttcaaatgggacatgtcagtgatgg

SEQ ID NO: 17919 - DNA, 28 bp, synthetic construct
  source 1..28: mol_type = other DNA
agggacagttttggttgcttcaaatggg

SEQ ID NO: 17920 - DNA, 28 bp, synthetic construct
  source 1..28: mol_type = other DNA
gagggacagttttggttgcttcaaatgg

SEQ ID NO: 17921 - DNA, 28 bp, synthetic construct
  source 1..28: mol_type = other DNA
tgagtgtcaggtcgagggacagttttgg

SEQ ID NO: 17922 - DNA, 28 bp, synthetic construct
  source 1..28: mol_type = other DNA
gtttcagggatgagtgtcaggtcgaggg

SEQ ID NO: 17923 - DNA, 28 bp, synthetic construct
  source 1..28: mol_type = other DNA
tgtttcagggatgagtgtcaggtcgagg

SEQ ID NO: 17924 - DNA, 28 bp, synthetic construct
  source 1..28: mol_type = other DNA
tcatggtgtttcagggatgagtgtcagg

SEQ ID NO: 17925 - DNA, 28 bp, synthetic construct
  source 1..28: mol_type = other DNA
tgacactcatccctgaaacaccatgagg

SEQ ID NO: 17926 - DNA, 28 bp, synthetic construct
  source 1..28: mol_type = other DNA
gacactcatccctgaaacaccatgaggg

SEQ ID NO: 17927 - DNA, 28 bp, synthetic construct
  source 1..28: mol_type = other DNA
ccctgaaacaccatgagggtaagtgagg

SEQ ID NO: 17928 - DNA, 28 bp, synthetic construct
  source 1..28: mol_type = other DNA
gcctcacttaccctcatggtgtttcagg

SEQ ID NO: 17929 - DNA, 28 bp, synthetic construct
  source 1..28: mol_type = other DNA
caccatgagggtaagtgaggcgcttcgg

SEQ ID NO: 17930 - DNA, 28 bp, synthetic construct
  source 1..28: mol_type = other DNA
ttccgaagcgcctcacttaccctcatgg

SEQ ID NO: 17931 - DNA, 28 bp, synthetic construct
  source 1..28: mol_type = other DNA
atgagggtaagtgaggcgcttcggaagg

SEQ ID NO: 17932 - DNA, 28 bp, synthetic construct
  source 1..28: mol_type = other DNA
tactctatctggcaatggggttgagtgg

SEQ ID NO: 17933 - DNA, 28 bp, synthetic construct
  source 1..28: mol_type = other DNA
cagacacttactctatctggcaatgggg

SEQ ID NO: 17934 - DNA, 28 bp, synthetic construct
  source 1..28: mol_type = other DNA
gcagacacttactctatctggcaatggg

SEQ ID NO: 17935 - DNA, 28 bp, synthetic construct
  source 1..28: mol_type = other DNA
ggcagacacttactctatctggcaatgg

SEQ ID NO: 17936 - DNA, 28 bp, synthetic construct
  source 1..28: mol_type = other DNA
ttgccagatagagtaagtgtctgccagg

SEQ ID NO: 17937 - DNA, 28 bp, synthetic construct
  source 1..28: mol_type = other DNA
tgccagatagagtaagtgtctgccaggg

SEQ ID NO: 17938 - DNA, 28 bp, synthetic construct
  source 1..28: mol_type = other DNA
gccagatagagtaagtgtctgccagggg

SEQ ID NO: 17939 - DNA, 28 bp, synthetic construct
  source 1..28: mol_type = other DNA
gcccctggcagacacttactctatctgg

SEQ ID NO: 17940 - DNA, 28 bp, synthetic construct
  source 1..28: mol_type = other DNA
agagtaagtgtctgccaggggcatttgg

SEQ ID NO: 17941 - DNA, 28 bp, synthetic construct
  source 1..28: mol_type = other DNA
gtctgccaggggcatttggagctgaagg

SEQ ID NO: 17942 - DNA, 28 bp, synthetic construct
  source 1..28: mol_type = other DNA
tctgccaggggcatttggagctgaaggg

SEQ ID NO: 17943 - DNA, 28 bp, synthetic construct
  source 1..28: mol_type = other DNA
tcttcccttcagctccaaatgcccctgg

SEQ ID NO: 17944 - DNA, 28 bp, synthetic construct
  source 1..28: mol_type = other DNA
ctgaagggaagactgtacagactcacgg

SEQ ID NO: 17945 - DNA, 28 bp, synthetic construct
  source 1..28: mol_type = other DNA
aagactgtacagactcacggtttgcagg

SEQ ID NO: 17946 - DNA, 28 bp, synthetic construct
  source 1..28: mol_type = other DNA
cagactcacggtttgcaggcactgaagg

SEQ ID NO: 17947 - DNA, 28 bp, synthetic construct
  source 1..28: mol_type = other DNA
ttcctgccttctttttcaccttcagtgg

SEQ ID NO: 17948 - DNA, 28 bp, synthetic construct
  source 1..28: mol_type = other DNA
gtccactgaaggtgaaaaagaaggcagg

SEQ ID NO: 17949 - DNA, 28 bp, synthetic construct
  source 1..28: mol_type = other DNA
gcaagtccactgaaggtgaaaaagaagg

SEQ ID NO: 17950 - DNA, 28 bp, synthetic construct
  source 1..28: mol_type = other DNA
ggctagtgctttgcaagtccactgaagg

SEQ ID NO: 17951 - DNA, 28 bp, synthetic construct
  source 1..28: mol_type = other DNA
cactagccctattgtttttcccatctgg

SEQ ID NO: 17952 - DNA, 28 bp, synthetic construct
  source 1..28: mol_type = other DNA
actagccctattgtttttcccatctggg

SEQ ID NO: 17953 - DNA, 28 bp, synthetic construct
  source 1..28: mol_type = other DNA
tgtttcccagatgggaaaaacaataggg

SEQ ID NO: 17954 - DNA, 28 bp, synthetic construct
  source 1..28: mol_type = other DNA
atgtttcccagatgggaaaaacaatagg

SEQ ID NO: 17955 - DNA, 28 bp, synthetic construct
  source 1..28: mol_type = other DNA
tattgtttttcccatctgggaaacatgg

SEQ ID NO: 17956 - DNA, 28 bp, synthetic construct
  source 1..28: mol_type = other DNA
cccatctgggaaacatggtgaatgttgg

SEQ ID NO: 17957 - DNA, 28 bp, synthetic construct
  source 1..28: mol_type = other DNA
accaacattcaccatgtttcccagatgg

SEQ ID NO: 17958 - DNA, 28 bp, synthetic construct
  source 1..28: mol_type = other DNA
tctgggaaacatggtgaatgttggttgg

SEQ ID NO: 17959 - DNA, 28 bp, synthetic construct
  source 1..28: mol_type = other DNA
tgttggttggttgtagctaatcctatgg

SEQ ID NO: 17960 - DNA, 28 bp, synthetic construct
  source 1..28: mol_type = other DNA
gttggttggttgtagctaatcctatggg

SEQ ID NO: 17961 - DNA, 28 bp, synthetic construct
  source 1..28: mol_type = other DNA
gttgtagctaatcctatgggtcttgagg

SEQ ID NO: 17962 - DNA, 28 bp, synthetic construct
  source 1..28: mol_type = other DNA
tgtcaacaaagacctcaagacccatagg

SEQ ID NO: 17963 - DNA, 28 bp, synthetic construct
  source 1..28: mol_type = other DNA
ggtcttgaggtctttgttgacaagaagg

SEQ ID NO: 17964 - DNA, 28 bp, synthetic construct
  source 1..28: mol_type = other DNA
ggtagatgttatctttatctgcgtgtgg

SEQ ID NO: 17965 - DNA, 28 bp, synthetic construct
  source 1..28: mol_type = other DNA
ggctttctactaaaacatgagctacagg

SEQ ID NO: 17966 - DNA, 28 bp, synthetic construct
  source 1..28: mol_type = other DNA
gctttctactaaaacatgagctacaggg

SEQ ID NO: 17967 - DNA, 28 bp, synthetic construct
  source 1..28: mol_type = other DNA
ttttgttttaaagcatttttccataagg

SEQ ID NO: 17968 - DNA, 28 bp, synthetic construct
  source 1..28: mol_type = other DNA
taagcaatagtaagggtgaaccttatgg

SEQ ID NO: 17969 - DNA, 28 bp, synthetic construct
  source 1..28: mol_type = other DNA
atattattcagataagcaatagtaaggg

SEQ ID NO: 17970 - DNA, 28 bp, synthetic construct
  source 1..28: mol_type = other DNA
aatattattcagataagcaatagtaagg

SEQ ID NO: 17971 - DNA, 28 bp, synthetic construct
  source 1..28: mol_type = other DNA
gtgagcaatgaataaacttctcagcagg

SEQ ID NO: 17972 - DNA, 28 bp, synthetic construct
  source 1..28: mol_type = other DNA
agtttattcattgctcaccagttgtagg

SEQ ID NO: 17973 - DNA, 28 bp, synthetic construct
  source 1..28: mol_type = other DNA
gtttattcattgctcaccagttgtaggg

SEQ ID NO: 17974 - DNA, 28 bp, synthetic construct
  source 1..28: mol_type = other DNA
accagttgtagggagattttgacacagg

SEQ ID NO: 17975 - DNA, 28 bp, synthetic construct
  source 1..28: mol_type = other DNA
tcctgtgtcaaaatctccctacaactgg

SEQ ID NO: 17976 - DNA, 28 bp, synthetic construct
  source 1..28: mol_type = other DNA
ttgtagggagattttgacacaggactgg

SEQ ID NO: 17977 - DNA, 28 bp, synthetic construct
  source 1..28: mol_type = other DNA
tagggagattttgacacaggactggagg

SEQ ID NO: 17978 - DNA, 28 bp, synthetic construct
  source 1..28: mol_type = other DNA
ttctcatcgtaacagtgcagacccatgg

SEQ ID NO: 17979 - DNA, 28 bp, synthetic construct
  source 1..28: mol_type = other DNA
taacagtgcagacccatggaaagcttgg

SEQ ID NO: 17980 - DNA, 28 bp, synthetic construct
  source 1..28: mol_type = other DNA
tcacaactgcttccaagctttccatggg

SEQ ID NO: 17981 - DNA, 28 bp, synthetic construct
  source 1..28: mol_type = other DNA
gtcacaactgcttccaagctttccatgg

SEQ ID NO: 17982 - DNA, 28 bp, synthetic construct
  source 1..28: mol_type = other DNA
tggaaagcttggaagcagttgtgaccgg

SEQ ID NO: 17983 - DNA, 28 bp, synthetic construct
  source 1..28: mol_type = other DNA
gaagcagttgtgaccggataagagcagg

SEQ ID NO: 17984 - DNA, 28 bp, synthetic construct
  source 1..28: mol_type = other DNA
gttgtgaccggataagagcaggttgagg

SEQ ID NO: 17985 - DNA, 28 bp, synthetic construct
  source 1..28: mol_type = other DNA
ttatcatcctcaacctgctcttatccgg

SEQ ID NO: 17986 - DNA, 28 bp, synthetic construct
  source 1..28: mol_type = other DNA
agagcaggttgaggatgataatcttagg

SEQ ID NO: 17987 - DNA, 28 bp, synthetic construct
  source 1..28: mol_type = other DNA
gagcaggttgaggatgataatcttaggg

SEQ ID NO: 17988 - DNA, 28 bp, synthetic construct
  source 1..28: mol_type = other DNA
ggatgataatcttagggcaatgagcagg

SEQ ID NO: 17989 - DNA, 28 bp, synthetic construct
  source 1..28: mol_type = other DNA
tagggcaatgagcaggttgattgagagg

SEQ ID NO: 17990 - DNA, 28 bp, synthetic construct
  source 1..28: mol_type = other DNA
agggcaatgagcaggttgattgagaggg

SEQ ID NO: 17991 - DNA, 28 bp, synthetic construct
  source 1..28: mol_type = other DNA
gggcaatgagcaggttgattgagagggg

SEQ ID NO: 17992 - DNA, 28 bp, synthetic construct
  source 1..28: mol_type = other DNA
tgattgagaggggtgcctgaaagcaagg

SEQ ID NO: 17993 - DNA, 28 bp, synthetic construct
  source 1..28: mol_type = other DNA
cttgcatcatggggaccttgctttcagg

SEQ ID NO: 17994 - DNA, 28 bp, synthetic construct
  source 1..28: mol_type = other DNA
tgtgagtttgtttgcttgcatcatgggg

SEQ ID NO: 17995 - DNA, 28 bp, synthetic construct
  source 1..28: mol_type = other DNA
atgtgagtttgtttgcttgcatcatggg

SEQ ID NO: 17996 - DNA, 28 bp, synthetic construct
  source 1..28: mol_type = other DNA
catgtgagtttgtttgcttgcatcatgg

SEQ ID NO: 17997 - DNA, 28 bp, synthetic construct
  source 1..28: mol_type = other DNA
caagcaaacaaactcacatgccagacgg

SEQ ID NO: 17998 - DNA, 28 bp, synthetic construct
  source 1..28: mol_type = other DNA
gcaaacaaactcacatgccagacggtgg

SEQ ID NO: 17999 - DNA, 28 bp, synthetic construct
  source 1..28: mol_type = other DNA
caaactcacatgccagacggtggacagg

SEQ ID NO: 18000 - DNA, 28 bp, synthetic construct
  source 1..28: mol_type = other DNA
atgccagacggtggacaggaaacacagg

SEQ ID NO: 18001 - DNA, 28 bp, synthetic construct
  source 1..28: mol_type = other DNA
ctgcctgtgtttcctgtccaccgtctgg

SEQ ID NO: 18002 - DNA, 28 bp, synthetic construct
  source 1..28: mol_type = other DNA
cagacggtggacaggaaacacaggcagg

SEQ ID NO: 18003 - DNA, 28 bp, synthetic construct
  source 1..28: mol_type = other DNA
gtggacaggaaacacaggcaggatgtgg

SEQ ID NO: 18004 - DNA, 28 bp, synthetic construct
  source 1..28: mol_type = other DNA
aggaaacacaggcaggatgtggtgcagg

SEQ ID NO: 18005 - DNA, 28 bp, synthetic construct
  source 1..28: mol_type = other DNA
aacacaggcaggatgtggtgcaggctgg

SEQ ID NO: 18006 - DNA, 28 bp, synthetic construct
  source 1..28: mol_type = other DNA
acacaggcaggatgtggtgcaggctggg

SEQ ID NO: 18007 - DNA, 28 bp, synthetic construct
  source 1..28: mol_type = other DNA
ggatgtggtgcaggctgggctgccttgg

SEQ ID NO: 18008 - DNA, 28 bp, synthetic construct
  source 1..28: mol_type = other DNA
gtggtgcaggctgggctgccttggctgg

SEQ ID NO: 18009 - DNA, 28 bp, synthetic construct
  source 1..28: mol_type = other DNA
tggtgcaggctgggctgccttggctggg

SEQ ID NO: 18010 - DNA, 28 bp, synthetic construct
  source 1..28: mol_type = other DNA
aggctgggctgccttggctgggcaaagg

SEQ ID NO: 18011 - DNA, 28 bp, synthetic construct
  source 1..28: mol_type = other DNA
tgggctgccttggctgggcaaaggcagg

SEQ ID NO: 18012 - DNA, 28 bp, synthetic construct
  source 1..28: mol_type = other DNA
gggctgccttggctgggcaaaggcaggg

SEQ ID NO: 18013 - DNA, 28 bp, synthetic construct
  source 1..28: mol_type = other DNA
ggctgccttggctgggcaaaggcagggg

SEQ ID NO: 18014 - DNA, 28 bp, synthetic construct
  source 1..28: mol_type = other DNA
tgaagcccctgcctttgcccagccaagg

SEQ ID NO: 18015 - DNA, 28 bp, synthetic construct
  source 1..28: mol_type = other DNA
tggctgggcaaaggcaggggcttcatgg

SEQ ID NO: 18016 - DNA, 28 bp, synthetic construct
  source 1..28: mol_type = other DNA
aaaggcaggggcttcatggccatgctgg

SEQ ID NO: 18017 - DNA, 28 bp, synthetic construct
  source 1..28: mol_type = other DNA
aaggcaggggcttcatggccatgctggg

SEQ ID NO: 18018 - DNA, 28 bp, synthetic construct
  source 1..28: mol_type = other DNA
ttcatggccatgctgggatgtgacgtgg

SEQ ID NO: 18019 - DNA, 28 bp, synthetic construct
  source 1..28: mol_type = other DNA
tggccatgctgggatgtgacgtggttgg

SEQ ID NO: 18020 - DNA, 28 bp, synthetic construct
  source 1..28: mol_type = other DNA
tttccaaccacgtcacatcccagcatgg

SEQ ID NO: 18021 - DNA, 28 bp, synthetic construct
  source 1..28: mol_type = other DNA
tgacgtggttggaaaacaataagaatgg

SEQ ID NO: 18022 - DNA, 28 bp, synthetic construct
  source 1..28: mol_type = other DNA
caaattatgtctgaggtctttggagagg

SEQ ID NO: 18023 - DNA, 28 bp, synthetic construct
  source 1..28: mol_type = other DNA
ctctccaaagacctcagacataatttgg

SEQ ID NO: 18024 - DNA, 28 bp, synthetic construct
  source 1..28: mol_type = other DNA
atggccaaattatgtctgaggtctttgg

SEQ ID NO: 18025 - DNA, 28 bp, synthetic construct
  source 1..28: mol_type = other DNA
acctcagacataatttggccatgagagg

SEQ ID NO: 18026 - DNA, 28 bp, synthetic construct
  source 1..28: mol_type = other DNA
gcctctcatggccaaattatgtctgagg

SEQ ID NO: 18027 - DNA, 28 bp, synthetic construct
  source 1..28: mol_type = other DNA
agacataatttggccatgagaggcaagg

SEQ ID NO: 18028 - DNA, 28 bp, synthetic construct
  source 1..28: mol_type = other DNA
gacataatttggccatgagaggcaaggg

SEQ ID NO: 18029 - DNA, 28 bp, synthetic construct
  source 1..28: mol_type = other DNA
atttggccatgagaggcaagggtagagg

SEQ ID NO: 18030 - DNA, 28 bp, synthetic construct
  source 1..28: mol_type = other DNA
ggctcgcctctacccttgcctctcatgg

SEQ ID NO: 18031 - DNA, 28 bp, synthetic construct
  source 1..28: mol_type = other DNA
ggcaagggtagaggcgagccccctgtgg

SEQ ID NO: 18032 - DNA, 28 bp, synthetic construct
  source 1..28: mol_type = other DNA
gcaagggtagaggcgagccccctgtggg

SEQ ID NO: 18033 - DNA, 28 bp, synthetic construct
  source 1..28: mol_type = other DNA
gggtagaggcgagccccctgtgggttgg

SEQ ID NO: 18034 - DNA, 28 bp, synthetic construct
  source 1..28: mol_type = other DNA
cgagccccctgtgggttggaatgtatgg

SEQ ID NO: 18035 - DNA, 28 bp, synthetic construct
  source 1..28: mol_type = other DNA
gattccatacattccaacccacaggggg

SEQ ID NO: 18036 - DNA, 28 bp, synthetic construct
  source 1..28: mol_type = other DNA
ggattccatacattccaacccacagggg

SEQ ID NO: 18037 - DNA, 28 bp, synthetic construct
  source 1..28: mol_type = other DNA
tggattccatacattccaacccacaggg

SEQ ID NO: 18038 - DNA, 28 bp, synthetic construct
  source 1..28: mol_type = other DNA
ctggattccatacattccaacccacagg

SEQ ID NO: 18039 - DNA, 28 bp, synthetic construct
  source 1..28: mol_type = other DNA
ccagatgaagcaccatcaacatgcatgg

SEQ ID NO: 18040 - DNA, 28 bp, synthetic construct
  source 1..28: mol_type = other DNA
cagatgaagcaccatcaacatgcatggg

SEQ ID NO: 18041 - DNA, 28 bp, synthetic construct
  source 1..28: mol_type = other DNA
caccatcaacatgcatgggctacatagg

SEQ ID NO: 18042 - DNA, 28 bp, synthetic construct
  source 1..28: mol_type = other DNA
ctcctatgtagcccatgcatgttgatgg

SEQ ID NO: 18043 - DNA, 28 bp, synthetic construct
  source 1..28: mol_type = other DNA
acatgcatgggctacataggagagctgg

SEQ ID NO: 18044 - DNA, 28 bp, synthetic construct
  source 1..28: mol_type = other DNA
catgcatgggctacataggagagctggg

SEQ ID NO: 18045 - DNA, 28 bp, synthetic construct
  source 1..28: mol_type = other DNA
atgggctacataggagagctgggtctgg

SEQ ID NO: 18046 - DNA, 28 bp, synthetic construct
  source 1..28: mol_type = other DNA
tgggctacataggagagctgggtctggg

SEQ ID NO: 18047 - DNA, 28 bp, synthetic construct
  source 1..28: mol_type = other DNA
gggctacataggagagctgggtctgggg

SEQ ID NO: 18048 - DNA, 28 bp, synthetic construct
  source 1..28: mol_type = other DNA
ggctacataggagagctgggtctggggg

SEQ ID NO: 18049 - DNA, 28 bp, synthetic construct
  source 1..28: mol_type = other DNA
ggagagctgggtctgggggaaaagatgg

SEQ ID NO: 18050 - DNA, 28 bp, synthetic construct
  source 1..28: mol_type = other DNA
gagagctgggtctgggggaaaagatggg

SEQ ID NO: 18051 - DNA, 28 bp, synthetic construct
  source 1..28: mol_type = other DNA
tgggtctgggggaaaagatgggatttgg

SEQ ID NO: 18052 - DNA, 28 bp, synthetic construct
  source 1..28: mol_type = other DNA
gggtctgggggaaaagatgggatttggg

SEQ ID NO: 18053 - DNA, 28 bp, synthetic construct
  source 1..28: mol_type = other DNA
tgggggaaaagatgggatttgggtttgg

SEQ ID NO: 18054 - DNA, 28 bp, synthetic construct
  source 1..28: mol_type = other DNA
gggggaaaagatgggatttgggtttggg

SEQ ID NO: 18055 - DNA, 28 bp, synthetic construct
  source 1..28: mol_type = other DNA
atttgggtttgggtgtgcatgttccagg

SEQ ID NO: 18056 - DNA, 28 bp, synthetic construct
  source 1..28: mol_type = other DNA
ggtttgggtgtgcatgttccaggcatgg

SEQ ID NO: 18057 - DNA, 28 bp, synthetic construct
  source 1..28: mol_type = other DNA
ttgggtgtgcatgttccaggcatggagg

SEQ ID NO: 18058 - DNA, 28 bp, synthetic construct
  source 1..28: mol_type = other DNA
tgggtgtgcatgttccaggcatggaggg

SEQ ID NO: 18059 - DNA, 28 bp, synthetic construct
  source 1..28: mol_type = other DNA
catgttccaggcatggagggaagaatgg

SEQ ID NO: 18060 - DNA, 28 bp, synthetic construct
  source 1..28: mol_type = other DNA
atgttccaggcatggagggaagaatggg

SEQ ID NO: 18061 - DNA, 28 bp, synthetic construct
  source 1..28: mol_type = other DNA
ttctgcccattcttccctccatgcctgg

SEQ ID NO: 18062 - DNA, 28 bp, synthetic construct
  source 1..28: mol_type = other DNA
ggagggaagaatgggcagaatgacgagg

SEQ ID NO: 18063 - DNA, 28 bp, synthetic construct
  source 1..28: mol_type = other DNA
gggcagaatgacgaggatcaagccctgg

SEQ ID NO: 18064 - DNA, 28 bp, synthetic construct
  source 1..28: mol_type = other DNA
cagaatgacgaggatcaagccctggtgg

SEQ ID NO: 18065 - DNA, 28 bp, synthetic construct
  source 1..28: mol_type = other DNA
caagccctggtggagcccccagaccagg

SEQ ID NO: 18066 - DNA, 28 bp, synthetic construct
  source 1..28: mol_type = other DNA
aagccctggtggagcccccagaccaggg

SEQ ID NO: 18067 - DNA, 28 bp, synthetic construct
  source 1..28: mol_type = other DNA
gggccctggtctgggggctccaccaggg

SEQ ID NO: 18068 - DNA, 28 bp, synthetic construct
  source 1..28: mol_type = other DNA
agggccctggtctgggggctccaccagg

SEQ ID NO: 18069 - DNA, 28 bp, synthetic construct
  source 1..28: mol_type = other DNA
tggtggagcccccagaccagggccctgg

SEQ ID NO: 18070 - DNA, 28 bp, synthetic construct
  source 1..28: mol_type = other DNA
ggtggagcccccagaccagggccctggg

SEQ ID NO: 18071 - DNA, 28 bp, synthetic construct
  source 1..28: mol_type = other DNA
aaatatgcccagggccctggtctggggg

SEQ ID NO: 18072 - DNA, 28 bp, synthetic construct
  source 1..28: mol_type = other DNA
gaaatatgcccagggccctggtctgggg

SEQ ID NO: 18073 - DNA, 28 bp, synthetic construct
  source 1..28: mol_type = other DNA
ggaaatatgcccagggccctggtctggg

SEQ ID NO: 18074 - DNA, 28 bp, synthetic construct
  source 1..28: mol_type = other DNA
tggaaatatgcccagggccctggtctgg

SEQ ID NO: 18075 - DNA, 28 bp, synthetic construct
  source 1..28: mol_type = other DNA
gcaagtggaaatatgcccagggccctgg

SEQ ID NO: 18076 - DNA, 28 bp, synthetic construct
  source 1..28: mol_type = other DNA
aagaaggcaagtggaaatatgcccaggg

SEQ ID NO: 18077 - DNA, 28 bp, synthetic construct
  source 1..28: mol_type = other DNA
gaagaaggcaagtggaaatatgcccagg

SEQ ID NO: 18078 - DNA, 28 bp, synthetic construct
  source 1..28: mol_type = other DNA
acaaaagtttgcagaagaaggcaagtgg

SEQ ID NO: 18079 - DNA, 28 bp, synthetic construct
  source 1..28: mol_type = other DNA
caggcacacaaaagtttgcagaagaagg

SEQ ID NO: 18080 - DNA, 28 bp, synthetic construct
  source 1..28: mol_type = other DNA
cttctgcaaacttttgtgtgcctgttgg

SEQ ID NO: 18081 - DNA, 28 bp, synthetic construct
  source 1..28: mol_type = other DNA
ttctgcaaacttttgtgtgcctgttggg

SEQ ID NO: 18082 - DNA, 28 bp, synthetic construct
  source 1..28: mol_type = other DNA
tgcaaacttttgtgtgcctgttgggtgg

SEQ ID NO: 18083 - DNA, 28 bp, synthetic construct
  source 1..28: mol_type = other DNA
aacttttgtgtgcctgttgggtggaagg

SEQ ID NO: 18084 - DNA, 28 bp, synthetic construct
  source 1..28: mol_type = other DNA
gcctgttgggtggaaggtactatgctgg

SEQ ID NO: 18085 - DNA, 28 bp, synthetic construct
  source 1..28: mol_type = other DNA
cctgttgggtggaaggtactatgctggg

SEQ ID NO: 18086 - DNA, 28 bp, synthetic construct
  source 1..28: mol_type = other DNA
ctgttgggtggaaggtactatgctgggg

SEQ ID NO: 18087 - DNA, 28 bp, synthetic construct
  source 1..28: mol_type = other DNA
ggaaggtactatgctggggccatccagg

SEQ ID NO: 18088 - DNA, 28 bp, synthetic construct
  source 1..28: mol_type = other DNA
tactatgctggggccatccaggatccgg

SEQ ID NO: 18089 - DNA, 28 bp, synthetic construct
  source 1..28: mol_type = other DNA
gtcttacactgctccggatcctggatgg

SEQ ID NO: 18090 - DNA, 28 bp, synthetic construct
  source 1..28: mol_type = other DNA
tgatgtcttacactgctccggatcctgg

SEQ ID NO: 18091 - DNA, 28 bp, synthetic construct
  source 1..28: mol_type = other DNA
ggatccggagcagtgtaagacatcatgg

SEQ ID NO: 18092 - DNA, 28 bp, synthetic construct
  source 1..28: mol_type = other DNA
caggccatgatgtcttacactgctccgg

SEQ ID NO: 18093 - DNA, 28 bp, synthetic construct
  source 1..28: mol_type = other DNA
gcagtgtaagacatcatggcctgcatgg

SEQ ID NO: 18094 - DNA, 28 bp, synthetic construct
  source 1..28: mol_type = other DNA
tcagatgtcaagggtcacaccatgcagg

SEQ ID NO: 18095 - DNA, 28 bp, synthetic construct
  source 1..28: mol_type = other DNA
cccttgacatctgaaaagaacgagctgg

SEQ ID NO: 18096 - DNA, 28 bp, synthetic construct
  source 1..28: mol_type = other DNA
accagctcgttcttttcagatgtcaagg

SEQ ID NO: 18097 - DNA, 28 bp, synthetic construct
  source 1..28: mol_type = other DNA
ttgacatctgaaaagaacgagctggtgg

SEQ ID NO: 18098 - DNA, 28 bp, synthetic construct
  source 1..28: mol_type = other DNA
atctgaaaagaacgagctggtggagtgg

SEQ ID NO: 18099 - DNA, 28 bp, synthetic construct
  source 1..28: mol_type = other DNA
tctgaaaagaacgagctggtggagtggg

SEQ ID NO: 18100 - DNA, 28 bp, synthetic construct
  source 1..28: mol_type = other DNA
aaaagaacgagctggtggagtgggaagg

SEQ ID NO: 18101 - DNA, 28 bp, synthetic construct
  source 1..28: mol_type = other DNA
gctggtggagtgggaaggagacaagtgg

SEQ ID NO: 18102 - DNA, 28 bp, synthetic construct
  source 1..28: mol_type = other DNA
aagtggcagcagagttgacatcatcagg

SEQ ID NO: 18103 - DNA, 28 bp, synthetic construct
  source 1..28: mol_type = other DNA
agttgacatcatcaggactgactgcagg

SEQ ID NO: 18104 - DNA, 28 bp, synthetic construct
  source 1..28: mol_type = other DNA
acatcatcaggactgactgcaggacagg

SEQ ID NO: 18105 - DNA, 28 bp, synthetic construct
  source 1..28: mol_type = other DNA
tcatcaggactgactgcaggacaggcgg

SEQ ID NO: 18106 - DNA, 28 bp, synthetic construct
  source 1..28: mol_type = other DNA
ggacaggcggtgaaacgagccactgagg

SEQ ID NO: 18107 - DNA, 28 bp, synthetic construct
  source 1..28: mol_type = other DNA
gccactgaggagttacccagtgccctgg

SEQ ID NO: 18108 - DNA, 28 bp, synthetic construct
  source 1..28: mol_type = other DNA
ccactgaggagttacccagtgccctggg

SEQ ID NO: 18109 - DNA, 28 bp, synthetic construct
  source 1..28: mol_type = other DNA
cactgaggagttacccagtgccctgggg

SEQ ID NO: 18110 - DNA, 28 bp, synthetic construct
  source 1..28: mol_type = other DNA
tcacatctaagctccccagggcactggg

SEQ ID NO: 18111 - DNA, 28 bp, synthetic construct
  source 1..28: mol_type = other DNA
ctcacatctaagctccccagggcactgg

SEQ ID NO: 18112 - DNA, 28 bp, synthetic construct
  source 1..28: mol_type = other DNA
gtaagtctcacatctaagctccccaggg

SEQ ID NO: 18113 - DNA, 28 bp, synthetic construct
  source 1..28: mol_type = other DNA
tgtaagtctcacatctaagctccccagg

SEQ ID NO: 18114 - DNA, 28 bp, synthetic construct
  source 1..28: mol_type = other DNA
ggacacagagctggggagtgctgggtgg

SEQ ID NO: 18115 - DNA, 28 bp, synthetic construct
  source 1..28: mol_type = other DNA
cagggacacagagctggggagtgctggg

SEQ ID NO: 18116 - DNA, 28 bp, synthetic construct
  source 1..28: mol_type = other DNA
ccagcactccccagctctgtgtccctgg

SEQ ID NO: 18117 - DNA, 28 bp, synthetic construct
  source 1..28: mol_type = other DNA
cagcactccccagctctgtgtccctggg

SEQ ID NO: 18118 - DNA, 28 bp, synthetic construct
  source 1..28: mol_type = other DNA
agtgggacccagggacacagagctgggg

SEQ ID NO: 18119 - DNA, 28 bp, synthetic construct
  source 1..28: mol_type = other DNA
cagtgggacccagggacacagagctggg

SEQ ID NO: 18120 - DNA, 28 bp, synthetic construct
  source 1..28: mol_type = other DNA
tcagtgggacccagggacacagagctgg

SEQ ID NO: 18121 - DNA, 28 bp, synthetic construct
  source 1..28: mol_type = other DNA
atacaatcaagttcagtgggacccaggg

SEQ ID NO: 18122 - DNA, 28 bp, synthetic construct
  source 1..28: mol_type = other DNA
aatacaatcaagttcagtgggacccagg

SEQ ID NO: 18123 - DNA, 28 bp, synthetic construct
  source 1..28: mol_type = other DNA
caactaaaatacaatcaagttcagtggg

SEQ ID NO: 18124 - DNA, 28 bp, synthetic construct
  source 1..28: mol_type = other DNA
gcaactaaaatacaatcaagttcagtgg

SEQ ID NO: 18125 - DNA, 28 bp, synthetic construct
  source 1..28: mol_type = other DNA
attttagttgcctcttttctaagaccgg

SEQ ID NO: 18126 - DNA, 28 bp, synthetic construct
  source 1..28: mol_type = other DNA
tattgttgctccggtcttagaaaagagg

SEQ ID NO: 18127 - DNA, 28 bp, synthetic construct
  source 1..28: mol_type = other DNA
acactcaaggaaggtattgttgctccgg

SEQ ID NO: 18128 - DNA, 28 bp, synthetic construct
  source 1..28: mol_type = other DNA
tggactgcacatgcacactcaaggaagg

SEQ ID NO: 18129 - DNA, 28 bp, synthetic construct
  source 1..28: mol_type = other DNA
tctatggactgcacatgcacactcaagg

SEQ ID NO: 18130 - DNA, 28 bp, synthetic construct
  source 1..28: mol_type = other DNA
tgagtgtgcatgtgcagtccatagatgg

SEQ ID NO: 18131 - DNA, 28 bp, synthetic construct
  source 1..28: mol_type = other DNA
ggaagagaacactggctgccatctatgg

SEQ ID NO: 18132 - DNA, 28 bp, synthetic construct
  source 1..28: mol_type = other DNA
gagtcttctcatgggaagagaacactgg

SEQ ID NO: 18133 - DNA, 28 bp, synthetic construct
  source 1..28: mol_type = other DNA
gtgaggaggctcagagtcttctcatggg

SEQ ID NO: 18134 - DNA, 28 bp, synthetic construct
  source 1..28: mol_type = other DNA
agtgaggaggctcagagtcttctcatgg

SEQ ID NO: 18135 - DNA, 28 bp, synthetic construct
  source 1..28: mol_type = other DNA
agaagactctgagcctcctcactagagg

SEQ ID NO: 18136 - DNA, 28 bp, synthetic construct
  source 1..28: mol_type = other DNA
gaagactctgagcctcctcactagaggg

SEQ ID NO: 18137 - DNA, 28 bp, synthetic construct
  source 1..28: mol_type = other DNA
gactctgagcctcctcactagagggtgg

SEQ ID NO: 18138 - DNA, 28 bp, synthetic construct
  source 1..28: mol_type = other DNA
gtttttagaccaccctctagtgaggagg

SEQ ID NO: 18139 - DNA, 28 bp, synthetic construct
  source 1..28: mol_type = other DNA
tttgtttttagaccaccctctagtgagg

SEQ ID NO: 18140 - DNA, 28 bp, synthetic construct
  source 1..28: mol_type = other DNA
cactagagggtggtctaaaaacaaatgg

SEQ ID NO: 18141 - DNA, 28 bp, synthetic construct
  source 1..28: mol_type = other DNA
aaaaacaaatggatccatccacagaagg

SEQ ID NO: 18142 - DNA, 28 bp, synthetic construct
  source 1..28: mol_type = other DNA
tggatccatccacagaaggtctgaaagg

SEQ ID NO: 18143 - DNA, 28 bp, synthetic construct
  source 1..28: mol_type = other DNA
gaaaacctttcagaccttctgtggatgg

SEQ ID NO: 18144 - DNA, 28 bp, synthetic construct
  source 1..28: mol_type = other DNA
ctatgaaaacctttcagaccttctgtgg

SEQ ID NO: 18145 - DNA, 28 bp, synthetic construct
  source 1..28: mol_type = other DNA
gaaaggttttcatagaatcttgacttgg

SEQ ID NO: 18146 - DNA, 28 bp, synthetic construct
  source 1..28: mol_type = other DNA
tagaatcttgacttggtagcacttcagg

SEQ ID NO: 18147 - DNA, 28 bp, synthetic construct
  source 1..28: mol_type = other DNA
atctaactcgtgctttccagaagtgtgg

SEQ ID NO: 18148 - DNA, 28 bp, synthetic construct
  source 1..28: mol_type = other DNA
tcgtgctttccagaagtgtggcctgtgg

SEQ ID NO: 18149 - DNA, 28 bp, synthetic construct
  source 1..28: mol_type = other DNA
gacagaacaccacaggccacacttctgg

SEQ ID NO: 18150 - DNA, 28 bp, synthetic construct
  source 1..28: mol_type = other DNA
gaagtgtggcctgtggtgttctgtctgg

SEQ ID NO: 18151 - DNA, 28 bp, synthetic construct
  source 1..28: mol_type = other DNA
cctgtggtgttctgtctggagtatttgg

SEQ ID NO: 18152 - DNA, 28 bp, synthetic construct
  source 1..28: mol_type = other DNA
ggacagcaaggtggaggtggatgggagg

SEQ ID NO: 18153 - DNA, 28 bp, synthetic construct
  source 1..28: mol_type = other DNA
acaggacagcaaggtggaggtggatggg

SEQ ID NO: 18154 - DNA, 28 bp, synthetic construct
  source 1..28: mol_type = other DNA
gacaggacagcaaggtggaggtggatgg

SEQ ID NO: 18155 - DNA, 28 bp, synthetic construct
  source 1..28: mol_type = other DNA
acaggacaggacagcaaggtggaggtgg

SEQ ID NO: 18156 - DNA, 28 bp, synthetic construct
  source 1..28: mol_type = other DNA
gtcacaggacaggacagcaaggtggagg

SEQ ID NO: 18157 - DNA, 28 bp, synthetic construct
  source 1..28: mol_type = other DNA
agagtcacaggacaggacagcaaggtgg

SEQ ID NO: 18158 - DNA, 28 bp, synthetic construct
  source 1..28: mol_type = other DNA
gtgagagtcacaggacaggacagcaagg

SEQ ID NO: 18159 - DNA, 28 bp, synthetic construct
  source 1..28: mol_type = other DNA
actgagctagtgagagtcacaggacagg

SEQ ID NO: 18160 - DNA, 28 bp, synthetic construct
  source 1..28: mol_type = other DNA
cggtgactgagctagtgagagtcacagg

SEQ ID NO: 18161 - DNA, 28 bp, synthetic construct
  source 1..28: mol_type = other DNA
ctgtgactctcactagctcagtcaccgg

SEQ ID NO: 18162 - DNA, 28 bp, synthetic construct
  source 1..28: mol_type = other DNA
tgtgactctcactagctcagtcaccggg

SEQ ID NO: 18163 - DNA, 28 bp, synthetic construct
  source 1..28: mol_type = other DNA
ctctcactagctcagtcaccgggtcagg

SEQ ID NO: 18164 - DNA, 28 bp, synthetic construct
  source 1..28: mol_type = other DNA
catttcatggcagggcttcctgacccgg

SEQ ID NO: 18165 - DNA, 28 bp, synthetic construct
  source 1..28: mol_type = other DNA
aagccctgccatgaaatgctagatttgg

SEQ ID NO: 18166 - DNA, 28 bp, synthetic construct
  source 1..28: mol_type = other DNA
ccctgccatgaaatgctagatttggagg

SEQ ID NO: 18167 - DNA, 28 bp, synthetic construct
  source 1..28: mol_type = other DNA
gcctccaaatctagcatttcatggcagg

SEQ ID NO: 18168 - DNA, 28 bp, synthetic construct
  source 1..28: mol_type = other DNA
caatgcctccaaatctagcatttcatgg

SEQ ID NO: 18169 - DNA, 28 bp, synthetic construct
  source 1..28: mol_type = other DNA
aatgctagatttggaggcattgccaagg

SEQ ID NO: 18170 - DNA, 28 bp, synthetic construct
  source 1..28: mol_type = other DNA
tgtttgagtatggtttgtggtaccttgg

SEQ ID NO: 18171 - DNA, 28 bp, synthetic construct
  source 1..28: mol_type = other DNA
aggtaccacaaaccatactcaaacaagg

SEQ ID NO: 18172 - DNA, 28 bp, synthetic construct
  source 1..28: mol_type = other DNA
tatgaccttgtttgagtatggtttgtgg

SEQ ID NO: 18173 - DNA, 28 bp, synthetic construct
  source 1..28: mol_type = other DNA
agtctattatgaccttgtttgagtatgg

SEQ ID NO: 18174 - DNA, 28 bp, synthetic construct
  source 1..28: mol_type = other DNA
tcataatagactagtgatctcactgtgg

SEQ ID NO: 18175 - DNA, 28 bp, synthetic construct
  source 1..28: mol_type = other DNA
gactagtgatctcactgtggctaacagg

SEQ ID NO: 18176 - DNA, 28 bp, synthetic construct
  source 1..28: mol_type = other DNA
ggtaaacacattcagatttgtatttagg

SEQ ID NO: 18177 - DNA, 28 bp, synthetic construct
  source 1..28: mol_type = other DNA
caattttctgggaaaatctgtctaaagg

SEQ ID NO: 18178 - DNA, 28 bp, synthetic construct
  source 1..28: mol_type = other DNA
aattcgagaacactgacaattttctggg

SEQ ID NO: 18179 - DNA, 28 bp, synthetic construct
  source 1..28: mol_type = other DNA
aaattcgagaacactgacaattttctgg

SEQ ID NO: 18180 - DNA, 28 bp, synthetic construct
  source 1..28: mol_type = other DNA
acttgagattttcaaaactagagggagg

SEQ ID NO: 18181 - DNA, 28 bp, synthetic construct
  source 1..28: mol_type = other DNA
ccctctagttttgaaaatctcaagtagg

SEQ ID NO: 18182 - DNA, 28 bp, synthetic construct
  source 1..28: mol_type = other DNA
acctacttgagattttcaaaactagagg

SEQ ID NO: 18183 - DNA, 28 bp, synthetic construct
  source 1..28: mol_type = other DNA
gtttagcctctccccagagtgacaacgg

SEQ ID NO: 18184 - DNA, 28 bp, synthetic construct
  source 1..28: mol_type = other DNA
cttgtgccgttgtcactctggggagagg

SEQ ID NO: 18185 - DNA, 28 bp, synthetic construct
  source 1..28: mol_type = other DNA
aacttcttgtgccgttgtcactctgggg

SEQ ID NO: 18186 - DNA, 28 bp, synthetic construct
  source 1..28: mol_type = other DNA
aaacttcttgtgccgttgtcactctggg

SEQ ID NO: 18187 - DNA, 28 bp, synthetic construct
  source 1..28: mol_type = other DNA
taaacttcttgtgccgttgtcactctgg

SEQ ID NO: 18188 - DNA, 28 bp, synthetic construct
  source 1..28: mol_type = other DNA
acagctaaatgcaaactgaaaagtgtgg

SEQ ID NO: 18189 - DNA, 28 bp, synthetic construct
  source 1..28: mol_type = other DNA
aatgcaaactgaaaagtgtggtttgtgg

SEQ ID NO: 18190 - DNA, 28 bp, synthetic construct
  source 1..28: mol_type = other DNA
atgcaaactgaaaagtgtggtttgtggg

SEQ ID NO: 18191 - DNA, 28 bp, synthetic construct
  source 1..28: mol_type = other DNA
atttttcccataatgttcatcaatttgg

SEQ ID NO: 18192 - DNA, 28 bp, synthetic construct
  source 1..28: mol_type = other DNA
gaattgccaaattgatgaacattatggg

SEQ ID NO: 18193 - DNA, 28 bp, synthetic construct
  source 1..28: mol_type = other DNA
tgaattgccaaattgatgaacattatgg

SEQ ID NO: 18194 - DNA, 28 bp, synthetic construct
  source 1..28: mol_type = other DNA
tgttcatcaatttggcaattcaaatagg

SEQ ID NO: 18195 - DNA, 28 bp, synthetic construct
  source 1..28: mol_type = other DNA
caattcaaataggattcagaatccaagg

SEQ ID NO: 18196 - DNA, 28 bp, synthetic construct
  source 1..28: mol_type = other DNA
ttcatataaaatgctgcgaacaccttgg

SEQ ID NO: 18197 - DNA, 28 bp, synthetic construct
  source 1..28: mol_type = other DNA
ttatatgaaaatgtgcctgagagtttgg

SEQ ID NO: 18198 - DNA, 28 bp, synthetic construct
  source 1..28: mol_type = other DNA
tatatgaaaatgtgcctgagagtttggg

SEQ ID NO: 18199 - DNA, 28 bp, synthetic construct
  source 1..28: mol_type = other DNA
atatgaaaatgtgcctgagagtttgggg

SEQ ID NO: 18200 - DNA, 28 bp, synthetic construct
  source 1..28: mol_type = other DNA
aagaatttctattccccaaactctcagg

SEQ ID NO: 18201 - DNA, 28 bp, synthetic construct
  source 1..28: mol_type = other DNA
ttatcaagagcaaatttaacttatttgg

SEQ ID NO: 18202 - DNA, 28 bp, synthetic construct
  source 1..28: mol_type = other DNA
tttaataaaaggatgcagataaaacagg

SEQ ID NO: 18203 - DNA, 28 bp, synthetic construct
  source 1..28: mol_type = other DNA
ttatctgcatccttttattaaacagtgg

SEQ ID NO: 18204 - DNA, 28 bp, synthetic construct
  source 1..28: mol_type = other DNA
taaattcaggccactgtttaataaaagg

SEQ ID NO: 18205 - DNA, 28 bp, synthetic construct
  source 1..28: mol_type = other DNA
ttaaacagtggcctgaatttactaaagg

SEQ ID NO: 18206 - DNA, 28 bp, synthetic construct
  source 1..28: mol_type = other DNA
ctgttctctgtcctttagtaaattcagg

SEQ ID NO: 18207 - DNA, 28 bp, synthetic construct
  source 1..28: mol_type = other DNA
ctgaatttactaaaggacagagaacagg

SEQ ID NO: 18208 - DNA, 28 bp, synthetic construct
  source 1..28: mol_type = other DNA
tgaatttactaaaggacagagaacaggg

SEQ ID NO: 18209 - DNA, 28 bp, synthetic construct
  source 1..28: mol_type = other DNA
ctaaaggacagagaacagggttgagagg

SEQ ID NO: 18210 - DNA, 28 bp, synthetic construct
  source 1..28: mol_type = other DNA
gcttgtcataagaagcagtcactgtggg

SEQ ID NO: 18211 - DNA, 28 bp, synthetic construct
  source 1..28: mol_type = other DNA
tgcttgtcataagaagcagtcactgtgg

SEQ ID NO: 18212 - DNA, 28 bp, synthetic construct
  source 1..28: mol_type = other DNA
gtgactgcttcttatgacaagcaagagg

SEQ ID NO: 18213 - DNA, 28 bp, synthetic construct
  source 1..28: mol_type = other DNA
tgactgcttcttatgacaagcaagaggg

SEQ ID NO: 18214 - DNA, 28 bp, synthetic construct
  source 1..28: mol_type = other DNA
atgacaagcaagagggtcaacttagagg

SEQ ID NO: 18215 - DNA, 28 bp, synthetic construct
  source 1..28: mol_type = other DNA
caagcaagagggtcaacttagaggcagg

SEQ ID NO: 18216 - DNA, 28 bp, synthetic construct
  source 1..28: mol_type = other DNA
tcaacttagaggcaggactgtcttcagg

SEQ ID NO: 18217 - DNA, 28 bp, synthetic construct
  source 1..28: mol_type = other DNA
caacttagaggcaggactgtcttcaggg

SEQ ID NO: 18218 - DNA, 28 bp, synthetic construct
  source 1..28: mol_type = other DNA
aacttagaggcaggactgtcttcagggg

SEQ ID NO: 18219 - DNA, 28 bp, synthetic construct
  source 1..28: mol_type = other DNA
ttctcactctcttggagaggtttgtagg

SEQ ID NO: 18220 - DNA, 28 bp, synthetic construct
  source 1..28: mol_type = other DNA
cctctccaagagagtgagaaaaagcagg

SEQ ID NO: 18221 - DNA, 28 bp, synthetic construct
  source 1..28: mol_type = other DNA
tacaacctgctttttctcactctcttgg

SEQ ID NO: 18222 - DNA, 28 bp, synthetic construct
  source 1..28: mol_type = other DNA
agagagtgagaaaaagcaggttgtatgg

SEQ ID NO: 18223 - DNA, 28 bp, synthetic construct
  source 1..28: mol_type = other DNA
attttgcagcttgccagaagcaatgtgg

SEQ ID NO: 18224 - DNA, 28 bp, synthetic construct
  source 1..28: mol_type = other DNA
ttttgcagcttgccagaagcaatgtggg

SEQ ID NO: 18225 - DNA, 28 bp, synthetic construct
  source 1..28: mol_type = other DNA
tctgacaatattcccacattgcttctgg

SEQ ID NO: 18226 - DNA, 28 bp, synthetic construct
  source 1..28: mol_type = other DNA
ggaatattgtcagactgcacagacctgg

SEQ ID NO: 18227 - DNA, 28 bp, synthetic construct
  source 1..28: mol_type = other DNA
gaatattgtcagactgcacagacctggg

SEQ ID NO: 18228 - DNA, 28 bp, synthetic construct
  source 1..28: mol_type = other DNA
aatattgtcagactgcacagacctgggg

SEQ ID NO: 18229 - DNA, 28 bp, synthetic construct
  source 1..28: mol_type = other DNA
cagactgcacagacctggggccagctgg

SEQ ID NO: 18230 - DNA, 28 bp, synthetic construct
  source 1..28: mol_type = other DNA
cgcactctaggagccagctggccccagg

SEQ ID NO: 18231 - DNA, 28 bp, synthetic construct
  source 1..28: mol_type = other DNA
ggggccagctggctcctagagtgcgagg

SEQ ID NO: 18232 - DNA, 28 bp, synthetic construct
  source 1..28: mol_type = other DNA
agctcctcgcactctaggagccagctgg

SEQ ID NO: 18233 - DNA, 28 bp, synthetic construct
  source 1..28: mol_type = other DNA
agtcactgagagctcctcgcactctagg

SEQ ID NO: 18234 - DNA, 28 bp, synthetic construct
  source 1..28: mol_type = other DNA
tagggactgaacaaagtcacagagcagg

SEQ ID NO: 18235 - DNA, 28 bp, synthetic construct
  source 1..28: mol_type = other DNA
ctgtgactttgttcagtccctaccctgg

SEQ ID NO: 18236 - DNA, 28 bp, synthetic construct
  source 1..28: mol_type = other DNA
ttgttcagtccctaccctggatgtgtgg

SEQ ID NO: 18237 - DNA, 28 bp, synthetic construct
  source 1..28: mol_type = other DNA
agtccctaccctggatgtgtggtgaagg

SEQ ID NO: 18238 - DNA, 28 bp, synthetic construct
  source 1..28: mol_type = other DNA
gtccctaccctggatgtgtggtgaaggg

SEQ ID NO: 18239 - DNA, 28 bp, synthetic construct
  source 1..28: mol_type = other DNA
cacccttcaccacacatccagggtaggg

SEQ ID NO: 18240 - DNA, 28 bp, synthetic construct
  source 1..28: mol_type = other DNA
gcacccttcaccacacatccagggtagg

SEQ ID NO: 18241 - DNA, 28 bp, synthetic construct
  source 1..28: mol_type = other DNA
ccctggatgtgtggtgaagggtgccagg

SEQ ID NO: 18242 - DNA, 28 bp, synthetic construct
  source 1..28: mol_type = other DNA
gcctggcacccttcaccacacatccagg

SEQ ID NO: 18243 - DNA, 28 bp, synthetic construct
  source 1..28: mol_type = other DNA
ggtgaagggtgccaggcttagctgctgg

SEQ ID NO: 18244 - DNA, 28 bp, synthetic construct
  source 1..28: mol_type = other DNA
gccaggcttagctgctggaccagtgagg

SEQ ID NO: 18245 - DNA, 28 bp, synthetic construct
  source 1..28: mol_type = other DNA
acctcactggtccagcagctaagcctgg

SEQ ID NO: 18246 - DNA, 28 bp, synthetic construct
  source 1..28: mol_type = other DNA
agctgctggaccagtgaggtccctgagg

SEQ ID NO: 18247 - DNA, 28 bp, synthetic construct
  source 1..28: mol_type = other DNA
gctgctggaccagtgaggtccctgaggg

SEQ ID NO: 18248 - DNA, 28 bp, synthetic construct
  source 1..28: mol_type = other DNA
ctgctggaccagtgaggtccctgagggg

SEQ ID NO: 18249 - DNA, 28 bp, synthetic construct
  source 1..28: mol_type = other DNA
tgctggaccagtgaggtccctgaggggg

SEQ ID NO: 18250 - DNA, 28 bp, synthetic construct
  source 1..28: mol_type = other DNA
ggaccagtgaggtccctgagggggcagg

SEQ ID NO: 18251 - DNA, 28 bp, synthetic construct
  source 1..28: mol_type = other DNA
gaccagtgaggtccctgagggggcaggg

SEQ ID NO: 18252 - DNA, 28 bp, synthetic construct
  source 1..28: mol_type = other DNA
agccctgccccctcagggacctcactgg

SEQ ID NO: 18253 - DNA, 28 bp, synthetic construct
  source 1..28: mol_type = other DNA
aggtccctgagggggcagggctaagagg

SEQ ID NO: 18254 - DNA, 28 bp, synthetic construct
  source 1..28: mol_type = other DNA
tacacctcttagccctgccccctcaggg

SEQ ID NO: 18255 - DNA, 28 bp, synthetic construct
  source 1..28: mol_type = other DNA
ctacacctcttagccctgccccctcagg

SEQ ID NO: 18256 - DNA, 28 bp, synthetic construct
  source 1..28: mol_type = other DNA
cgcacttgaccagtcattgattcactgg

SEQ ID NO: 18257 - DNA, 28 bp, synthetic construct
  source 1..28: mol_type = other DNA
cttgaccagtcattgattcactggttgg

SEQ ID NO: 18258 - DNA, 28 bp, synthetic construct
  source 1..28: mol_type = other DNA
ttgaccagtcattgattcactggttggg

SEQ ID NO: 18259 - DNA, 28 bp, synthetic construct
  source 1..28: mol_type = other DNA
aattcccaaccagtgaatcaatgactgg

SEQ ID NO: 18260 - DNA, 28 bp, synthetic construct
  source 1..28: mol_type = other DNA
tcactggttgggaatttgttcattgagg

SEQ ID NO: 18261 - DNA, 28 bp, synthetic construct
  source 1..28: mol_type = other DNA
cactggttgggaatttgttcattgaggg

SEQ ID NO: 18262 - DNA, 28 bp, synthetic construct
  source 1..28: mol_type = other DNA
actggttgggaatttgttcattgagggg

SEQ ID NO: 18263 - DNA, 28 bp, synthetic construct
  source 1..28: mol_type = other DNA
ccattactccccatgcctcacgtgcagg

SEQ ID NO: 18264 - DNA, 28 bp, synthetic construct
  source 1..28: mol_type = other DNA
cacactcacctgcacgtgaggcatgggg

SEQ ID NO: 18265 - DNA, 28 bp, synthetic construct
  source 1..28: mol_type = other DNA
acacactcacctgcacgtgaggcatggg

SEQ ID NO: 18266 - DNA, 28 bp, synthetic construct
  source 1..28: mol_type = other DNA
cacacactcacctgcacgtgaggcatgg

SEQ ID NO: 18267 - DNA, 28 bp, synthetic construct
  source 1..28: mol_type = other DNA
atatacacacactcacctgcacgtgagg

SEQ ID NO: 18268 - DNA, 28 bp, synthetic construct
  source 1..28: mol_type = other DNA
gtaaggtactgcagctgcacatacaggg

SEQ ID NO: 18269 - DNA, 28 bp, synthetic construct
  source 1..28: mol_type = other DNA
tgtaaggtactgcagctgcacatacagg

SEQ ID NO: 18270 - DNA, 28 bp, synthetic construct
  source 1..28: mol_type = other DNA
cttgagaggcactggaagatgtgtaagg

SEQ ID NO: 18271 - DNA, 28 bp, synthetic construct
  source 1..28: mol_type = other DNA
tgtttttatgatgcttgagaggcactgg

SEQ ID NO: 18272 - DNA, 28 bp, synthetic construct
  source 1..28: mol_type = other DNA
ggaagctgtttttatgatgcttgagagg

SEQ ID NO: 18273 - DNA, 28 bp, synthetic construct
  source 1..28: mol_type = other DNA
ttccacaaaacctctactacccacctgg

SEQ ID NO: 18274 - DNA, 28 bp, synthetic construct
  source 1..28: mol_type = other DNA
tgccaggtgggtagtagaggttttgtgg

SEQ ID NO: 18275 - DNA, 28 bp, synthetic construct
  source 1..28: mol_type = other DNA
tctgtggatgccaggtgggtagtagagg

SEQ ID NO: 18276 - DNA, 28 bp, synthetic construct
  source 1..28: mol_type = other DNA
actgggagctctgtggatgccaggtggg

SEQ ID NO: 18277 - DNA, 28 bp, synthetic construct
  source 1..28: mol_type = other DNA
cactgggagctctgtggatgccaggtgg

SEQ ID NO: 18278 - DNA, 28 bp, synthetic construct
  source 1..28: mol_type = other DNA
aatcactgggagctctgtggatgccagg

SEQ ID NO: 18279 - DNA, 28 bp, synthetic construct
  source 1..28: mol_type = other DNA
tggcatccacagagctcccagtgattgg

SEQ ID NO: 18280 - DNA, 28 bp, synthetic construct
  source 1..28: mol_type = other DNA
tgggagccaatcactgggagctctgtgg

SEQ ID NO: 18281 - DNA, 28 bp, synthetic construct
  source 1..28: mol_type = other DNA
cagtatcttttgggagccaatcactggg

SEQ ID NO: 18282 - DNA, 28 bp, synthetic construct
  source 1..28: mol_type = other DNA
tcagtatcttttgggagccaatcactgg

SEQ ID NO: 18283 - DNA, 28 bp, synthetic construct
  source 1..28: mol_type = other DNA
ttggctcccaaaagatactgaactttgg

SEQ ID NO: 18284 - DNA, 28 bp, synthetic construct
  source 1..28: mol_type = other DNA
tcccaaaagatactgaactttggcatgg

SEQ ID NO: 18285 - DNA, 28 bp, synthetic construct
  source 1..28: mol_type = other DNA
tccatgccaaagttcagtatcttttggg

SEQ ID NO: 18286 - DNA, 28 bp, synthetic construct
  source 1..28: mol_type = other DNA
ttccatgccaaagttcagtatcttttgg

SEQ ID NO: 18287 - DNA, 28 bp, synthetic construct
  source 1..28: mol_type = other DNA
aggtaattatgtacaacagcaaatgtgg

SEQ ID NO: 18288 - DNA, 28 bp, synthetic construct
  source 1..28: mol_type = other DNA
gaagtgtgtactattctagctggacagg

SEQ ID NO: 18289 - DNA, 28 bp, synthetic construct
  source 1..28: mol_type = other DNA
taaaagaagtgtgtactattctagctgg

SEQ ID NO: 18290 - DNA, 28 bp, synthetic construct
  source 1..28: mol_type = other DNA
gcccagaagtttatgtgcctgaacacgg

SEQ ID NO: 18291 - DNA, 28 bp, synthetic construct
  source 1..28: mol_type = other DNA
tccgtgttcaggcacataaacttctggg

SEQ ID NO: 18292 - DNA, 28 bp, synthetic construct
  source 1..28: mol_type = other DNA
atccgtgttcaggcacataaacttctgg

SEQ ID NO: 18293 - DNA, 28 bp, synthetic construct
  source 1..28: mol_type = other DNA
agaagtttatgtgcctgaacacggatgg

SEQ ID NO: 18294 - DNA, 28 bp, synthetic construct
  source 1..28: mol_type = other DNA
ttatgtgcctgaacacggatggtacagg

SEQ ID NO: 18295 - DNA, 28 bp, synthetic construct
  source 1..28: mol_type = other DNA
cctgaacacggatggtacaggaacaagg

SEQ ID NO: 18296 - DNA, 28 bp, synthetic construct
  source 1..28: mol_type = other DNA
ctgaacacggatggtacaggaacaaggg

SEQ ID NO: 18297 - DNA, 28 bp, synthetic construct
  source 1..28: mol_type = other DNA
agcgcttatcaattcagcattactctgg

SEQ ID NO: 18298 - DNA, 28 bp, synthetic construct
  source 1..28: mol_type = other DNA
ctctggagacatgaaacaaactaatagg

SEQ ID NO: 18299 - DNA, 28 bp, synthetic construct
  source 1..28: mol_type = other DNA
taaacaattttgtgaaccacatatttgg

SEQ ID NO: 18300 - DNA, 28 bp, synthetic construct
  source 1..28: mol_type = other DNA
aaacaattttgtgaaccacatatttggg

SEQ ID NO: 18301 - DNA, 28 bp, synthetic construct
  source 1..28: mol_type = other DNA
cttgttgatttttgtcccaaatatgtgg

SEQ ID NO: 18302 - DNA, 28 bp, synthetic construct
  source 1..28: mol_type = other DNA
tcaacaagtaaatttgaattacactagg

SEQ ID NO: 18303 - DNA, 28 bp, synthetic construct
  source 1..28: mol_type = other DNA
agtaaatttgaattacactaggcaaagg

SEQ ID NO: 18304 - DNA, 28 bp, synthetic construct
  source 1..28: mol_type = other DNA
aactttccaaaagaagacatacatgtgg

SEQ ID NO: 18305 - DNA, 28 bp, synthetic construct
  source 1..28: mol_type = other DNA
tgtgggccacatgtatgtcttcttttgg

SEQ ID NO: 18306 - DNA, 28 bp, synthetic construct
  source 1..28: mol_type = other DNA
gatgaactttatttcatatgattgtggg

SEQ ID NO: 18307 - DNA, 28 bp, synthetic construct
  source 1..28: mol_type = other DNA
tgatgaactttatttcatatgattgtgg

SEQ ID NO: 18308 - DNA, 28 bp, synthetic construct
  source 1..28: mol_type = other DNA
actggtgtgagatggtatctcattgtgg

SEQ ID NO: 18309 - DNA, 28 bp, synthetic construct
  source 1..28: mol_type = other DNA
agataccatctcacaccagtcagaatgg

SEQ ID NO: 18310 - DNA, 28 bp, synthetic construct
  source 1..28: mol_type = other DNA
aataaccattctgactggtgtgagatgg

SEQ ID NO: 18311 - DNA, 28 bp, synthetic construct
  source 1..28: mol_type = other DNA
actttttattaataaccattctgactgg

SEQ ID NO: 18312 - DNA, 28 bp, synthetic construct
  source 1..28: mol_type = other DNA
taaaaagtcaaagaatgacagttgctgg

SEQ ID NO: 18313 - DNA, 28 bp, synthetic construct
  source 1..28: mol_type = other DNA
agtcaaagaatgacagttgctggtgagg

SEQ ID NO: 18314 - DNA, 28 bp, synthetic construct
  source 1..28: mol_type = other DNA
gttgctggtgaggttgtagagaaaaagg

SEQ ID NO: 18315 - DNA, 28 bp, synthetic construct
  source 1..28: mol_type = other DNA
aaaaaggaacgcttatacactgttgagg

SEQ ID NO: 18316 - DNA, 28 bp, synthetic construct
  source 1..28: mol_type = other DNA
aaaaggaacgcttatacactgttgaggg

SEQ ID NO: 18317 - DNA, 28 bp, synthetic construct
  source 1..28: mol_type = other DNA
aaaggaacgcttatacactgttgagggg

SEQ ID NO: 18318 - DNA, 28 bp, synthetic construct
  source 1..28: mol_type = other DNA
gggattgtaaattagttcaaccatgtgg

SEQ ID NO: 18319 - DNA, 28 bp, synthetic construct
  source 1..28: mol_type = other DNA
tagttcaaccatgtggaagacagtgtgg

SEQ ID NO: 18320 - DNA, 28 bp, synthetic construct
  source 1..28: mol_type = other DNA
aggaattgccacactgtcttccacatgg

SEQ ID NO: 18321 - DNA, 28 bp, synthetic construct
  source 1..28: mol_type = other DNA
gggtcaaatggtatataggtctttgagg

SEQ ID NO: 18322 - DNA, 28 bp, synthetic construct
  source 1..28: mol_type = other DNA
gggattgctgggtcaaatggtatatagg

SEQ ID NO: 18323 - DNA, 28 bp, synthetic construct
  source 1..28: mol_type = other DNA
gcagtaatgggattgctgggtcaaatgg

SEQ ID NO: 18324 - DNA, 28 bp, synthetic construct
  source 1..28: mol_type = other DNA
gtatatatgcagtaatgggattgctggg

SEQ ID NO: 18325 - DNA, 28 bp, synthetic construct
  source 1..28: mol_type = other DNA
ggtatatatgcagtaatgggattgctgg

SEQ ID NO: 18326 - DNA, 28 bp, synthetic construct
  source 1..28: mol_type = other DNA
atcccattactgcatatatacccaaagg

SEQ ID NO: 18327 - DNA, 28 bp, synthetic construct
  source 1..28: mol_type = other DNA
ttcctttgggtatatatgcagtaatggg

SEQ ID NO: 18328 - DNA, 28 bp, synthetic construct
  source 1..28: mol_type = other DNA
attcctttgggtatatatgcagtaatgg

SEQ ID NO: 18329 - DNA, 28 bp, synthetic construct
  source 1..28: mol_type = other DNA
acggtagaatgactcatattcctttggg

SEQ ID NO: 18330 - DNA, 28 bp, synthetic construct
  source 1..28: mol_type = other DNA
tacggtagaatgactcatattcctttgg

SEQ ID NO: 18331 - DNA, 28 bp, synthetic construct
  source 1..28: mol_type = other DNA
caaacaaatgcgtgcatgtgtcttacgg

SEQ ID NO: 18332 - DNA, 28 bp, synthetic construct
  source 1..28: mol_type = other DNA
agcactattcacgatagcaaaaacatgg

SEQ ID NO: 18333 - DNA, 28 bp, synthetic construct
  source 1..28: mol_type = other DNA
acctacatgcccatcaatgatagactgg

SEQ ID NO: 18334 - DNA, 28 bp, synthetic construct
  source 1..28: mol_type = other DNA
tccagtctatcattgatgggcatgtagg

SEQ ID NO: 18335 - DNA, 28 bp, synthetic construct
  source 1..28: mol_type = other DNA
tttctttatccagtctatcattgatggg

SEQ ID NO: 18336 - DNA, 28 bp, synthetic construct
  source 1..28: mol_type = other DNA
ttttctttatccagtctatcattgatgg

SEQ ID NO: 18337 - DNA, 28 bp, synthetic construct
  source 1..28: mol_type = other DNA
aatgatagactggataaagaaaatgtgg

SEQ ID NO: 18338 - DNA, 28 bp, synthetic construct
  source 1..28: mol_type = other DNA
aagaaaatgtggtacatataccccatgg

SEQ ID NO: 18339 - DNA, 28 bp, synthetic construct
  source 1..28: mol_type = other DNA
tcttatggctgcatagtattccatgggg

SEQ ID NO: 18340 - DNA, 28 bp, synthetic construct
  source 1..28: mol_type = other DNA
ttcttatggctgcatagtattccatggg

SEQ ID NO: 18341 - DNA, 28 bp, synthetic construct
  source 1..28: mol_type = other DNA
tttcttatggctgcatagtattccatgg

SEQ ID NO: 18342 - DNA, 28 bp, synthetic construct
  source 1..28: mol_type = other DNA
gggcatgatctcattctttttcttatgg

SEQ ID NO: 18343 - DNA, 28 bp, synthetic construct
  source 1..28: mol_type = other DNA
aaaagaatgagatcatgccctttgcagg

SEQ ID NO: 18344 - DNA, 28 bp, synthetic construct
  source 1..28: mol_type = other DNA
tgagatcatgccctttgcaggaacatgg

SEQ ID NO: 18345 - DNA, 28 bp, synthetic construct
  source 1..28: mol_type = other DNA
atcatgccctttgcaggaacatggatgg

SEQ ID NO: 18346 - DNA, 28 bp, synthetic construct
  source 1..28: mol_type = other DNA
ccctttgcaggaacatggatggagctgg

SEQ ID NO: 18347 - DNA, 28 bp, synthetic construct
  source 1..28: mol_type = other DNA
tccagctccatccatgttcctgcaaagg

SEQ ID NO: 18348 - DNA, 28 bp, synthetic construct
  source 1..28: mol_type = other DNA
tttgcaggaacatggatggagctggagg

SEQ ID NO: 18349 - DNA, 28 bp, synthetic construct
  source 1..28: mol_type = other DNA
gccattatccttagcaaactaacccagg

SEQ ID NO: 18350 - DNA, 28 bp, synthetic construct
  source 1..28: mol_type = other DNA
tcctgggttagtttgctaaggataatgg

SEQ ID NO: 18351 - DNA, 28 bp, synthetic construct
  source 1..28: mol_type = other DNA
tttctgttcctgggttagtttgctaagg

SEQ ID NO: 18352 - DNA, 28 bp, synthetic construct
  source 1..28: mol_type = other DNA
catctgcacttggttttctgttcctggg

SEQ ID NO: 18353 - DNA, 28 bp, synthetic construct
  source 1..28: mol_type = other DNA
acatctgcacttggttttctgttcctgg

SEQ ID NO: 18354 - DNA, 28 bp, synthetic construct
  source 1..28: mol_type = other DNA
acttaaaagtgagaacatctgcacttgg

SEQ ID NO: 18355 - DNA, 28 bp, synthetic construct
  source 1..28: mol_type = other DNA
ctcacttttaagtgtgagctgaatgagg

SEQ ID NO: 18356 - DNA, 28 bp, synthetic construct
  source 1..28: mol_type = other DNA
gtgtgagctgaatgaggagaatacatgg

SEQ ID NO: 18357 - DNA, 28 bp, synthetic construct
  source 1..28: mol_type = other DNA
tgtgagctgaatgaggagaatacatggg

SEQ ID NO: 18358 - DNA, 28 bp, synthetic construct
  source 1..28: mol_type = other DNA
atgaggagaatacatgggcacatagagg

SEQ ID NO: 18359 - DNA, 28 bp, synthetic construct
  source 1..28: mol_type = other DNA
tgaggagaatacatgggcacatagaggg

SEQ ID NO: 18360 - DNA, 28 bp, synthetic construct
  source 1..28: mol_type = other DNA
gaggagaatacatgggcacatagagggg

SEQ ID NO: 18361 - DNA, 28 bp, synthetic construct
  source 1..28: mol_type = other DNA
atgggcacatagaggggcctatcagagg

SEQ ID NO: 18362 - DNA, 28 bp, synthetic construct
  source 1..28: mol_type = other DNA
tgggcacatagaggggcctatcagaggg

SEQ ID NO: 18363 - DNA, 28 bp, synthetic construct
  source 1..28: mol_type = other DNA
gcacatagaggggcctatcagagggtgg

SEQ ID NO: 18364 - DNA, 28 bp, synthetic construct
  source 1..28: mol_type = other DNA
catagaggggcctatcagagggtggagg

SEQ ID NO: 18365 - DNA, 28 bp, synthetic construct
  source 1..28: mol_type = other DNA
atagaggggcctatcagagggtggaggg

SEQ ID NO: 18366 - DNA, 28 bp, synthetic construct
  source 1..28: mol_type = other DNA
gaggggcctatcagagggtggagggtgg

SEQ ID NO: 18367 - DNA, 28 bp, synthetic construct
  source 1..28: mol_type = other DNA
aggggcctatcagagggtggagggtggg

SEQ ID NO: 18368 - DNA, 28 bp, synthetic construct
  source 1..28: mol_type = other DNA
cttctcccaccctccaccctctgatagg

SEQ ID NO: 18369 - DNA, 28 bp, synthetic construct
  source 1..28: mol_type = other DNA
ctatcagagggtggagggtgggagaagg

SEQ ID NO: 18370 - DNA, 28 bp, synthetic construct
  source 1..28: mol_type = other DNA
aaggaagagtatcagaaaaaataacagg

SEQ ID NO: 18371 - DNA, 28 bp, synthetic construct
  source 1..28: mol_type = other DNA
aaataacaggtagtagatttaataccgg

SEQ ID NO: 18372 - DNA, 28 bp, synthetic construct
  source 1..28: mol_type = other DNA
ttgttatacagattgttttgtcatccgg

SEQ ID NO: 18373 - DNA, 28 bp, synthetic construct
  source 1..28: mol_type = other DNA
ttatataggtaaactcatgtcatggggg

SEQ ID NO: 18374 - DNA, 28 bp, synthetic construct
  source 1..28: mol_type = other DNA
gttatataggtaaactcatgtcatgggg

SEQ ID NO: 18375 - DNA, 28 bp, synthetic construct
  source 1..28: mol_type = other DNA
tgttatataggtaaactcatgtcatggg

SEQ ID NO: 18376 - DNA, 28 bp, synthetic construct
  source 1..28: mol_type = other DNA
ttgttatataggtaaactcatgtcatgg

SEQ ID NO: 18377 - DNA, 28 bp, synthetic construct
  source 1..28: mol_type = other DNA
gagtacatgtgcgggtttgttatatagg

SEQ ID NO: 18378 - DNA, 28 bp, synthetic construct
  source 1..28: mol_type = other DNA
cttttaagttcaggagtacatgtgcggg

SEQ ID NO: 18379 - DNA, 28 bp, synthetic construct
  source 1..28: mol_type = other DNA
acttttaagttcaggagtacatgtgcgg

SEQ ID NO: 18380 - DNA, 28 bp, synthetic construct
  source 1..28: mol_type = other DNA
tttttttaatttaacttttaagttcagg

SEQ ID NO: 18381 - DNA, 28 bp, synthetic construct
  source 1..28: mol_type = other DNA
atattacagtattcttcatattcaatgg

SEQ ID NO: 18382 - DNA, 28 bp, synthetic construct
  source 1..28: mol_type = other DNA
tcatattcaatggcaatgtgtgaagtgg

SEQ ID NO: 18383 - DNA, 28 bp, synthetic construct
  source 1..28: mol_type = other DNA
catattcaatggcaatgtgtgaagtggg

SEQ ID NO: 18384 - DNA, 28 bp, synthetic construct
  source 1..28: mol_type = other DNA
aagtgggaagtgtcttgacagaattcgg

SEQ ID NO: 18385 - DNA, 28 bp, synthetic construct
  source 1..28: mol_type = other DNA
tgtcttgacagaattcggtgtttcaagg

SEQ ID NO: 18386 - DNA, 28 bp, synthetic construct
  source 1..28: mol_type = other DNA
acactttgatgcccaagactgcacaagg

SEQ ID NO: 18387 - DNA, 28 bp, synthetic construct
  source 1..28: mol_type = other DNA
agaaaatgtagccttgtgcagtcttggg

SEQ ID NO: 18388 - DNA, 28 bp, synthetic construct
  source 1..28: mol_type = other DNA
tagaaaatgtagccttgtgcagtcttgg

SEQ ID NO: 18389 - DNA, 28 bp, synthetic construct
  source 1..28: mol_type = other DNA
gactgcacaaggctacattttctactgg

SEQ ID NO: 18390 - DNA, 28 bp, synthetic construct
  source 1..28: mol_type = other DNA
ttgccttctttattgcagttacatatgg

SEQ ID NO: 18391 - DNA, 28 bp, synthetic construct
  source 1..28: mol_type = other DNA
tgccttctttattgcagttacatatggg

SEQ ID NO: 18392 - DNA, 28 bp, synthetic construct
  source 1..28: mol_type = other DNA
gccttctttattgcagttacatatgggg

SEQ ID NO: 18393 - DNA, 28 bp, synthetic construct
  source 1..28: mol_type = other DNA
gccccatatgtaactgcaataaagaagg

SEQ ID NO: 18394 - DNA, 28 bp, synthetic construct
  source 1..28: mol_type = other DNA
agttacatatggggctgatgactttagg

SEQ ID NO: 18395 - DNA, 28 bp, synthetic construct
  source 1..28: mol_type = other DNA
gttacatatggggctgatgactttaggg

SEQ ID NO: 18396 - DNA, 28 bp, synthetic construct
  source 1..28: mol_type = other DNA
agagaaagatttgggaattattgcatgg

SEQ ID NO: 18397 - DNA, 28 bp, synthetic construct
  source 1..28: mol_type = other DNA
gcatatacttacgagagaaagatttggg

SEQ ID NO: 18398 - DNA, 28 bp, synthetic construct
  source 1..28: mol_type = other DNA
ggcatatacttacgagagaaagatttgg

SEQ ID NO: 18399 - DNA, 28 bp, synthetic construct
  source 1..28: mol_type = other DNA
ctctcgtaagtatatgccttgcttctgg

SEQ ID NO: 18400 - DNA, 28 bp, synthetic construct
  source 1..28: mol_type = other DNA
ggcatgcttttgttttccagaagcaagg

SEQ ID NO: 18401 - DNA, 28 bp, synthetic construct
  source 1..28: mol_type = other DNA
acgatatttacatgataggagatgaagg

SEQ ID NO: 18402 - DNA, 28 bp, synthetic construct
  source 1..28: mol_type = other DNA
catgcacgtacgatatttacatgatagg

SEQ ID NO: 18403 - DNA, 28 bp, synthetic construct
  source 1..28: mol_type = other DNA
tttaatgtatctcgggggttgatgaagg

SEQ ID NO: 18404 - DNA, 28 bp, synthetic construct
  source 1..28: mol_type = other DNA
acagtgaatatttaatgtatctcggggg

SEQ ID NO: 18405 - DNA, 28 bp, synthetic construct
  source 1..28: mol_type = other DNA
aacagtgaatatttaatgtatctcgggg

SEQ ID NO: 18406 - DNA, 28 bp, synthetic construct
  source 1..28: mol_type = other DNA
gaacagtgaatatttaatgtatctcggg

SEQ ID NO: 18407 - DNA, 28 bp, synthetic construct
  source 1..28: mol_type = other DNA
agaacagtgaatatttaatgtatctcgg

SEQ ID NO: 18408 - DNA, 28 bp, synthetic construct
  source 1..28: mol_type = other DNA
cgttagacacctaccatatcatttttgg

SEQ ID NO: 18409 - DNA, 28 bp, synthetic construct
  source 1..28: mol_type = other DNA
gttagacacctaccatatcatttttggg

SEQ ID NO: 18410 - DNA, 28 bp, synthetic construct
  source 1..28: mol_type = other DNA
tataaatacccaaaaatgatatggtagg

SEQ ID NO: 18411 - DNA, 28 bp, synthetic construct
  source 1..28: mol_type = other DNA
atggtataaatacccaaaaatgatatgg

SEQ ID NO: 18412 - DNA, 28 bp, synthetic construct
  source 1..28: mol_type = other DNA
atttataccataaagtgcaaaacgaagg

SEQ ID NO: 18413 - DNA, 28 bp, synthetic construct
  source 1..28: mol_type = other DNA
accataaagtgcaaaacgaaggtctagg

SEQ ID NO: 18414 - DNA, 28 bp, synthetic construct
  source 1..28: mol_type = other DNA
gcctagaccttcgttttgcactttatgg

SEQ ID NO: 18415 - DNA, 28 bp, synthetic construct
  source 1..28: mol_type = other DNA
caaaacgaaggtctaggcagttgtgcgg

SEQ ID NO: 18416 - DNA, 28 bp, synthetic construct
  source 1..28: mol_type = other DNA
aggtctaggcagttgtgcggtgtcctgg

SEQ ID NO: 18417 - DNA, 28 bp, synthetic construct
  source 1..28: mol_type = other DNA
ggtctaggcagttgtgcggtgtcctggg

SEQ ID NO: 18418 - DNA, 28 bp, synthetic construct
  source 1..28: mol_type = other DNA
gcagttgtgcggtgtcctgggagcatgg

SEQ ID NO: 18419 - DNA, 28 bp, synthetic construct
  source 1..28: mol_type = other DNA
gtgcggtgtcctgggagcatggcagtgg

SEQ ID NO: 18420 - DNA, 28 bp, synthetic construct
  source 1..28: mol_type = other DNA
actgttactccactgccatgctcccagg

SEQ ID NO: 18421 - DNA, 28 bp, synthetic construct
  source 1..28: mol_type = other DNA
ggagcatggcagtggagtaacagtaagg

SEQ ID NO: 18422 - DNA, 28 bp, synthetic construct
  source 1..28: mol_type = other DNA
gagcatggcagtggagtaacagtaaggg

SEQ ID NO: 18423 - DNA, 28 bp, synthetic construct
  source 1..28: mol_type = other DNA
atggcagtggagtaacagtaagggttgg

SEQ ID NO: 18424 - DNA, 28 bp, synthetic construct
  source 1..28: mol_type = other DNA
agggttggagtcacagtagcactgatgg

SEQ ID NO: 18425 - DNA, 28 bp, synthetic construct
  source 1..28: mol_type = other DNA
gggttggagtcacagtagcactgatggg

SEQ ID NO: 18426 - DNA, 28 bp, synthetic construct
  source 1..28: mol_type = other DNA
gggattgttacttcgcagatgctgctgg

SEQ ID NO: 18427 - DNA, 28 bp, synthetic construct
  source 1..28: mol_type = other DNA
cctgtaatcctttttattgagtgtgagg

SEQ ID NO: 18428 - DNA, 28 bp, synthetic construct
  source 1..28: mol_type = other DNA
cattttatcctcacactcaataaaaagg

SEQ ID NO: 18429 - DNA, 28 bp, synthetic construct
  source 1..28: mol_type = other DNA
ctttttattgagtgtgaggataaaatgg

SEQ ID NO: 18430 - DNA, 28 bp, synthetic construct
  source 1..28: mol_type = other DNA
agttctttgttggtgacagaaaatatgg

SEQ ID NO: 18431 - DNA, 28 bp, synthetic construct
  source 1..28: mol_type = other DNA
tctgtcaccaacaaagaactgaacatgg

SEQ ID NO: 18432 - DNA, 28 bp, synthetic construct
  source 1..28: mol_type = other DNA
cttgaaaccatgttcagttctttgttgg

SEQ ID NO: 18433 - DNA, 28 bp, synthetic construct
  source 1..28: mol_type = other DNA
tttcaagataatttttacaattttgtgg

SEQ ID NO: 18434 - DNA, 28 bp, synthetic construct
  source 1..28: mol_type = other DNA
ttcaagataatttttacaattttgtggg

SEQ ID NO: 18435 - DNA, 28 bp, synthetic construct
  source 1..28: mol_type = other DNA
gataatttttacaattttgtgggacagg

SEQ ID NO: 18436 - DNA, 28 bp, synthetic construct
  source 1..28: mol_type = other DNA
ttttacaattttgtgggacaggagaagg

SEQ ID NO: 18437 - DNA, 28 bp, synthetic construct
  source 1..28: mol_type = other DNA
gagaaggagatatgctcttcatctgtgg

SEQ ID NO: 18438 - DNA, 28 bp, synthetic construct
  source 1..28: mol_type = other DNA
gagatatgctcttcatctgtggttctgg

SEQ ID NO: 18439 - DNA, 28 bp, synthetic construct
  source 1..28: mol_type = other DNA
ttcagaactgagaagagaaaattgcagg

SEQ ID NO: 18440 - DNA, 28 bp, synthetic construct
  source 1..28: mol_type = other DNA
tgagaagagaaaattgcaggcctccagg

SEQ ID NO: 18441 - DNA, 28 bp, synthetic construct
  source 1..28: mol_type = other DNA
tgcaggcctccaggccgttattctgtgg

SEQ ID NO: 18442 - DNA, 28 bp, synthetic construct
  source 1..28: mol_type = other DNA
gatgcaccacagaataacggcctggagg

SEQ ID NO: 18443 - DNA, 28 bp, synthetic construct
  source 1..28: mol_type = other DNA
agcgatgcaccacagaataacggcctgg

SEQ ID NO: 18444 - DNA, 28 bp, synthetic construct
  source 1..28: mol_type = other DNA
ccgttattctgtggtgcatcgctgctgg

SEQ ID NO: 18445 - DNA, 28 bp, synthetic construct
  source 1..28: mol_type = other DNA
ctggagccaacgtactgttcctgcttgg

SEQ ID NO: 18446 - DNA, 28 bp, synthetic construct
  source 1..28: mol_type = other DNA
cgggcaccaagcaggaacagtacgttgg

SEQ ID NO: 18447 - DNA, 28 bp, synthetic construct
  source 1..28: mol_type = other DNA
cgtactgttcctgcttggtgcccgcagg

SEQ ID NO: 18448 - DNA, 28 bp, synthetic construct
  source 1..28: mol_type = other DNA
agagaaggtcctgcgggcaccaagcagg

SEQ ID NO: 18449 - DNA, 28 bp, synthetic construct
  source 1..28: mol_type = other DNA
cagctcagatcagagaaggtcctgcggg

SEQ ID NO: 18450 - DNA, 28 bp, synthetic construct
  source 1..28: mol_type = other DNA
acagctcagatcagagaaggtcctgcgg

SEQ ID NO: 18451 - DNA, 28 bp, synthetic construct
  source 1..28: mol_type = other DNA
ttggtttaacagctcagatcagagaagg

SEQ ID NO: 18452 - DNA, 28 bp, synthetic construct
  source 1..28: mol_type = other DNA
gaaaaatgaaattcacatctgtttttgg

SEQ ID NO: 18453 - DNA, 28 bp, synthetic construct
  source 1..28: mol_type = other DNA
tgagctgataaatgataaatatatttgg

SEQ ID NO: 18454 - DNA, 28 bp, synthetic construct
  source 1..28: mol_type = other DNA
gagctgataaatgataaatatatttggg

SEQ ID NO: 18455 - DNA, 28 bp, synthetic construct
  source 1..28: mol_type = other DNA
ctctgttctttaaagtactcatttgagg

SEQ ID NO: 18456 - DNA, 28 bp, synthetic construct
  source 1..28: mol_type = other DNA
agccatacaagttgataatccccttagg

SEQ ID NO: 18457 - DNA, 28 bp, synthetic construct
  source 1..28: mol_type = other DNA
gtcctaaggggattatcaacttgtatgg

SEQ ID NO: 18458 - DNA, 28 bp, synthetic construct
  source 1..28: mol_type = other DNA
aggatttactaatacaggtcctaagggg

SEQ ID NO: 18459 - DNA, 28 bp, synthetic construct
  source 1..28: mol_type = other DNA
gaggatttactaatacaggtcctaaggg

SEQ ID NO: 18460 - DNA, 28 bp, synthetic construct
  source 1..28: mol_type = other DNA
agaggatttactaatacaggtcctaagg

SEQ ID NO: 18461 - DNA, 28 bp, synthetic construct
  source 1..28: mol_type = other DNA
atagtattagaggatttactaatacagg

SEQ ID NO: 18462 - DNA, 28 bp, synthetic construct
  source 1..28: mol_type = other DNA
ttctgatgttgctttatagtattagagg

SEQ ID NO: 18463 - DNA, 28 bp, synthetic construct
  source 1..28: mol_type = other DNA
atactataaagcaacatcagaaaacagg

SEQ ID NO: 18464 - DNA, 28 bp, synthetic construct
  source 1..28: mol_type = other DNA
ttaacactgtgacaattataattatagg

SEQ ID NO: 18465 - DNA, 28 bp, synthetic construct
  source 1..28: mol_type = other DNA
aacagtgccagtaacagttaaagacagg

SEQ ID NO: 18466 - DNA, 28 bp, synthetic construct
  source 1..28: mol_type = other DNA
tcagacacctgtctttaactgttactgg

SEQ ID NO: 18467 - DNA, 28 bp, synthetic construct
  source 1..28: mol_type = other DNA
agttaaagacaggtgtctgacatcctgg

SEQ ID NO: 18468 - DNA, 28 bp, synthetic construct
  source 1..28: mol_type = other DNA
gacatcctggttatcaaaaactatctgg

SEQ ID NO: 18469 - DNA, 28 bp, synthetic construct
  source 1..28: mol_type = other DNA
agacaccagatagtttttgataaccagg

SEQ ID NO: 18470 - DNA, 28 bp, synthetic construct
  source 1..28: mol_type = other DNA
gttatcaaaaactatctggtgtctaagg

SEQ ID NO: 18471 - DNA, 28 bp, synthetic construct
  source 1..28: mol_type = other DNA
acatctttttgctcacaaactagattgg

SEQ ID NO: 18472 - DNA, 28 bp, synthetic construct
  source 1..28: mol_type = other DNA
aaagatttctgtaacttctataggctgg

SEQ ID NO: 18473 - DNA, 28 bp, synthetic construct
  source 1..28: mol_type = other DNA
aaagaaagatttctgtaacttctatagg

SEQ ID NO: 18474 - DNA, 28 bp, synthetic construct
  source 1..28: mol_type = other DNA
agctattgctttaaagtggaatcaaagg

SEQ ID NO: 18475 - DNA, 28 bp, synthetic construct
  source 1..28: mol_type = other DNA
taggtatcaagctattgctttaaagtgg

SEQ ID NO: 18476 - DNA, 28 bp, synthetic construct
  source 1..28: mol_type = other DNA
tacatacatatacatctcaaaaagtagg

SEQ ID NO: 18477 - DNA, 28 bp, synthetic construct
  source 1..28: mol_type = other DNA
gcttatatgaacatataaaacattatgg

SEQ ID NO: 18478 - DNA, 28 bp, synthetic construct
  source 1..28: mol_type = other DNA
atgaacatataaaacattatggtattgg

SEQ ID NO: 18479 - DNA, 28 bp, synthetic construct
  source 1..28: mol_type = other DNA
ctcagacttcacagaaacatgttttagg

SEQ ID NO: 18480 - DNA, 28 bp, synthetic construct
  source 1..28: mol_type = other DNA
ctaaaacatgtttctgtgaagtctgagg

SEQ ID NO: 18481 - DNA, 28 bp, synthetic construct
  source 1..28: mol_type = other DNA
aacatgtttctgtgaagtctgaggaagg

SEQ ID NO: 18482 - DNA, 28 bp, synthetic construct
  source 1..28: mol_type = other DNA
gaagggtctgcttcaacatatgctctgg

SEQ ID NO: 18483 - DNA, 28 bp, synthetic construct
  source 1..28: mol_type = other DNA
cttacagactgaaggcttcactgaaggg

SEQ ID NO: 18484 - DNA, 28 bp, synthetic construct
  source 1..28: mol_type = other DNA
tcttacagactgaaggcttcactgaagg

SEQ ID NO: 18485 - DNA, 28 bp, synthetic construct
  source 1..28: mol_type = other DNA
acatgcagcgattcttacagactgaagg

SEQ ID NO: 18486 - DNA, 28 bp, synthetic construct
  source 1..28: mol_type = other DNA
ttttataaaagagatgatatacacttgg

SEQ ID NO: 18487 - DNA, 28 bp, synthetic construct
  source 1..28: mol_type = other DNA
ctttctctcccactctccccagtgttgg

SEQ ID NO: 18488 - DNA, 28 bp, synthetic construct
  source 1..28: mol_type = other DNA
tcacaattccaacactggggagagtggg

SEQ ID NO: 18489 - DNA, 28 bp, synthetic construct
  source 1..28: mol_type = other DNA
gtcacaattccaacactggggagagtgg

SEQ ID NO: 18490 - DNA, 28 bp, synthetic construct
  source 1..28: mol_type = other DNA
gaagatagtcacaattccaacactgggg

SEQ ID NO: 18491 - DNA, 28 bp, synthetic construct
  source 1..28: mol_type = other DNA
agaagatagtcacaattccaacactggg

SEQ ID NO: 18492 - DNA, 28 bp, synthetic construct
  source 1..28: mol_type = other DNA
gagaagatagtcacaattccaacactgg

SEQ ID NO: 18493 - DNA, 28 bp, synthetic construct
  source 1..28: mol_type = other DNA
aattgtgactatcttctcacacaagcgg

SEQ ID NO: 18494 - DNA, 28 bp, synthetic construct
  source 1..28: mol_type = other DNA
ctatcttctcacacaagcggctacttgg

SEQ ID NO: 18495 - DNA, 28 bp, synthetic construct
  source 1..28: mol_type = other DNA
agtttggttgctgttttgcgggggaagg

SEQ ID NO: 18496 - DNA, 28 bp, synthetic construct
  source 1..28: mol_type = other DNA
gaacagtttggttgctgttttgcggggg

SEQ ID NO: 18497 - DNA, 28 bp, synthetic construct
  source 1..28: mol_type = other DNA
agaacagtttggttgctgttttgcgggg

SEQ ID NO: 18498 - DNA, 28 bp, synthetic construct
  source 1..28: mol_type = other DNA
cagaacagtttggttgctgttttgcggg

SEQ ID NO: 18499 - DNA, 28 bp, synthetic construct
  source 1..28: mol_type = other DNA
ccgcaaaacagcaaccaaactgttctgg

SEQ ID NO: 18500 - DNA, 28 bp, synthetic construct
  source 1..28: mol_type = other DNA
cgcaaaacagcaaccaaactgttctggg

SEQ ID NO: 18501 - DNA, 28 bp, synthetic construct
  source 1..28: mol_type = other DNA
gtggtgatattggcccagaacagtttgg

SEQ ID NO: 18502 - DNA, 28 bp, synthetic construct
  source 1..28: mol_type = other DNA
gttctgggccaatatcaccaccttgtgg

SEQ ID NO: 18503 - DNA, 28 bp, synthetic construct
  source 1..28: mol_type = other DNA
catcatgaccacaaggtggtgatattgg

SEQ ID NO: 18504 - DNA, 28 bp, synthetic construct
  source 1..28: mol_type = other DNA
gcaattcttcatcatgaccacaaggtgg

SEQ ID NO: 18505 - DNA, 28 bp, synthetic construct
  source 1..28: mol_type = other DNA
ggggcaattcttcatcatgaccacaagg

SEQ ID NO: 18506 - DNA, 28 bp, synthetic construct
  source 1..28: mol_type = other DNA
agaaaagaggtgttgagggcaaaggggg

SEQ ID NO: 18507 - DNA, 28 bp, synthetic construct
  source 1..28: mol_type = other DNA
aagaaaagaggtgttgagggcaaagggg

SEQ ID NO: 18508 - DNA, 28 bp, synthetic construct
  source 1..28: mol_type = other DNA
gaagaaaagaggtgttgagggcaaaggg

SEQ ID NO: 18509 - DNA, 28 bp, synthetic construct
  source 1..28: mol_type = other DNA
agaagaaaagaggtgttgagggcaaagg

SEQ ID NO: 18510 - DNA, 28 bp, synthetic construct
  source 1..28: mol_type = other DNA
ttttcaagaagaaaagaggtgttgaggg

SEQ ID NO: 18511 - DNA, 28 bp, synthetic construct
  source 1..28: mol_type = other DNA
attttcaagaagaaaagaggtgttgagg

SEQ ID NO: 18512 - DNA, 28 bp, synthetic construct
  source 1..28: mol_type = other DNA
tgtttttaattttcaagaagaaaagagg

SEQ ID NO: 18513 - DNA, 28 bp, synthetic construct
  source 1..28: mol_type = other DNA
ataaggacagtagagggggtgaaagggg

SEQ ID NO: 18514 - DNA, 28 bp, synthetic construct
  source 1..28: mol_type = other DNA
aataaggacagtagagggggtgaaaggg

SEQ ID NO: 18515 - DNA, 28 bp, synthetic construct
  source 1..28: mol_type = other DNA
gaataaggacagtagagggggtgaaagg

SEQ ID NO: 18516 - DNA, 28 bp, synthetic construct
  source 1..28: mol_type = other DNA
caaactggaataaggacagtagaggggg

SEQ ID NO: 18517 - DNA, 28 bp, synthetic construct
  source 1..28: mol_type = other DNA
acaaactggaataaggacagtagagggg

SEQ ID NO: 18518 - DNA, 28 bp, synthetic construct
  source 1..28: mol_type = other DNA
cacaaactggaataaggacagtagaggg

SEQ ID NO: 18519 - DNA, 28 bp, synthetic construct
  source 1..28: mol_type = other DNA
acacaaactggaataaggacagtagagg

SEQ ID NO: 18520 - DNA, 28 bp, synthetic construct
  source 1..28: mol_type = other DNA
gcaactacggacacaaactggaataagg

SEQ ID NO: 18521 - DNA, 28 bp, synthetic construct
  source 1..28: mol_type = other DNA
tattccagtttgtgtccgtagttgctgg

SEQ ID NO: 18522 - DNA, 28 bp, synthetic construct
  source 1..28: mol_type = other DNA
tccagtttgtgtccgtagttgctggagg

SEQ ID NO: 18523 - DNA, 28 bp, synthetic construct
  source 1..28: mol_type = other DNA
tcctccagcaactacggacacaaactgg

SEQ ID NO: 18524 - DNA, 28 bp, synthetic construct
  source 1..28: mol_type = other DNA
ggcattttctttcctccagcaactacgg

SEQ ID NO: 18525 - DNA, 28 bp, synthetic construct
  source 1..28: mol_type = other DNA
taaagagaataaaaaaaagagcaatagg

SEQ ID NO: 18526 - DNA, 28 bp, synthetic construct
  source 1..28: mol_type = other DNA
gaatgaagtcagggagagaaaagaaagg

SEQ ID NO: 18527 - DNA, 28 bp, synthetic construct
  source 1..28: mol_type = other DNA
ctctccctgacttcattccatttaaagg

SEQ ID NO: 18528 - DNA, 28 bp, synthetic construct
  source 1..28: mol_type = other DNA
aaggcctttaaatggaatgaagtcaggg

SEQ ID NO: 18529 - DNA, 28 bp, synthetic construct
  source 1..28: mol_type = other DNA
taaggcctttaaatggaatgaagtcagg

SEQ ID NO: 18530 - DNA, 28 bp, synthetic construct
  source 1..28: mol_type = other DNA
ttatttgcaatttaaggcctttaaatgg

SEQ ID NO: 18531 - DNA, 28 bp, synthetic construct
  source 1..28: mol_type = other DNA
tacttttttcgttatttgcaatttaagg

SEQ ID NO: 18532 - DNA, 28 bp, synthetic construct
  source 1..28: mol_type = other DNA
atcacggtaattaaatgaaaatttgagg

SEQ ID NO: 18533 - DNA, 28 bp, synthetic construct
  source 1..28: mol_type = other DNA
aatatttaagatatatcttgaatcacgg

SEQ ID NO: 18534 - DNA, 28 bp, synthetic construct
  source 1..28: mol_type = other DNA
actagcaagtaaaaatcaaatgaaatgg

SEQ ID NO: 18535 - DNA, 28 bp, synthetic construct
  source 1..28: mol_type = other DNA
tggtacagaaatattcttgcaacactgg

SEQ ID NO: 18536 - DNA, 28 bp, synthetic construct
  source 1..28: mol_type = other DNA
aatgctcaatattttacttgaaaaatgg

SEQ ID NO: 18537 - DNA, 28 bp, synthetic construct
  source 1..28: mol_type = other DNA
aaatattgagcatttcaagcttacatgg

SEQ ID NO: 18538 - DNA, 28 bp, synthetic construct
  source 1..28: mol_type = other DNA
gaagtagtcactctagtgtgagtttagg

SEQ ID NO: 18539 - DNA, 28 bp, synthetic construct
  source 1..28: mol_type = other DNA
taaactcacactagagtgactacttcgg

SEQ ID NO: 18540 - DNA, 28 bp, synthetic construct
  source 1..28: mol_type = other DNA
tgactacttcggactatcttttcaatgg

SEQ ID NO: 18541 - DNA, 28 bp, synthetic construct
  source 1..28: mol_type = other DNA
catatttactgaaaaagtaaatgtttgg

SEQ ID NO: 18542 - DNA, 28 bp, synthetic construct
  source 1..28: mol_type = other DNA
gtaaatatgaagacacattctaaaaagg

SEQ ID NO: 18543 - DNA, 28 bp, synthetic construct
  source 1..28: mol_type = other DNA
tatgaagacacattctaaaaaggaaagg

SEQ ID NO: 18544 - DNA, 28 bp, synthetic construct
  source 1..28: mol_type = other DNA
atgaagacacattctaaaaaggaaaggg

SEQ ID NO: 18545 - DNA, 28 bp, synthetic construct
  source 1..28: mol_type = other DNA
ttctaaaaaggaaagggaaatgaagagg

SEQ ID NO: 18546 - DNA, 28 bp, synthetic construct
  source 1..28: mol_type = other DNA
gaaatgaagaggaagcttaattcattgg

SEQ ID NO: 18547 - DNA, 28 bp, synthetic construct
  source 1..28: mol_type = other DNA
gaagaggaagcttaattcattggtcagg

SEQ ID NO: 18548 - DNA, 28 bp, synthetic construct
  source 1..28: mol_type = other DNA
gaggaagcttaattcattggtcaggtgg

SEQ ID NO: 18549 - DNA, 28 bp, synthetic construct
  source 1..28: mol_type = other DNA
aggaagcttaattcattggtcaggtggg

SEQ ID NO: 18550 - DNA, 28 bp, synthetic construct
  source 1..28: mol_type = other DNA
ggaagcttaattcattggtcaggtgggg

SEQ ID NO: 18551 - DNA, 28 bp, synthetic construct
  source 1..28: mol_type = other DNA
tactggctgaaagaaacaatacaggagg

SEQ ID NO: 18552 - DNA, 28 bp, synthetic construct
  source 1..28: mol_type = other DNA
cattactggctgaaagaaacaatacagg

SEQ ID NO: 18553 - DNA, 28 bp, synthetic construct
  source 1..28: mol_type = other DNA
ctctgagtctctactttaacattactgg

SEQ ID NO: 18554 - DNA, 28 bp, synthetic construct
  source 1..28: mol_type = other DNA
tagagactcagagtgatgaagagaatgg

SEQ ID NO: 18555 - DNA, 28 bp, synthetic construct
  source 1..28: mol_type = other DNA
agagactcagagtgatgaagagaatggg

SEQ ID NO: 18556 - DNA, 28 bp, synthetic construct
  source 1..28: mol_type = other DNA
agaatgggcgtgcctgtgaaatgaatgg

SEQ ID NO: 18557 - DNA, 28 bp, synthetic construct
  source 1..28: mol_type = other DNA
gaatgggcgtgcctgtgaaatgaatggg

SEQ ID NO: 18558 - DNA, 28 bp, synthetic construct
  source 1..28: mol_type = other DNA
aatgggcgtgcctgtgaaatgaatgggg

SEQ ID NO: 18559 - DNA, 28 bp, synthetic construct
  source 1..28: mol_type = other DNA
gcacattcttccccattcatttcacagg

SEQ ID NO: 18560 - DNA, 28 bp, synthetic construct
  source 1..28: mol_type = other DNA
tgtgaaatgaatggggaagaatgtgcgg

SEQ ID NO: 18561 - DNA, 28 bp, synthetic construct
  source 1..28: mol_type = other DNA
gaaatgaatggggaagaatgtgcggagg

SEQ ID NO: 18562 - DNA, 28 bp, synthetic construct
  source 1..28: mol_type = other DNA
gaggatttacgaatgcttgatgcctcgg

SEQ ID NO: 18563 - DNA, 28 bp, synthetic construct
  source 1..28: mol_type = other DNA
aggatttacgaatgcttgatgcctcggg

SEQ ID NO: 18564 - DNA, 28 bp, synthetic construct
  source 1..28: mol_type = other DNA
ttgatgcctcgggagagaaaatgaatgg

SEQ ID NO: 18565 - DNA, 28 bp, synthetic construct
  source 1..28: mol_type = other DNA
tgggagccattcattttctctcccgagg

SEQ ID NO: 18566 - DNA, 28 bp, synthetic construct
  source 1..28: mol_type = other DNA
gggagagaaaatgaatggctcccacagg

SEQ ID NO: 18567 - DNA, 28 bp, synthetic construct
  source 1..28: mol_type = other DNA
ggagagaaaatgaatggctcccacaggg

SEQ ID NO: 18568 - DNA, 28 bp, synthetic construct
  source 1..28: mol_type = other DNA
aaatgaatggctcccacagggaccaagg

SEQ ID NO: 18569 - DNA, 28 bp, synthetic construct
  source 1..28: mol_type = other DNA
ggctcccacagggaccaaggcagctcgg

SEQ ID NO: 18570 - DNA, 28 bp, synthetic construct
  source 1..28: mol_type = other DNA
aaagccgagctgccttggtccctgtggg

SEQ ID NO: 18571 - DNA, 28 bp, synthetic construct
  source 1..28: mol_type = other DNA
caaagccgagctgccttggtccctgtgg

SEQ ID NO: 18572 - DNA, 28 bp, synthetic construct
  source 1..28: mol_type = other DNA
agggaccaaggcagctcggctttgtcgg

SEQ ID NO: 18573 - DNA, 28 bp, synthetic construct
  source 1..28: mol_type = other DNA
gggaccaaggcagctcggctttgtcggg

SEQ ID NO: 18574 - DNA, 28 bp, synthetic construct
  source 1..28: mol_type = other DNA
aactcccgacaaagccgagctgccttgg

SEQ ID NO: 18575 - DNA, 28 bp, synthetic construct
  source 1..28: mol_type = other DNA
aaggcagctcggctttgtcgggagttgg

SEQ ID NO: 18576 - DNA, 28 bp, synthetic construct
  source 1..28: mol_type = other DNA
gcagctcggctttgtcgggagttggagg

SEQ ID NO: 18577 - DNA, 28 bp, synthetic construct
  source 1..28: mol_type = other DNA
gagttggaggcattcgacttcctaacgg

SEQ ID NO: 18578 - DNA, 28 bp, synthetic construct
  source 1..28: mol_type = other DNA
agatatcacactttagttttccgttagg

SEQ ID NO: 18579 - DNA, 28 bp, synthetic construct
  source 1..28: mol_type = other DNA
acggaaaactaaagtgtgatatctgtgg

SEQ ID NO: 18580 - DNA, 28 bp, synthetic construct
  source 1..28: mol_type = other DNA
cggaaaactaaagtgtgatatctgtggg

SEQ ID NO: 18581 - DNA, 28 bp, synthetic construct
  source 1..28: mol_type = other DNA
gtgatatctgtgggatcatttgcatcgg

SEQ ID NO: 18582 - DNA, 28 bp, synthetic construct
  source 1..28: mol_type = other DNA
tgatatctgtgggatcatttgcatcggg

SEQ ID NO: 18583 - DNA, 28 bp, synthetic construct
  source 1..28: mol_type = other DNA
atttgcatcgggcccaatgtgctcatgg

SEQ ID NO: 18584 - DNA, 28 bp, synthetic construct
  source 1..28: mol_type = other DNA
ttcttttgtgaaccatgagcacattggg

SEQ ID NO: 18585 - DNA, 28 bp, synthetic construct
  source 1..28: mol_type = other DNA
cttcttttgtgaaccatgagcacattgg

SEQ ID NO: 18586 - DNA, 28 bp, synthetic construct
  source 1..28: mol_type = other DNA
tcatggttcacaaaagaagccacactgg

SEQ ID NO: 18587 - DNA, 28 bp, synthetic construct
  source 1..28: mol_type = other DNA
gttcacaaaagaagccacactggtaagg

SEQ ID NO: 18588 - DNA, 28 bp, synthetic construct
  source 1..28: mol_type = other DNA
caaaagaagccacactggtaaggcctgg

SEQ ID NO: 18589 - DNA, 28 bp, synthetic construct
  source 1..28: mol_type = other DNA
aaaactgagccaggccttaccagtgtgg

SEQ ID NO: 18590 - DNA, 28 bp, synthetic construct
  source 1..28: mol_type = other DNA
tcaccagctctcctctctccgtcccagg

SEQ ID NO: 18591 - DNA, 28 bp, synthetic construct
  source 1..28: mol_type = other DNA
tctcctgggacggagagaggagagctgg

SEQ ID NO: 18592 - DNA, 28 bp, synthetic construct
  source 1..28: mol_type = other DNA
ctctcctctctccgtcccaggagaacgg

SEQ ID NO: 18593 - DNA, 28 bp, synthetic construct
  source 1..28: mol_type = other DNA
agggccgttctcctgggacggagagagg

SEQ ID NO: 18594 - DNA, 28 bp, synthetic construct
  source 1..28: mol_type = other DNA
cactggaagggccgttctcctgggacgg

SEQ ID NO: 18595 - DNA, 28 bp, synthetic construct
  source 1..28: mol_type = other DNA
attgcactggaagggccgttctcctggg

SEQ ID NO: 18596 - DNA, 28 bp, synthetic construct
  source 1..28: mol_type = other DNA
gattgcactggaagggccgttctcctgg

SEQ ID NO: 18597 - DNA, 28 bp, synthetic construct
  source 1..28: mol_type = other DNA
aacggcccttccagtgcaatcagtgcgg

SEQ ID NO: 18598 - DNA, 28 bp, synthetic construct
  source 1..28: mol_type = other DNA
acggcccttccagtgcaatcagtgcggg

SEQ ID NO: 18599 - DNA, 28 bp, synthetic construct
  source 1..28: mol_type = other DNA
cggcccttccagtgcaatcagtgcgggg

SEQ ID NO: 18600 - DNA, 28 bp, synthetic construct
  source 1..28: mol_type = other DNA
aggccccgcactgattgcactggaaggg

SEQ ID NO: 18601 - DNA, 28 bp, synthetic construct
  source 1..28: mol_type = other DNA
gaggccccgcactgattgcactggaagg

SEQ ID NO: 18602 - DNA, 28 bp, synthetic construct
  source 1..28: mol_type = other DNA
gaatgaggccccgcactgattgcactgg

SEQ ID NO: 18603 - DNA, 28 bp, synthetic construct
  source 1..28: mol_type = other DNA
cagtgcggggcctcattcacccagaagg

SEQ ID NO: 18604 - DNA, 28 bp, synthetic construct
  source 1..28: mol_type = other DNA
agtgcggggcctcattcacccagaaggg

SEQ ID NO: 18605 - DNA, 28 bp, synthetic construct
  source 1..28: mol_type = other DNA
agcaggttgcccttctgggtgaatgagg

SEQ ID NO: 18606 - DNA, 28 bp, synthetic construct
  source 1..28: mol_type = other DNA
attcacccagaagggcaacctgctccgg

SEQ ID NO: 18607 - DNA, 28 bp, synthetic construct
  source 1..28: mol_type = other DNA
atgtgccggagcaggttgcccttctggg

SEQ ID NO: 18608 - DNA, 28 bp, synthetic construct
  source 1..28: mol_type = other DNA
gatgtgccggagcaggttgcccttctgg

SEQ ID NO: 18609 - DNA, 28 bp, synthetic construct
  source 1..28: mol_type = other DNA
ggaatgcagcttgatgtgccggagcagg

SEQ ID NO: 18610 - DNA, 28 bp, synthetic construct
  source 1..28: mol_type = other DNA
tgctccggcacatcaagctgcattccgg

SEQ ID NO: 18611 - DNA, 28 bp, synthetic construct
  source 1..28: mol_type = other DNA
gctccggcacatcaagctgcattccggg

SEQ ID NO: 18612 - DNA, 28 bp, synthetic construct
  source 1..28: mol_type = other DNA
ctccggcacatcaagctgcattccgggg

SEQ ID NO: 18613 - DNA, 28 bp, synthetic construct
  source 1..28: mol_type = other DNA
ctccccggaatgcagcttgatgtgccgg

SEQ ID NO: 18614 - DNA, 28 bp, synthetic construct
  source 1..28: mol_type = other DNA
aggtggcatttgaagggcttctccccgg

SEQ ID NO: 18615 - DNA, 28 bp, synthetic construct
  source 1..28: mol_type = other DNA
cgtagttgcagaggtggcatttgaaggg

SEQ ID NO: 18616 - DNA, 28 bp, synthetic construct
  source 1..28: mol_type = other DNA
gcgtagttgcagaggtggcatttgaagg

SEQ ID NO: 18617 - DNA, 28 bp, synthetic construct
  source 1..28: mol_type = other DNA
ccacctctgcaactacgcctgccgccgg

SEQ ID NO: 18618 - DNA, 28 bp, synthetic construct
  source 1..28: mol_type = other DNA
cctctgcaactacgcctgccgccggagg

SEQ ID NO: 18619 - DNA, 28 bp, synthetic construct
  source 1..28: mol_type = other DNA
ctctgcaactacgcctgccgccggaggg

SEQ ID NO: 18620 - DNA, 28 bp, synthetic construct
  source 1..28: mol_type = other DNA
cctgccgccggagggacgccctcactgg

SEQ ID NO: 18621 - DNA, 28 bp, synthetic construct
  source 1..28: mol_type = other DNA
gtggccagtgagggcgtccctccggcgg

SEQ ID NO: 18622 - DNA, 28 bp, synthetic construct
  source 1..28: mol_type = other DNA
caggtggccagtgagggcgtccctccgg

SEQ ID NO: 18623 - DNA, 28 bp, synthetic construct
  source 1..28: mol_type = other DNA
gagggacgccctcactggccacctgagg

SEQ ID NO: 18624 - DNA, 28 bp, synthetic construct
  source 1..28: mol_type = other DNA
gagtgcgtcctcaggtggccagtgaggg

SEQ ID NO: 18625 - DNA, 28 bp, synthetic construct
  source 1..28: mol_type = other DNA
ggagtgcgtcctcaggtggccagtgagg

SEQ ID NO: 18626 - DNA, 28 bp, synthetic construct
  source 1..28: mol_type = other DNA
tcactggccacctgaggacgcactccgg

SEQ ID NO: 18627 - DNA, 28 bp, synthetic construct
  source 1..28: mol_type = other DNA
tggccacctgaggacgcactccggtagg

SEQ ID NO: 18628 - DNA, 28 bp, synthetic construct
  source 1..28: mol_type = other DNA
ggacctaccggagtgcgtcctcaggtgg

SEQ ID NO: 18629 - DNA, 28 bp, synthetic construct
  source 1..28: mol_type = other DNA
aggggacctaccggagtgcgtcctcagg

SEQ ID NO: 18630 - DNA, 28 bp, synthetic construct
  source 1..28: mol_type = other DNA
tgaggacgcactccggtaggtcccctgg

SEQ ID NO: 18631 - DNA, 28 bp, synthetic construct
  source 1..28: mol_type = other DNA
tccggtaggtcccctggatgcagtccgg

SEQ ID NO: 18632 - DNA, 28 bp, synthetic construct
  source 1..28: mol_type = other DNA
ccggtaggtcccctggatgcagtccggg

SEQ ID NO: 18633 - DNA, 28 bp, synthetic construct
  source 1..28: mol_type = other DNA
cggtaggtcccctggatgcagtccgggg

SEQ ID NO: 18634 - DNA, 28 bp, synthetic construct
  source 1..28: mol_type = other DNA
tgaactcaattgtgttttctgcagttgg

SEQ ID NO: 18635 - DNA, 28 bp, synthetic construct
  source 1..28: mol_type = other DNA
ctgcagttggtaaacctcacaaatgtgg

SEQ ID NO: 18636 - DNA, 28 bp, synthetic construct
  source 1..28: mol_type = other DNA
gtaaacctcacaaatgtggatattgtgg

SEQ ID NO: 18637 - DNA, 28 bp, synthetic construct
  source 1..28: mol_type = other DNA
ttcggccacaatatccacatttgtgagg

SEQ ID NO: 18638 - DNA, 28 bp, synthetic construct
  source 1..28: mol_type = other DNA
taaagagcttcgctgtttatagcttcgg

SEQ ID NO: 18639 - DNA, 28 bp, synthetic construct
  source 1..28: mol_type = other DNA
agctataaacagcgaagctctttagagg

SEQ ID NO: 18640 - DNA, 28 bp, synthetic construct
  source 1..28: mol_type = other DNA
cataaagagcgctgccacaactacttgg

SEQ ID NO: 18641 - DNA, 28 bp, synthetic construct
  source 1..28: mol_type = other DNA
cgctgccacaactacttggaaagcatgg

SEQ ID NO: 18642 - DNA, 28 bp, synthetic construct
  source 1..28: mol_type = other DNA
gctgccacaactacttggaaagcatggg

SEQ ID NO: 18643 - DNA, 28 bp, synthetic construct
  source 1..28: mol_type = other DNA
aaggcccatgctttccaagtagttgtgg

SEQ ID NO: 18644 - DNA, 28 bp, synthetic construct
  source 1..28: mol_type = other DNA
aactacttggaaagcatgggccttccgg

SEQ ID NO: 18645 - DNA, 28 bp, synthetic construct
  source 1..28: mol_type = other DNA
actacttggaaagcatgggccttccggg

SEQ ID NO: 18646 - DNA, 28 bp, synthetic construct
  source 1..28: mol_type = other DNA
tgggccttccgggcacactgtacccagg

SEQ ID NO: 18647 - DNA, 28 bp, synthetic construct
  source 1..28: mol_type = other DNA
cttacctgggtacagtgtgcccggaagg

SEQ ID NO: 18648 - DNA, 28 bp, synthetic construct
  source 1..28: mol_type = other DNA
agcgcttacctgggtacagtgtgcccgg

SEQ ID NO: 18649 - DNA, 28 bp, synthetic construct
  source 1..28: mol_type = other DNA
ctgtacccaggtaagcgctgctgctcgg

SEQ ID NO: 18650 - DNA, 28 bp, synthetic construct
  source 1..28: mol_type = other DNA
tacccaggtaagcgctgctgctcggagg

SEQ ID NO: 18651 - DNA, 28 bp, synthetic construct
  source 1..28: mol_type = other DNA
ggcctccgagcagcagcgcttacctggg

SEQ ID NO: 18652 - DNA, 28 bp, synthetic construct
  source 1..28: mol_type = other DNA
tggcctccgagcagcagcgcttacctgg

SEQ ID NO: 18653 - DNA, 28 bp, synthetic construct
  source 1..28: mol_type = other DNA
ttaatgactaaagtcaaagacagagagg

SEQ ID NO: 18654 - DNA, 28 bp, synthetic construct
  source 1..28: mol_type = other DNA
aaagaagaaactaatcacagtgaaatgg

SEQ ID NO: 18655 - DNA, 28 bp, synthetic construct
  source 1..28: mol_type = other DNA
aaatggcagaagacctgtgcaagatagg

SEQ ID NO: 18656 - DNA, 28 bp, synthetic construct
  source 1..28: mol_type = other DNA
agatctctctgatcctatcttgcacagg

SEQ ID NO: 18657 - DNA, 28 bp, synthetic construct
  source 1..28: mol_type = other DNA
ataggatcagagagatctctcgtgctgg

SEQ ID NO: 18658 - DNA, 28 bp, synthetic construct
  source 1..28: mol_type = other DNA
ttctgaggcatagagctcttacgtttgg

SEQ ID NO: 18659 - DNA, 28 bp, synthetic construct
  source 1..28: mol_type = other DNA
agagctctatgcctcagaaatttcttgg

SEQ ID NO: 18660 - DNA, 28 bp, synthetic construct
  source 1..28: mol_type = other DNA
tttaactcttaccaagaaatttctgagg

SEQ ID NO: 18661 - DNA, 28 bp, synthetic construct
  source 1..28: mol_type = other DNA
ccactcactgtcgcctgctttccacagg

SEQ ID NO: 18662 - DNA, 28 bp, synthetic construct
  source 1..28: mol_type = other DNA
cactcactgtcgcctgctttccacaggg

SEQ ID NO: 18663 - DNA, 28 bp, synthetic construct
  source 1..28: mol_type = other DNA
actcactgtcgcctgctttccacagggg

SEQ ID NO: 18664 - DNA, 28 bp, synthetic construct
  source 1..28: mol_type = other DNA
tgtcgcctgctttccacaggggacaagg

SEQ ID NO: 18665 - DNA, 28 bp, synthetic construct
  source 1..28: mol_type = other DNA
gtcgcctgctttccacaggggacaaggg

SEQ ID NO: 18666 - DNA, 28 bp, synthetic construct
  source 1..28: mol_type = other DNA
caggcccttgtcccctgtggaaagcagg

SEQ ID NO: 18667 - DNA, 28 bp, synthetic construct
  source 1..28: mol_type = other DNA
gtgtcggacaggcccttgtcccctgtgg

SEQ ID NO: 18668 - DNA, 28 bp, synthetic construct
  source 1..28: mol_type = other DNA
gctgctgtcgtagggcgtgtcggacagg

SEQ ID NO: 18669 - DNA, 28 bp, synthetic construct
  source 1..28: mol_type = other DNA
ctggcgctgctgtcgtagggcgtgtcgg

SEQ ID NO: 18670 - DNA, 28 bp, synthetic construct
  source 1..28: mol_type = other DNA
tctcgtagctggcgctgctgtcgtaggg

SEQ ID NO: 18671 - DNA, 28 bp, synthetic construct
  source 1..28: mol_type = other DNA
ttctcgtagctggcgctgctgtcgtagg

SEQ ID NO: 18672 - DNA, 28 bp, synthetic construct
  source 1..28: mol_type = other DNA
tacgacagcagcgccagctacgagaagg

SEQ ID NO: 18673 - DNA, 28 bp, synthetic construct
  source 1..28: mol_type = other DNA
atcatttcgttctccttctcgtagctgg

SEQ ID NO: 18674 - DNA, 28 bp, synthetic construct
  source 1..28: mol_type = other DNA
aacgaaatgatgaagtcccacgtgatgg

SEQ ID NO: 18675 - DNA, 28 bp, synthetic construct
  source 1..28: mol_type = other DNA
ttgttgatggcttggtccatcacgtggg

SEQ ID NO: 18676 - DNA, 28 bp, synthetic construct
  source 1..28: mol_type = other DNA
gttgttgatggcttggtccatcacgtgg

SEQ ID NO: 18677 - DNA, 28 bp, synthetic construct
  source 1..28: mol_type = other DNA
gtagttgatggcgttgttgatggcttgg

SEQ ID NO: 18678 - DNA, 28 bp, synthetic construct
  source 1..28: mol_type = other DNA
gccatcaacaacgccatcaactacctgg

SEQ ID NO: 18679 - DNA, 28 bp, synthetic construct
  source 1..28: mol_type = other DNA
ccatcaacaacgccatcaactacctggg

SEQ ID NO: 18680 - DNA, 28 bp, synthetic construct
  source 1..28: mol_type = other DNA
catcaacaacgccatcaactacctgggg

SEQ ID NO: 18681 - DNA, 28 bp, synthetic construct
  source 1..28: mol_type = other DNA
atcaacaacgccatcaactacctggggg

SEQ ID NO: 18682 - DNA, 28 bp, synthetic construct
  source 1..28: mol_type = other DNA
agggactcggcccccaggtagttgatgg

SEQ ID NO: 18683 - DNA, 28 bp, synthetic construct
  source 1..28: mol_type = other DNA
cagcgggcgcagggactcggcccccagg

SEQ ID NO: 18684 - DNA, 28 bp, synthetic construct
  source 1..28: mol_type = other DNA
ctgggggccgagtccctgcgcccgctgg

SEQ ID NO: 18685 - DNA, 28 bp, synthetic construct
  source 1..28: mol_type = other DNA
gtctgcaccagcgggcgcagggactcgg

SEQ ID NO: 18686 - DNA, 28 bp, synthetic construct
  source 1..28: mol_type = other DNA
gggggcgtctgcaccagcgggcgcaggg

SEQ ID NO: 18687 - DNA, 28 bp, synthetic construct
  source 1..28: mol_type = other DNA
cgggggcgtctgcaccagcgggcgcagg

SEQ ID NO: 18688 - DNA, 28 bp, synthetic construct
  source 1..28: mol_type = other DNA
ctgcgcccgctggtgcagacgcccccgg

SEQ ID NO: 18689 - DNA, 28 bp, synthetic construct
  source 1..28: mol_type = other DNA
tgcgcccgctggtgcagacgcccccggg

SEQ ID NO: 18690 - DNA, 28 bp, synthetic construct
  source 1..28: mol_type = other DNA
gcccgctggtgcagacgcccccgggcgg

SEQ ID NO: 18691 - DNA, 28 bp, synthetic construct
  source 1..28: mol_type = other DNA
accgcccgggggcgtctgcaccagcggg

SEQ ID NO: 18692 - DNA, 28 bp, synthetic construct
  source 1..28: mol_type = other DNA
aaccgcccgggggcgtctgcaccagcgg

SEQ ID NO: 18693 - DNA, 28 bp, synthetic construct
  source 1..28: mol_type = other DNA
gtgcagacgcccccgggcggttccgagg

SEQ ID NO: 18694 - DNA, 28 bp, synthetic construct
  source 1..28: mol_type = other DNA
cagacgcccccgggcggttccgaggtgg

SEQ ID NO: 18695 - DNA, 28 bp, synthetic construct
  source 1..28: mol_type = other DNA
cccccgggcggttccgaggtggtcccgg

SEQ ID NO: 18696 - DNA, 28 bp, synthetic construct
  source 1..28: mol_type = other DNA
accgggaccacctcggaaccgcccgggg

SEQ ID NO: 18697 - DNA, 28 bp, synthetic construct
  source 1..28: mol_type = other DNA
gaccgggaccacctcggaaccgcccggg

SEQ ID NO: 18698 - DNA, 28 bp, synthetic construct
  source 1..28: mol_type = other DNA
tgaccgggaccacctcggaaccgcccgg

SEQ ID NO: 18699 - DNA, 28 bp, synthetic construct
  source 1..28: mol_type = other DNA
atcgggctgatgaccgggaccacctcgg

SEQ ID NO: 18700 - DNA, 28 bp, synthetic construct
  source 1..28: mol_type = other DNA
cagctggtacatcgggctgatgaccggg

SEQ ID NO: 18701 - DNA, 28 bp, synthetic construct
  source 1..28: mol_type = other DNA
gcagctggtacatcgggctgatgaccgg

SEQ ID NO: 18702 - DNA, 28 bp, synthetic construct
  source 1..28: mol_type = other DNA
gagcggcttgtgcagctggtacatcggg

SEQ ID NO: 18703 - DNA, 28 bp, synthetic construct
  source 1..28: mol_type = other DNA
cgagcggcttgtgcagctggtacatcgg

SEQ ID NO: 18704 - DNA, 28 bp, synthetic construct
  source 1..28: mol_type = other DNA
atgtaccagctgcacaagccgctcgcgg

SEQ ID NO: 18705 - DNA, 28 bp, synthetic construct
  source 1..28: mol_type = other DNA
taccagctgcacaagccgctcgcggagg

SEQ ID NO: 18706 - DNA, 28 bp, synthetic construct
  source 1..28: mol_type = other DNA
accagctgcacaagccgctcgcggaggg

SEQ ID NO: 18707 - DNA, 28 bp, synthetic construct
  source 1..28: mol_type = other DNA
gccctccgcgagcggcttgtgcagctgg

SEQ ID NO: 18708 - DNA, 28 bp, synthetic construct
  source 1..28: mol_type = other DNA
tggagcgcggggtgccctccgcgagcgg

SEQ ID NO: 18709 - DNA, 28 bp, synthetic construct
  source 1..28: mol_type = other DNA
gagggcaccccgcgctccaaccactcgg

SEQ ID NO: 18710 - DNA, 28 bp, synthetic construct
  source 1..28: mol_type = other DNA
accccgcgctccaaccactcggcccagg

SEQ ID NO: 18711 - DNA, 28 bp, synthetic construct
  source 1..28: mol_type = other DNA
tcctgggccgagtggttggagcgcgggg

SEQ ID NO: 18712 - DNA, 28 bp, synthetic construct
  source 1..28: mol_type = other DNA
gtcctgggccgagtggttggagcgcggg

SEQ ID NO: 18713 - DNA, 28 bp, synthetic construct
  source 1..28: mol_type = other DNA
tgtcctgggccgagtggttggagcgcgg

SEQ ID NO: 18714 - DNA, 28 bp, synthetic construct
  source 1..28: mol_type = other DNA
acggcgctgtcctgggccgagtggttgg

SEQ ID NO: 18715 - DNA, 28 bp, synthetic construct
  source 1..28: mol_type = other DNA
aaccactcggcccaggacagcgccgtgg

SEQ ID NO: 18716 - DNA, 28 bp, synthetic construct
  source 1..28: mol_type = other DNA
ctccacggcgctgtcctgggccgagtgg

SEQ ID NO: 18717 - DNA, 28 bp, synthetic construct
  source 1..28: mol_type = other DNA
agcaggttctccacggcgctgtcctggg

SEQ ID NO: 18718 - DNA, 28 bp, synthetic construct
  source 1..28: mol_type = other DNA
cagcaggttctccacggcgctgtcctgg

SEQ ID NO: 18719 - DNA, 28 bp, synthetic construct
  source 1..28: mol_type = other DNA
ttggagagcagcagcaggttctccacgg

SEQ ID NO: 18720 - DNA, 28 bp, synthetic construct
  source 1..28: mol_type = other DNA
gtggagaacctgctgctgctctccaagg

SEQ ID NO: 18721 - DNA, 28 bp, synthetic construct
  source 1..28: mol_type = other DNA
caacttggccttggagagcagcagcagg

SEQ ID NO: 18722 - DNA, 28 bp, synthetic construct
  source 1..28: mol_type = other DNA
ctgctgctgctctccaaggccaagttgg

SEQ ID NO: 18723 - DNA, 28 bp, synthetic construct
  source 1..28: mol_type = other DNA
ctctccaaggccaagttggtgccctcgg

SEQ ID NO: 18724 - DNA, 28 bp, synthetic construct
  source 1..28: mol_type = other DNA
cgctccgagggcaccaacttggccttgg

SEQ ID NO: 18725 - DNA, 28 bp, synthetic construct
  source 1..28: mol_type = other DNA
gccaagttggtgccctcggagcgcgagg

SEQ ID NO: 18726 - DNA, 28 bp, synthetic construct
  source 1..28: mol_type = other DNA
gcctcgcgctccgagggcaccaacttgg

SEQ ID NO: 18727 - DNA, 28 bp, synthetic construct
  source 1..28: mol_type = other DNA
tgctcggggacgcctcgcgctccgaggg

SEQ ID NO: 18728 - DNA, 28 bp, synthetic construct
  source 1..28: mol_type = other DNA
ttgctcggggacgcctcgcgctccgagg

SEQ ID NO: 18729 - DNA, 28 bp, synthetic construct
  source 1..28: mol_type = other DNA
gtggagtcttggcagctgttgctcgggg

SEQ ID NO: 18730 - DNA, 28 bp, synthetic construct
  source 1..28: mol_type = other DNA
cgtggagtcttggcagctgttgctcggg

SEQ ID NO: 18731 - DNA, 28 bp, synthetic construct
  source 1..28: mol_type = other DNA
ccgagcaacagctgccaagactccacgg

SEQ ID NO: 18732 - DNA, 28 bp, synthetic construct
  source 1..28: mol_type = other DNA
gttgctctcggtgtccgtggagtcttgg

SEQ ID NO: 18733 - DNA, 28 bp, synthetic construct
  source 1..28: mol_type = other DNA
tccacggacaccgagagcaacaacgagg

SEQ ID NO: 18734 - DNA, 28 bp, synthetic construct
  source 1..28: mol_type = other DNA
tcctcgttgttgctctcggtgtccgtgg

SEQ ID NO: 18735 - DNA, 28 bp, synthetic construct
  source 1..28: mol_type = other DNA
ctgcgctgctcctcgttgttgctctcgg

SEQ ID NO: 18736 - DNA, 28 bp, synthetic construct
  source 1..28: mol_type = other DNA
agagcaacaacgaggagcagcgcagcgg

SEQ ID NO: 18737 - DNA, 28 bp, synthetic construct
  source 1..28: mol_type = other DNA
cgcgtgcggggcgatgtggttggtcagg

SEQ ID NO: 18738 - DNA, 28 bp, synthetic construct
  source 1..28: mol_type = other DNA
ttgcgcgcgtgcggggcgatgtggttgg

SEQ ID NO: 18739 - DNA, 28 bp, synthetic construct
  source 1..28: mol_type = other DNA
accacatcgccccgcacgcgcgcaacgg

SEQ ID NO: 18740 - DNA, 28 bp, synthetic construct
  source 1..28: mol_type = other DNA
ccacatcgccccgcacgcgcgcaacggg

SEQ ID NO: 18741 - DNA, 28 bp, synthetic construct
  source 1..28: mol_type = other DNA
agcgacagcccgttgcgcgcgtgcgggg

SEQ ID NO: 18742 - DNA, 28 bp, synthetic construct
  source 1..28: mol_type = other DNA
gagcgacagcccgttgcgcgcgtgcggg

SEQ ID NO: 18743 - DNA, 28 bp, synthetic construct
  source 1..28: mol_type = other DNA
tgagcgacagcccgttgcgcgcgtgcgg

SEQ ID NO: 18744 - DNA, 28 bp, synthetic construct
  source 1..28: mol_type = other DNA
cacgcgcgcaacgggctgtcgctcaagg

SEQ ID NO: 18745 - DNA, 28 bp, synthetic construct
  source 1..28: mol_type = other DNA
gcgcgcaacgggctgtcgctcaaggagg

SEQ ID NO: 18746 - DNA, 28 bp, synthetic construct
  source 1..28: mol_type = other DNA
ggcggcgcgcagcaggtcgtaggcgcgg

SEQ ID NO: 18747 - DNA, 28 bp, synthetic construct
  source 1..28: mol_type = other DNA
tcggaggcggcgcgcagcaggtcgtagg

SEQ ID NO: 18748 - DNA, 28 bp, synthetic construct
  source 1..28: mol_type = other DNA
cgagttctcggaggcggcgcgcagcagg

SEQ ID NO: 18749 - DNA, 28 bp, synthetic construct
  source 1..28: mol_type = other DNA
ctgcgcgccgcctccgagaactcgcagg

SEQ ID NO: 18750 - DNA, 28 bp, synthetic construct
  source 1..28: mol_type = other DNA
agcgcgtcctgcgagttctcggaggcgg

SEQ ID NO: 18751 - DNA, 28 bp, synthetic construct
  source 1..28: mol_type = other DNA
cggagcgcgtcctgcgagttctcggagg

SEQ ID NO: 18752 - DNA, 28 bp, synthetic construct
  source 1..28: mol_type = other DNA
acgcggagcgcgtcctgcgagttctcgg

SEQ ID NO: 18753 - DNA, 28 bp, synthetic construct
  source 1..28: mol_type = other DNA
gagaactcgcaggacgcgctccgcgtgg

SEQ ID NO: 18754 - DNA, 28 bp, synthetic construct
  source 1..28: mol_type = other DNA
acgcgctccgcgtggtcagcaccagcgg

SEQ ID NO: 18755 - DNA, 28 bp, synthetic construct
  source 1..28: mol_type = other DNA
cgcgctccgcgtggtcagcaccagcggg

SEQ ID NO: 18756 - DNA, 28 bp, synthetic construct
  source 1..28: mol_type = other DNA
gcgctccgcgtggtcagcaccagcgggg

SEQ ID NO: 18757 - DNA, 28 bp, synthetic construct
  source 1..28: mol_type = other DNA
ctgctccccgctggtgctgaccacgcgg

SEQ ID NO: 18758 - DNA, 28 bp, synthetic construct
  source 1..28: mol_type = other DNA
gtcagcaccagcggggagcagatgaagg

SEQ ID NO: 18759 - DNA, 28 bp, synthetic construct
  source 1..28: mol_type = other DNA
ttgtacaccttcatctgctccccgctgg

SEQ ID NO: 18760 - DNA, 28 bp, synthetic construct
  source 1..28: mol_type = other DNA
gaaggtgtacaagtgcgaacactgccgg

SEQ ID NO: 18761 - DNA, 28 bp, synthetic construct
  source 1..28: mol_type = other DNA
aaggtgtacaagtgcgaacactgccggg

SEQ ID NO: 18762 - DNA, 28 bp, synthetic construct
  source 1..28: mol_type = other DNA
tgcgaacactgccgggtgctcttcctgg

SEQ ID NO: 18763 - DNA, 28 bp, synthetic construct
  source 1..28: mol_type = other DNA
catgacgtgatccaggaagagcacccgg

SEQ ID NO: 18764 - DNA, 28 bp, synthetic construct
  source 1..28: mol_type = other DNA
gtggatggtgtacatgacgtgatccagg

SEQ ID NO: 18765 - DNA, 28 bp, synthetic construct
  source 1..28: mol_type = other DNA
gatcacgtcatgtacaccatccacatgg

SEQ ID NO: 18766 - DNA, 28 bp, synthetic construct
  source 1..28: mol_type = other DNA
atcacgtcatgtacaccatccacatggg

SEQ ID NO: 18767 - DNA, 28 bp, synthetic construct
  source 1..28: mol_type = other DNA
tgtacaccatccacatgggctgccacgg

SEQ ID NO: 18768 - DNA, 28 bp, synthetic construct
  source 1..28: mol_type = other DNA
cggaagccgtggcagcccatgtggatgg

SEQ ID NO: 18769 - DNA, 28 bp, synthetic construct
  source 1..28: mol_type = other DNA
atcacggaagccgtggcagcccatgtgg

SEQ ID NO: 18770 - DNA, 28 bp, synthetic construct
  source 1..28: mol_type = other DNA
gcactcaaaaggatcacggaagccgtgg

SEQ ID NO: 18771 - DNA, 28 bp, synthetic construct
  source 1..28: mol_type = other DNA
gcacatgttgcactcaaaaggatcacgg

SEQ ID NO: 18772 - DNA, 28 bp, synthetic construct
  source 1..28: mol_type = other DNA
gtgatccttttgagtgcaacatgtgcgg

SEQ ID NO: 18773 - DNA, 28 bp, synthetic construct
  source 1..28: mol_type = other DNA
ggtagccgcacatgttgcactcaaaagg

SEQ ID NO: 18774 - DNA, 28 bp, synthetic construct
  source 1..28: mol_type = other DNA
tgcaacatgtgcggctaccacagccagg

SEQ ID NO: 18775 - DNA, 28 bp, synthetic construct
  source 1..28: mol_type = other DNA
catgtgcggctaccacagccaggaccgg

SEQ ID NO: 18776 - DNA, 28 bp, synthetic construct
  source 1..28: mol_type = other DNA
cgagaactcgtaccggtcctggctgtgg

SEQ ID NO: 18777 - DNA, 28 bp, synthetic construct
  source 1..28: mol_type = other DNA
gtgcgacgagaactcgtaccggtcctgg

SEQ ID NO: 18778 - DNA, 28 bp, synthetic construct
  source 1..28: mol_type = other DNA
cgttatgtgcgacgagaactcgtaccgg

SEQ ID NO: 18779 - DNA, 28 bp, synthetic construct
  source 1..28: mol_type = other DNA
acgagttctcgtcgcacataacgcgagg

SEQ ID NO: 18780 - DNA, 28 bp, synthetic construct
  source 1..28: mol_type = other DNA
cgagttctcgtcgcacataacgcgaggg

SEQ ID NO: 18781 - DNA, 28 bp, synthetic construct
  source 1..28: mol_type = other DNA
gagttctcgtcgcacataacgcgagggg

SEQ ID NO: 18782 - DNA, 28 bp, synthetic construct
  source 1..28: mol_type = other DNA
gggagggctttagctcatgtggaagcgg

SEQ ID NO: 18783 - DNA, 28 bp, synthetic construct
  source 1..28: mol_type = other DNA
gggcgcgggagggctttagctcatgtgg

SEQ ID NO: 18784 - DNA, 28 bp, synthetic construct
  source 1..28: mol_type = other DNA
cggggtctggggtgggggcgcgggaggg

SEQ ID NO: 18785 - DNA, 28 bp, synthetic construct
  source 1..28: mol_type = other DNA
tcggggtctggggtgggggcgcgggagg

SEQ ID NO: 18786 - DNA, 28 bp, synthetic construct
  source 1..28: mol_type = other DNA
ggctcggggtctggggtgggggcgcggg

SEQ ID NO: 18787 - DNA, 28 bp, synthetic construct
  source 1..28: mol_type = other DNA
tggctcggggtctggggtgggggcgcgg

SEQ ID NO: 18788 - DNA, 28 bp, synthetic construct
  source 1..28: mol_type = other DNA
tggggtggctcggggtctggggtggggg

SEQ ID NO: 18789 - DNA, 28 bp, synthetic construct
  source 1..28: mol_type = other DNA
ctggggtggctcggggtctggggtgggg

SEQ ID NO: 18790 - DNA, 28 bp, synthetic construct
  source 1..28: mol_type = other DNA
cccaccccagaccccgagccaccccagg

SEQ ID NO: 18791 - DNA, 28 bp, synthetic construct
  source 1..28: mol_type = other DNA
tcctggggtggctcggggtctggggtgg

SEQ ID NO: 18792 - DNA, 28 bp, synthetic construct
  source 1..28: mol_type = other DNA
ttttcctggggtggctcggggtctgggg

SEQ ID NO: 18793 - DNA, 28 bp, synthetic construct
  source 1..28: mol_type = other DNA
cttttcctggggtggctcggggtctggg

SEQ ID NO: 18794 - DNA, 28 bp, synthetic construct
  source 1..28: mol_type = other DNA
gcttttcctggggtggctcggggtctgg

SEQ ID NO: 18795 - DNA, 28 bp, synthetic construct
  source 1..28: mol_type = other DNA
cttgtgcttttcctggggtggctcgggg

SEQ ID NO: 18796 - DNA, 28 bp, synthetic construct
  source 1..28: mol_type = other DNA
cccgagccaccccaggaaaagcacaagg

SEQ ID NO: 18797 - DNA, 28 bp, synthetic construct
  source 1..28: mol_type = other DNA
tccttgtgcttttcctggggtggctcgg

SEQ ID NO: 18798 - DNA, 28 bp, synthetic construct
  source 1..28: mol_type = other DNA
ggcagtccttgtgcttttcctggggtgg

SEQ ID NO: 18799 - DNA, 28 bp, synthetic construct
  source 1..28: mol_type = other DNA
ggcggcagtccttgtgcttttcctgggg

SEQ ID NO: 18800 - DNA, 28 bp, synthetic construct
  source 1..28: mol_type = other DNA
aggcggcagtccttgtgcttttcctggg

SEQ ID NO: 18801 - DNA, 28 bp, synthetic construct
  source 1..28: mol_type = other DNA
aaggcggcagtccttgtgcttttcctgg

SEQ ID NO: 18802 - DNA, 28 bp, synthetic construct
  source 1..28: mol_type = other DNA
tatgctgctggcgggagcgagaaggcgg

SEQ ID NO: 18803 - DNA, 28 bp, synthetic construct
  source 1..28: mol_type = other DNA
gtctatgctgctggcgggagcgagaagg

SEQ ID NO: 18804 - DNA, 28 bp, synthetic construct
  source 1..28: mol_type = other DNA
tctcgctcccgccagcagcatagactgg

SEQ ID NO: 18805 - DNA, 28 bp, synthetic construct
  source 1..28: mol_type = other DNA
ctcccgccagcagcatagactggactgg

SEQ ID NO: 18806 - DNA, 28 bp, synthetic construct
  source 1..28: mol_type = other DNA
gtccagtccagtctatgctgctggcggg

SEQ ID NO: 18807 - DNA, 28 bp, synthetic construct
  source 1..28: mol_type = other DNA
ggtccagtccagtctatgctgctggcgg

SEQ ID NO: 18808 - DNA, 28 bp, synthetic construct
  source 1..28: mol_type = other DNA
tctggtccagtccagtctatgctgctgg

SEQ ID NO: 18809 - DNA, 28 bp, synthetic construct
  source 1..28: mol_type = other DNA
ggactggaccagacaatgttgtgtttgg

SEQ ID NO: 18810 - DNA, 28 bp, synthetic construct
  source 1..28: mol_type = other DNA
ttacaaatccaaacacaacattgtctgg

SEQ ID NO: 18811 - DNA, 28 bp, synthetic construct
  source 1..28: mol_type = other DNA
actgttttttgttttttgtttgagttgg

SEQ ID NO: 18812 - DNA, 28 bp, synthetic construct
  source 1..28: mol_type = other DNA
ttgttttttgtttgagttggttgattgg

SEQ ID NO: 18813 - DNA, 28 bp, synthetic construct
  source 1..28: mol_type = other DNA
tgttttttgtttgagttggttgattggg

SEQ ID NO: 18814 - DNA, 28 bp, synthetic construct
  source 1..28: mol_type = other DNA
gttttttgtttgagttggttgattgggg

SEQ ID NO: 18815 - DNA, 28 bp, synthetic construct
  source 1..28: mol_type = other DNA
cttttgaaaagatttttatttttagagg

SEQ ID NO: 18816 - DNA, 28 bp, synthetic construct
  source 1..28: mol_type = other DNA
tgaaaagatttttatttttagaggcagg

SEQ ID NO: 18817 - DNA, 28 bp, synthetic construct
  source 1..28: mol_type = other DNA
gaaaagatttttatttttagaggcaggg

SEQ ID NO: 18818 - DNA, 28 bp, synthetic construct
  source 1..28: mol_type = other DNA
tttatttttagaggcagggctgcattgg

SEQ ID NO: 18819 - DNA, 28 bp, synthetic construct
  source 1..28: mol_type = other DNA
ttatttttagaggcagggctgcattggg

SEQ ID NO: 18820 - DNA, 28 bp, synthetic construct
  source 1..28: mol_type = other DNA
gaaacatctaggaaggtagcagttctgg

SEQ ID NO: 18821 - DNA, 28 bp, synthetic construct
  source 1..28: mol_type = other DNA
cagcggtctggggaaacatctaggaagg

SEQ ID NO: 18822 - DNA, 28 bp, synthetic construct
  source 1..28: mol_type = other DNA
cttcctagatgtttccccagaccgctgg

SEQ ID NO: 18823 - DNA, 28 bp, synthetic construct
  source 1..28: mol_type = other DNA
cagccagcggtctggggaaacatctagg

SEQ ID NO: 18824 - DNA, 28 bp, synthetic construct
  source 1..28: mol_type = other DNA
tgagggaatctcagccagcggtctgggg

SEQ ID NO: 18825 - DNA, 28 bp, synthetic construct
  source 1..28: mol_type = other DNA
gtgagggaatctcagccagcggtctggg

SEQ ID NO: 18826 - DNA, 28 bp, synthetic construct
  source 1..28: mol_type = other DNA
ggtgagggaatctcagccagcggtctgg

SEQ ID NO: 18827 - DNA, 28 bp, synthetic construct
  source 1..28: mol_type = other DNA
cgacaggtgagggaatctcagccagcgg

SEQ ID NO: 18828 - DNA, 28 bp, synthetic construct
  source 1..28: mol_type = other DNA
ggggattctaggaagcgacaggtgaggg

SEQ ID NO: 18829 - DNA, 28 bp, synthetic construct
  source 1..28: mol_type = other DNA
aggggattctaggaagcgacaggtgagg

SEQ ID NO: 18830 - DNA, 28 bp, synthetic construct
  source 1..28: mol_type = other DNA
ggagaaggggattctaggaagcgacagg

SEQ ID NO: 18831 - DNA, 28 bp, synthetic construct
  source 1..28: mol_type = other DNA
ctaatcgtttggagaaggggattctagg

SEQ ID NO: 18832 - DNA, 28 bp, synthetic construct
  source 1..28: mol_type = other DNA
aatttagactaatcgtttggagaagggg

SEQ ID NO: 18833 - DNA, 28 bp, synthetic construct
  source 1..28: mol_type = other DNA
aaatttagactaatcgtttggagaaggg

SEQ ID NO: 18834 - DNA, 28 bp, synthetic construct
  source 1..28: mol_type = other DNA
aaaatttagactaatcgtttggagaagg

SEQ ID NO: 18835 - DNA, 28 bp, synthetic construct
  source 1..28: mol_type = other DNA
tctctgaaaatttagactaatcgtttgg

SEQ ID NO: 18836 - DNA, 28 bp, synthetic construct
  source 1..28: mol_type = other DNA
gaaatagataaaacacgccacagcctgg

SEQ ID NO: 18837 - DNA, 28 bp, synthetic construct
  source 1..28: mol_type = other DNA
aaatagataaaacacgccacagcctggg

SEQ ID NO: 18838 - DNA, 28 bp, synthetic construct
  source 1..28: mol_type = other DNA
agataaaacacgccacagcctgggaagg

SEQ ID NO: 18839 - DNA, 28 bp, synthetic construct
  source 1..28: mol_type = other DNA
gtagagcacgctccttcccaggctgtgg

SEQ ID NO: 18840 - DNA, 28 bp, synthetic construct
  source 1..28: mol_type = other DNA
cacagggtagagcacgctccttcccagg

SEQ ID NO: 18841 - DNA, 28 bp, synthetic construct
  source 1..28: mol_type = other DNA
agcgtgctctaccctgtgctaagcacgg

SEQ ID NO: 18842 - DNA, 28 bp, synthetic construct
  source 1..28: mol_type = other DNA
gcgtgctctaccctgtgctaagcacggg

SEQ ID NO: 18843 - DNA, 28 bp, synthetic construct
  source 1..28: mol_type = other DNA
cgtgctctaccctgtgctaagcacgggg

SEQ ID NO: 18844 - DNA, 28 bp, synthetic construct
  source 1..28: mol_type = other DNA
gtgcgcgaaccccgtgcttagcacaggg

SEQ ID NO: 18845 - DNA, 28 bp, synthetic construct
  source 1..28: mol_type = other DNA
ggtgcgcgaaccccgtgcttagcacagg

SEQ ID NO: 18846 - DNA, 28 bp, synthetic construct
  source 1..28: mol_type = other DNA
gtgctaagcacggggttcgcgcaccagg

SEQ ID NO: 18847 - DNA, 28 bp, synthetic construct
  source 1..28: mol_type = other DNA
cttctggggactggaaaaagacacctgg

SEQ ID NO: 18848 - DNA, 28 bp, synthetic construct
  source 1..28: mol_type = other DNA
ggctgtgctctctgcttctggggactgg

SEQ ID NO: 18849 - DNA, 28 bp, synthetic construct
  source 1..28: mol_type = other DNA
gcaggggctgtgctctctgcttctgggg

SEQ ID NO: 18850 - DNA, 28 bp, synthetic construct
  source 1..28: mol_type = other DNA
agcaggggctgtgctctctgcttctggg

SEQ ID NO: 18851 - DNA, 28 bp, synthetic construct
  source 1..28: mol_type = other DNA
cagcaggggctgtgctctctgcttctgg

SEQ ID NO: 18852 - DNA, 28 bp, synthetic construct
  source 1..28: mol_type = other DNA
agcagagagcacagcccctgctgtgtgg

SEQ ID NO: 18853 - DNA, 28 bp, synthetic construct
  source 1..28: mol_type = other DNA
gcagagagcacagcccctgctgtgtggg

SEQ ID NO: 18854 - DNA, 28 bp, synthetic construct
  source 1..28: mol_type = other DNA
cacagcccctgctgtgtgggtctgcagg

SEQ ID NO: 18855 - DNA, 28 bp, synthetic construct
  source 1..28: mol_type = other DNA
gctcacctgcagacccacacagcagggg

SEQ ID NO: 18856 - DNA, 28 bp, synthetic construct
  source 1..28: mol_type = other DNA
tgctcacctgcagacccacacagcaggg

SEQ ID NO: 18857 - DNA, 28 bp, synthetic construct
  source 1..28: mol_type = other DNA
ctgctcacctgcagacccacacagcagg

SEQ ID NO: 18858 - DNA, 28 bp, synthetic construct
  source 1..28: mol_type = other DNA
tgtgtgggtctgcaggtgagcagacagg

SEQ ID NO: 18859 - DNA, 28 bp, synthetic construct
  source 1..28: mol_type = other DNA
gggtctgcaggtgagcagacaggacagg

SEQ ID NO: 18860 - DNA, 28 bp, synthetic construct
  source 1..28: mol_type = other DNA
ctgctgtgtcttggcacttgggtggcgg

SEQ ID NO: 18861 - DNA, 28 bp, synthetic construct
  source 1..28: mol_type = other DNA
cgccacccaagtgccaagacacagcagg

SEQ ID NO: 18862 - DNA, 28 bp, synthetic construct
  source 1..28: mol_type = other DNA
gccacccaagtgccaagacacagcaggg

SEQ ID NO: 18863 - DNA, 28 bp, synthetic construct
  source 1..28: mol_type = other DNA
gccctgctgtgtcttggcacttgggtgg

SEQ ID NO: 18864 - DNA, 28 bp, synthetic construct
  source 1..28: mol_type = other DNA
ttggccctgctgtgtcttggcacttggg

SEQ ID NO: 18865 - DNA, 28 bp, synthetic construct
  source 1..28: mol_type = other DNA
gttggccctgctgtgtcttggcacttgg

SEQ ID NO: 18866 - DNA, 28 bp, synthetic construct
  source 1..28: mol_type = other DNA
acaggttgttggccctgctgtgtcttgg

SEQ ID NO: 18867 - DNA, 28 bp, synthetic construct
  source 1..28: mol_type = other DNA
acagcagggccaacaacctgtgcccagg

SEQ ID NO: 18868 - DNA, 28 bp, synthetic construct
  source 1..28: mol_type = other DNA
cgaagctggcctgggcacaggttgttgg

SEQ ID NO: 18869 - DNA, 28 bp, synthetic construct
  source 1..28: mol_type = other DNA
tgtagctcgaagctggcctgggcacagg

SEQ ID NO: 18870 - DNA, 28 bp, synthetic construct
  source 1..28: mol_type = other DNA
gatgcatgtagctcgaagctggcctggg

SEQ ID NO: 18871 - DNA, 28 bp, synthetic construct
  source 1..28: mol_type = other DNA
agatgcatgtagctcgaagctggcctgg

SEQ ID NO: 18872 - DNA, 28 bp, synthetic construct
  source 1..28: mol_type = other DNA
ggccagcttcgagctacatgcatctagg

SEQ ID NO: 18873 - DNA, 28 bp, synthetic construct
  source 1..28: mol_type = other DNA
gccagcttcgagctacatgcatctaggg

SEQ ID NO: 18874 - DNA, 28 bp, synthetic construct
  source 1..28: mol_type = other DNA
gccctagatgcatgtagctcgaagctgg

SEQ ID NO: 18875 - DNA, 28 bp, synthetic construct
  source 1..28: mol_type = other DNA
agcttcgagctacatgcatctagggcgg

SEQ ID NO: 18876 - DNA, 28 bp, synthetic construct
  source 1..28: mol_type = other DNA
cgagctacatgcatctagggcggagagg

SEQ ID NO: 18877 - DNA, 28 bp, synthetic construct
  source 1..28: mol_type = other DNA
tactatttcaagtcatattctgcgtagg

SEQ ID NO: 18878 - DNA, 28 bp, synthetic construct
  source 1..28: mol_type = other DNA
tcatattctgcgtaggaaaatgaattgg

SEQ ID NO: 18879 - DNA, 28 bp, synthetic construct
  source 1..28: mol_type = other DNA
attctgcgtaggaaaatgaattggttgg

SEQ ID NO: 18880 - DNA, 28 bp, synthetic construct
  source 1..28: mol_type = other DNA
ttctgcgtaggaaaatgaattggttggg

SEQ ID NO: 18881 - DNA, 28 bp, synthetic construct
  source 1..28: mol_type = other DNA
tctgcgtaggaaaatgaattggttgggg

SEQ ID NO: 18882 - DNA, 28 bp, synthetic construct
  source 1..28: mol_type = other DNA
gaaagtcgtgtctgtcagactgccctgg

SEQ ID NO: 18883 - DNA, 28 bp, synthetic construct
  source 1..28: mol_type = other DNA
aaagtcgtgtctgtcagactgccctggg

SEQ ID NO: 18884 - DNA, 28 bp, synthetic construct
  source 1..28: mol_type = other DNA
gtcgtgtctgtcagactgccctgggtgg

SEQ ID NO: 18885 - DNA, 28 bp, synthetic construct
  source 1..28: mol_type = other DNA
gtgtctgtcagactgccctgggtggagg

SEQ ID NO: 18886 - DNA, 28 bp, synthetic construct
  source 1..28: mol_type = other DNA
tgtctgtcagactgccctgggtggaggg

SEQ ID NO: 18887 - DNA, 28 bp, synthetic construct
  source 1..28: mol_type = other DNA
gactgccctgggtggagggagacgccgg

SEQ ID NO: 18888 - DNA, 28 bp, synthetic construct
  source 1..28: mol_type = other DNA
actgccctgggtggagggagacgccggg

SEQ ID NO: 18889 - DNA, 28 bp, synthetic construct
  source 1..28: mol_type = other DNA
ctagcccggcgtctccctccacccaggg

SEQ ID NO: 18890 - DNA, 28 bp, synthetic construct
  source 1..28: mol_type = other DNA
tctagcccggcgtctccctccacccagg

SEQ ID NO: 18891 - DNA, 28 bp, synthetic construct
  source 1..28: mol_type = other DNA
gagggagacgccgggctagagcctttgg

SEQ ID NO: 18892 - DNA, 28 bp, synthetic construct
  source 1..28: mol_type = other DNA
agggagacgccgggctagagcctttggg

SEQ ID NO: 18893 - DNA, 28 bp, synthetic construct
  source 1..28: mol_type = other DNA
caggacgatcccaaaggctctagcccgg

SEQ ID NO: 18894 - DNA, 28 bp, synthetic construct
  source 1..28: mol_type = other DNA
cgggctagagcctttgggatcgtcctgg

SEQ ID NO: 18895 - DNA, 28 bp, synthetic construct
  source 1..28: mol_type = other DNA
gcctttgggatcgtcctggattcactgg

SEQ ID NO: 18896 - DNA, 28 bp, synthetic construct
  source 1..28: mol_type = other DNA
gccagtgaatccaggacgatcccaaagg

SEQ ID NO: 18897 - DNA, 28 bp, synthetic construct
  source 1..28: mol_type = other DNA
gatcgtcctggattcactggctttgcgg

SEQ ID NO: 18898 - DNA, 28 bp, synthetic construct
  source 1..28: mol_type = other DNA
cgtcctggattcactggctttgcggagg

SEQ ID NO: 18899 - DNA, 28 bp, synthetic construct
  source 1..28: mol_type = other DNA
cagcctccgcaaagccagtgaatccagg

SEQ ID NO: 18900 - DNA, 28 bp, synthetic construct
  source 1..28: mol_type = other DNA
actggctttgcggaggctgctcagatgg

SEQ ID NO: 18901 - DNA, 28 bp, synthetic construct
  source 1..28: mol_type = other DNA
ctgctcagatggcctgagcctcccgagg

SEQ ID NO: 18902 - DNA, 28 bp, synthetic construct
  source 1..28: mol_type = other DNA
cggggcagcaagcctcgggaggctcagg

SEQ ID NO: 18903 - DNA, 28 bp, synthetic construct
  source 1..28: mol_type = other DNA
agcctcccgaggcttgctgccccgtagg

SEQ ID NO: 18904 - DNA, 28 bp, synthetic construct
  source 1..28: mol_type = other DNA
ctcctacggggcagcaagcctcgggagg

SEQ ID NO: 18905 - DNA, 28 bp, synthetic construct
  source 1..28: mol_type = other DNA
ctcccgaggcttgctgccccgtaggagg

SEQ ID NO: 18906 - DNA, 28 bp, synthetic construct
  source 1..28: mol_type = other DNA
ctcctcctacggggcagcaagcctcggg

SEQ ID NO: 18907 - DNA, 28 bp, synthetic construct
  source 1..28: mol_type = other DNA
tctcctcctacggggcagcaagcctcgg

SEQ ID NO: 18908 - DNA, 28 bp, synthetic construct
  source 1..28: mol_type = other DNA
cacgggaagacagtctcctcctacgggg

SEQ ID NO: 18909 - DNA, 28 bp, synthetic construct
  source 1..28: mol_type = other DNA
cccgtaggaggagactgtcttcccgtgg

SEQ ID NO: 18910 - DNA, 28 bp, synthetic construct
  source 1..28: mol_type = other DNA
ccgtaggaggagactgtcttcccgtggg

SEQ ID NO: 18911 - DNA, 28 bp, synthetic construct
  source 1..28: mol_type = other DNA
gagactgtcttcccgtgggcatatctgg

SEQ ID NO: 18912 - DNA, 28 bp, synthetic construct
  source 1..28: mol_type = other DNA
agactgtcttcccgtgggcatatctggg

SEQ ID NO: 18913 - DNA, 28 bp, synthetic construct
  source 1..28: mol_type = other DNA
gactgtcttcccgtgggcatatctgggg

SEQ ID NO: 18914 - DNA, 28 bp, synthetic construct
  source 1..28: mol_type = other DNA
aacagggctccccagatatgcccacggg

SEQ ID NO: 18915 - DNA, 28 bp, synthetic construct
  source 1..28: mol_type = other DNA
gaacagggctccccagatatgcccacgg

SEQ ID NO: 18916 - DNA, 28 bp, synthetic construct
  source 1..28: mol_type = other DNA
tatgggagtgaaaaagcggggaacaggg

SEQ ID NO: 18917 - DNA, 28 bp, synthetic construct
  source 1..28: mol_type = other DNA
gtatgggagtgaaaaagcggggaacagg

SEQ ID NO: 18918 - DNA, 28 bp, synthetic construct
  source 1..28: mol_type = other DNA
ttaaaggtatgggagtgaaaaagcgggg

SEQ ID NO: 18919 - DNA, 28 bp, synthetic construct
  source 1..28: mol_type = other DNA
attaaaggtatgggagtgaaaaagcggg

SEQ ID NO: 18920 - DNA, 28 bp, synthetic construct
  source 1..28: mol_type = other DNA
cattaaaggtatgggagtgaaaaagcgg

SEQ ID NO: 18921 - DNA, 28 bp, synthetic construct
  source 1..28: mol_type = other DNA
cgctttttcactcccatacctttaatgg

SEQ ID NO: 18922 - DNA, 28 bp, synthetic construct
  source 1..28: mol_type = other DNA
agattttgggggccattaaaggtatggg

SEQ ID NO: 18923 - DNA, 28 bp, synthetic construct
  source 1..28: mol_type = other DNA
cagattttgggggccattaaaggtatgg

SEQ ID NO: 18924 - DNA, 28 bp, synthetic construct
  source 1..28: mol_type = other DNA
agtgacagattttgggggccattaaagg

SEQ ID NO: 18925 - DNA, 28 bp, synthetic construct
  source 1..28: mol_type = other DNA
tttaaattgtagtgacagattttggggg

SEQ ID NO: 18926 - DNA, 28 bp, synthetic construct
  source 1..28: mol_type = other DNA
gtttaaattgtagtgacagattttgggg

SEQ ID NO: 18927 - DNA, 28 bp, synthetic construct
  source 1..28: mol_type = other DNA
tgtttaaattgtagtgacagattttggg

SEQ ID NO: 18928 - DNA, 28 bp, synthetic construct
  source 1..28: mol_type = other DNA
gtgtttaaattgtagtgacagattttgg

SEQ ID NO: 18929 - DNA, 28 bp, synthetic construct
  source 1..28: mol_type = other DNA
caatttaaacaccagtcccgaaatttgg

SEQ ID NO: 18930 - DNA, 28 bp, synthetic construct
  source 1..28: mol_type = other DNA
agaaagaagatccaaatttcgggactgg

SEQ ID NO: 18931 - DNA, 28 bp, synthetic construct
  source 1..28: mol_type = other DNA
caaaaagaaagaagatccaaatttcggg

SEQ ID NO: 18932 - DNA, 28 bp, synthetic construct
  source 1..28: mol_type = other DNA
tcaaaaagaaagaagatccaaatttcgg

SEQ ID NO: 18933 - DNA, 28 bp, synthetic construct
  source 1..28: mol_type = other DNA
cttctttctttttgaatctctcaaacgg

SEQ ID NO: 18934 - DNA, 28 bp, synthetic construct
  source 1..28: mol_type = other DNA
atttgaaataaagctttggtttctgagg

SEQ ID NO: 18935 - DNA, 28 bp, synthetic construct
  source 1..28: mol_type = other DNA
aaggaagagatttgaaataaagctttgg

SEQ ID NO: 18936 - DNA, 28 bp, synthetic construct
  source 1..28: mol_type = other DNA
ctttatttcaaatctcttccttccctgg

SEQ ID NO: 18937 - DNA, 28 bp, synthetic construct
  source 1..28: mol_type = other DNA
atttcaaatctcttccttccctggctgg

SEQ ID NO: 18938 - DNA, 28 bp, synthetic construct
  source 1..28: mol_type = other DNA
ggtactagatggaaccagccagggaagg

SEQ ID NO: 18939 - DNA, 28 bp, synthetic construct
  source 1..28: mol_type = other DNA
ctctggtactagatggaaccagccaggg

SEQ ID NO: 18940 - DNA, 28 bp, synthetic construct
  source 1..28: mol_type = other DNA
cctggctggttccatctagtaccagagg

SEQ ID NO: 18941 - DNA, 28 bp, synthetic construct
  source 1..28: mol_type = other DNA
aggaaaagaggcctctggtactagatgg

SEQ ID NO: 18942 - DNA, 28 bp, synthetic construct
  source 1..28: mol_type = other DNA
ggatttcttcaggaaaagaggcctctgg

SEQ ID NO: 18943 - DNA, 28 bp, synthetic construct
  source 1..28: mol_type = other DNA
taggattggatttcttcaggaaaagagg

SEQ ID NO: 18944 - DNA, 28 bp, synthetic construct
  source 1..28: mol_type = other DNA
atgagggctaggattggatttcttcagg

SEQ ID NO: 18945 - DNA, 28 bp, synthetic construct
  source 1..28: mol_type = other DNA
acataattaaaatgagggctaggattgg

SEQ ID NO: 18946 - DNA, 28 bp, synthetic construct
  source 1..28: mol_type = other DNA
gatgtacataattaaaatgagggctagg

SEQ ID NO: 18947 - DNA, 28 bp, synthetic construct
  source 1..28: mol_type = other DNA
aaacagatgtacataattaaaatgaggg

SEQ ID NO: 18948 - DNA, 28 bp, synthetic construct
  source 1..28: mol_type = other DNA
caaacagatgtacataattaaaatgagg

SEQ ID NO: 18949 - DNA, 28 bp, synthetic construct
  source 1..28: mol_type = other DNA
gccacaagcctgaatttctcagtgttgg

SEQ ID NO: 18950 - DNA, 28 bp, synthetic construct
  source 1..28: mol_type = other DNA
accaacactgagaaattcaggcttgtgg

SEQ ID NO: 18951 - DNA, 28 bp, synthetic construct
  source 1..28: mol_type = other DNA
gaaacttaccaacactgagaaattcagg

SEQ ID NO: 18952 - DNA, 28 bp, synthetic construct
  source 1..28: mol_type = other DNA
aacgagaataatatatagtgagggtagg

SEQ ID NO: 18953 - DNA, 28 bp, synthetic construct
  source 1..28: mol_type = other DNA
ttaaaacgagaataatatatagtgaggg

SEQ ID NO: 18954 - DNA, 28 bp, synthetic construct
  source 1..28: mol_type = other DNA
tttaaaacgagaataatatatagtgagg

SEQ ID NO: 18955 - DNA, 28 bp, synthetic construct
  source 1..28: mol_type = other DNA
attattctcgttttaaaacccataaagg

SEQ ID NO: 18956 - DNA, 28 bp, synthetic construct
  source 1..28: mol_type = other DNA
tgactgttctaaatcactcctttatggg

SEQ ID NO: 18957 - DNA, 28 bp, synthetic construct
  source 1..28: mol_type = other DNA
atgactgttctaaatcactcctttatgg

SEQ ID NO: 18958 - DNA, 28 bp, synthetic construct
  source 1..28: mol_type = other DNA
tctgtgtgttagcaacagagatgctggg

SEQ ID NO: 18959 - DNA, 28 bp, synthetic construct
  source 1..28: mol_type = other DNA
ctctgtgtgttagcaacagagatgctgg

SEQ ID NO: 18960 - DNA, 28 bp, synthetic construct
  source 1..28: mol_type = other DNA
catgtttgaaagcttggtttcaaacagg

SEQ ID NO: 18961 - DNA, 28 bp, synthetic construct
  source 1..28: mol_type = other DNA
aagagcttcaacatgtttgaaagcttgg

SEQ ID NO: 18962 - DNA, 28 bp, synthetic construct
  source 1..28: mol_type = other DNA
aacatgttgaagctctttactgtaaagg

SEQ ID NO: 18963 - DNA, 28 bp, synthetic construct
  source 1..28: mol_type = other DNA
ccagcatgtgtgtccacacatacatagg

SEQ ID NO: 18964 - DNA, 28 bp, synthetic construct
  source 1..28: mol_type = other DNA
catgtgtgtccacacatacataggatgg

SEQ ID NO: 18965 - DNA, 28 bp, synthetic construct
  source 1..28: mol_type = other DNA
tgtgtccacacatacataggatggctgg

SEQ ID NO: 18966 - DNA, 28 bp, synthetic construct
  source 1..28: mol_type = other DNA
cagagccagccatcctatgtatgtgtgg

SEQ ID NO: 18967 - DNA, 28 bp, synthetic construct
  source 1..28: mol_type = other DNA
ataggatggctggctctgcacctgtagg

SEQ ID NO: 18968 - DNA, 28 bp, synthetic construct
  source 1..28: mol_type = other DNA
ggctggctctgcacctgtaggatattgg

SEQ ID NO: 18969 - DNA, 28 bp, synthetic construct
  source 1..28: mol_type = other DNA
gcacctgtaggatattggaatgcacagg

SEQ ID NO: 18970 - DNA, 28 bp, synthetic construct
  source 1..28: mol_type = other DNA
cacctgtaggatattggaatgcacaggg

SEQ ID NO: 18971 - DNA, 28 bp, synthetic construct
  source 1..28: mol_type = other DNA
tgccctgtgcattccaatatcctacagg

SEQ ID NO: 18972 - DNA, 28 bp, synthetic construct
  source 1..28: mol_type = other DNA
gatattggaatgcacagggcaattgagg

SEQ ID NO: 18973 - DNA, 28 bp, synthetic construct
  source 1..28: mol_type = other DNA
atattggaatgcacagggcaattgaggg

SEQ ID NO: 18974 - DNA, 28 bp, synthetic construct
  source 1..28: mol_type = other DNA
caattgagggactgagccagaccttcgg

SEQ ID NO: 18975 - DNA, 28 bp, synthetic construct
  source 1..28: mol_type = other DNA
ctggtggcattactctccgaaggtctgg

SEQ ID NO: 18976 - DNA, 28 bp, synthetic construct
  source 1..28: mol_type = other DNA
gggatctggtggcattactctccgaagg

SEQ ID NO: 18977 - DNA, 28 bp, synthetic construct
  source 1..28: mol_type = other DNA
ggagagtaatgccaccagatcccctagg

SEQ ID NO: 18978 - DNA, 28 bp, synthetic construct
  source 1..28: mol_type = other DNA
aatgccaccagatcccctaggaaagagg

SEQ ID NO: 18979 - DNA, 28 bp, synthetic construct
  source 1..28: mol_type = other DNA
gccaccagatcccctaggaaagaggagg

SEQ ID NO: 18980 - DNA, 28 bp, synthetic construct
  source 1..28: mol_type = other DNA
gcctcctctttcctaggggatctggtgg

SEQ ID NO: 18981 - DNA, 28 bp, synthetic construct
  source 1..28: mol_type = other DNA
tttgcctcctctttcctaggggatctgg

SEQ ID NO: 18982 - DNA, 28 bp, synthetic construct
  source 1..28: mol_type = other DNA
gatcccctaggaaagaggaggcaaatgg

SEQ ID NO: 18983 - DNA, 28 bp, synthetic construct
  source 1..28: mol_type = other DNA
gtgccatttgcctcctctttcctagggg

SEQ ID NO: 18984 - DNA, 28 bp, synthetic construct
  source 1..28: mol_type = other DNA
agtgccatttgcctcctctttcctaggg

SEQ ID NO: 18985 - DNA, 28 bp, synthetic construct
  source 1..28: mol_type = other DNA
cagtgccatttgcctcctctttcctagg

SEQ ID NO: 18986 - DNA, 28 bp, synthetic construct
  source 1..28: mol_type = other DNA
ggaaagaggaggcaaatggcactgcagg

SEQ ID NO: 18987 - DNA, 28 bp, synthetic construct
  source 1..28: mol_type = other DNA
aaccccgcccatccgtgctatgacatgg

SEQ ID NO: 18988 - DNA, 28 bp, synthetic construct
  source 1..28: mol_type = other DNA
ctccatgtcatagcacggatgggcgggg

SEQ ID NO: 18989 - DNA, 28 bp, synthetic construct
  source 1..28: mol_type = other DNA
cccgcccatccgtgctatgacatggagg

SEQ ID NO: 18990 - DNA, 28 bp, synthetic construct
  source 1..28: mol_type = other DNA
gcctccatgtcatagcacggatgggcgg

SEQ ID NO: 18991 - DNA, 28 bp, synthetic construct
  source 1..28: mol_type = other DNA
agtgcctccatgtcatagcacggatggg

SEQ ID NO: 18992 - DNA, 28 bp, synthetic construct
  source 1..28: mol_type = other DNA
cagtgcctccatgtcatagcacggatgg

SEQ ID NO: 18993 - DNA, 28 bp, synthetic construct
  source 1..28: mol_type = other DNA
gcttcagtgcctccatgtcatagcacgg

SEQ ID NO: 18994 - DNA, 28 bp, synthetic construct
  source 1..28: mol_type = other DNA
tatgacatggaggcactgaagcccgagg

SEQ ID NO: 18995 - DNA, 28 bp, synthetic construct
  source 1..28: mol_type = other DNA
acatggaggcactgaagcccgaggaagg

SEQ ID NO: 18996 - DNA, 28 bp, synthetic construct
  source 1..28: mol_type = other DNA
ggcactgaagcccgaggaaggtgtgtgg

SEQ ID NO: 18997 - DNA, 28 bp, synthetic construct
  source 1..28: mol_type = other DNA
attagaatctccacacaccttcctcggg

SEQ ID NO: 18998 - DNA, 28 bp, synthetic construct
  source 1..28: mol_type = other DNA
gattagaatctccacacaccttcctcgg

SEQ ID NO: 18999 - DNA, 28 bp, synthetic construct
  source 1..28: mol_type = other DNA
gtggagattctaatcccaacaagcaagg

SEQ ID NO: 19000 - DNA, 28 bp, synthetic construct
  source 1..28: mol_type = other DNA
tggagattctaatcccaacaagcaaggg

SEQ ID NO: 19001 - DNA, 28 bp, synthetic construct
  source 1..28: mol_type = other DNA
atcttgaaggagacccttgcttgttggg

SEQ ID NO: 19002 - DNA, 28 bp, synthetic construct
  source 1..28: mol_type = other DNA
aatcttgaaggagacccttgcttgttgg

SEQ ID NO: 19003 - DNA, 28 bp, synthetic construct
  source 1..28: mol_type = other DNA
taatgattgatagcattaatcttgaagg

SEQ ID NO: 19004 - DNA, 28 bp, synthetic construct
  source 1..28: mol_type = other DNA
tcaagattaatgctatcaatcattaagg

SEQ ID NO: 19005 - DNA, 28 bp, synthetic construct
  source 1..28: mol_type = other DNA
ttaaggtcattactctcaaccacctagg

SEQ ID NO: 19006 - DNA, 28 bp, synthetic construct
  source 1..28: mol_type = other DNA
aatggtatattcttcattgcctaggtgg

SEQ ID NO: 19007 - DNA, 28 bp, synthetic construct
  source 1..28: mol_type = other DNA
tgaaatggtatattcttcattgcctagg

SEQ ID NO: 19008 - DNA, 28 bp, synthetic construct
  source 1..28: mol_type = other DNA
agacaagtactgtaaatatttgaaatgg

SEQ ID NO: 19009 - DNA, 28 bp, synthetic construct
  source 1..28: mol_type = other DNA
acttgtcttcaccaacactgtcccaagg

SEQ ID NO: 19010 - DNA, 28 bp, synthetic construct
  source 1..28: mol_type = other DNA
gcttcatttcaccttgggacagtgttgg

SEQ ID NO: 19011 - DNA, 28 bp, synthetic construct
  source 1..28: mol_type = other DNA
cccaaggtgaaatgaagcaacagagagg

SEQ ID NO: 19012 - DNA, 28 bp, synthetic construct
  source 1..28: mol_type = other DNA
tcctctctgttgcttcatttcaccttgg

SEQ ID NO: 19013 - DNA, 28 bp, synthetic construct
  source 1..28: mol_type = other DNA
aagtacctcagcatttaatccaaacagg

SEQ ID NO: 19014 - DNA, 28 bp, synthetic construct
  source 1..28: mol_type = other DNA
agtacctcagcatttaatccaaacaggg

SEQ ID NO: 19015 - DNA, 28 bp, synthetic construct
  source 1..28: mol_type = other DNA
gtacctcagcatttaatccaaacagggg

SEQ ID NO: 19016 - DNA, 28 bp, synthetic construct
  source 1..28: mol_type = other DNA
gaacccctgtttggattaaatgctgagg

SEQ ID NO: 19017 - DNA, 28 bp, synthetic construct
  source 1..28: mol_type = other DNA
agtgctgagactaagaacccctgtttgg

SEQ ID NO: 19018 - DNA, 28 bp, synthetic construct
  source 1..28: mol_type = other DNA
tcttagtctcagcactatgacattttgg

SEQ ID NO: 19019 - DNA, 28 bp, synthetic construct
  source 1..28: mol_type = other DNA
cttagtctcagcactatgacattttggg

SEQ ID NO: 19020 - DNA, 28 bp, synthetic construct
  source 1..28: mol_type = other DNA
attttgggctgactacttatttgttagg

SEQ ID NO: 19021 - DNA, 28 bp, synthetic construct
  source 1..28: mol_type = other DNA
ttgggctgactacttatttgttaggcgg

SEQ ID NO: 19022 - DNA, 28 bp, synthetic construct
  source 1..28: mol_type = other DNA
tgggctgactacttatttgttaggcggg

SEQ ID NO: 19023 - DNA, 28 bp, synthetic construct
  source 1..28: mol_type = other DNA
aggcgggagctctcctgtgcattgtagg

SEQ ID NO: 19024 - DNA, 28 bp, synthetic construct
  source 1..28: mol_type = other DNA
tactgctaattatcctacaatgcacagg

SEQ ID NO: 19025 - DNA, 28 bp, synthetic construct
  source 1..28: mol_type = other DNA
attgtaggataattagcagtatccctgg

SEQ ID NO: 19026 - DNA, 28 bp, synthetic construct
  source 1..28: mol_type = other DNA
gtaggataattagcagtatccctggtgg

SEQ ID NO: 19027 - DNA, 28 bp, synthetic construct
  source 1..28: mol_type = other DNA
actggcgtctattgggtagccaccaggg

SEQ ID NO: 19028 - DNA, 28 bp, synthetic construct
  source 1..28: mol_type = other DNA
tactggcgtctattgggtagccaccagg

SEQ ID NO: 19029 - DNA, 28 bp, synthetic construct
  source 1..28: mol_type = other DNA
attcggggtgctactggcgtctattggg

SEQ ID NO: 19030 - DNA, 28 bp, synthetic construct
  source 1..28: mol_type = other DNA
aattcggggtgctactggcgtctattgg

SEQ ID NO: 19031 - DNA, 28 bp, synthetic construct
  source 1..28: mol_type = other DNA
ttgggttgtcaattcggggtgctactgg

SEQ ID NO: 19032 - DNA, 28 bp, synthetic construct
  source 1..28: mol_type = other DNA
ctggagagtttgggttgtcaattcgggg

SEQ ID NO: 19033 - DNA, 28 bp, synthetic construct
  source 1..28: mol_type = other DNA
tctggagagtttgggttgtcaattcggg

SEQ ID NO: 19034 - DNA, 28 bp, synthetic construct
  source 1..28: mol_type = other DNA
gtctggagagtttgggttgtcaattcgg

SEQ ID NO: 19035 - DNA, 28 bp, synthetic construct
  source 1..28: mol_type = other DNA
acagttggtgatgtctggagagtttggg

SEQ ID NO: 19036 - DNA, 28 bp, synthetic construct
  source 1..28: mol_type = other DNA
gacagttggtgatgtctggagagtttgg

SEQ ID NO: 19037 - DNA, 28 bp, synthetic construct
  source 1..28: mol_type = other DNA
ctcgcaggggacagttggtgatgtctgg

SEQ ID NO: 19038 - DNA, 28 bp, synthetic construct
  source 1..28: mol_type = other DNA
cagacatcaccaactgtcccctgcgagg

SEQ ID NO: 19039 - DNA, 28 bp, synthetic construct
  source 1..28: mol_type = other DNA
gtgatttctcctcgcaggggacagttgg

SEQ ID NO: 19040 - DNA, 28 bp, synthetic construct
  source 1..28: mol_type = other DNA
gtcccctgcgaggagaaatcactcctgg

SEQ ID NO: 19041 - DNA, 28 bp, synthetic construct
  source 1..28: mol_type = other DNA
tcccctgcgaggagaaatcactcctggg

SEQ ID NO: 19042 - DNA, 28 bp, synthetic construct
  source 1..28: mol_type = other DNA
cccctgcgaggagaaatcactcctgggg

SEQ ID NO: 19043 - DNA, 28 bp, synthetic construct
  source 1..28: mol_type = other DNA
ccctgcgaggagaaatcactcctggggg

SEQ ID NO: 19044 - DNA, 28 bp, synthetic construct
  source 1..28: mol_type = other DNA
tcccccaggagtgatttctcctcgcagg

SEQ ID NO: 19045 - DNA, 28 bp, synthetic construct
  source 1..28: mol_type = other DNA
tcatttgggtcagtggttctcccccagg

SEQ ID NO: 19046 - DNA, 28 bp, synthetic construct
  source 1..28: mol_type = other DNA
ttggtttagaattcatttgggtcagtgg

SEQ ID NO: 19047 - DNA, 28 bp, synthetic construct
  source 1..28: mol_type = other DNA
catttgattggtttagaattcatttggg

SEQ ID NO: 19048 - DNA, 28 bp, synthetic construct
  source 1..28: mol_type = other DNA
acatttgattggtttagaattcatttgg

SEQ ID NO: 19049 - DNA, 28 bp, synthetic construct
  source 1..28: mol_type = other DNA
atgaattctaaaccaatcaaatgtctgg

SEQ ID NO: 19050 - DNA, 28 bp, synthetic construct
  source 1..28: mol_type = other DNA
tgaattctaaaccaatcaaatgtctggg

SEQ ID NO: 19051 - DNA, 28 bp, synthetic construct
  source 1..28: mol_type = other DNA
ttggagggcttcccagacatttgattgg

SEQ ID NO: 19052 - DNA, 28 bp, synthetic construct
  source 1..28: mol_type = other DNA
gtgcttttctattttttttcttggaggg

SEQ ID NO: 19053 - DNA, 28 bp, synthetic construct
  source 1..28: mol_type = other DNA
agtgcttttctattttttttcttggagg

SEQ ID NO: 19054 - DNA, 28 bp, synthetic construct
  source 1..28: mol_type = other DNA
tcaagtgcttttctattttttttcttgg

SEQ ID NO: 19055 - DNA, 28 bp, synthetic construct
  source 1..28: mol_type = other DNA
acttgaagaatattcccaatattcccgg

SEQ ID NO: 19056 - DNA, 28 bp, synthetic construct
  source 1..28: mol_type = other DNA
cttgatactgctgaccgggaatattggg

SEQ ID NO: 19057 - DNA, 28 bp, synthetic construct
  source 1..28: mol_type = other DNA
ccaatattcccggtcagcagtatcaagg

SEQ ID NO: 19058 - DNA, 28 bp, synthetic construct
  source 1..28: mol_type = other DNA
caagtcagccttgatactgctgaccggg

SEQ ID NO: 19059 - DNA, 28 bp, synthetic construct
  source 1..28: mol_type = other DNA
acaagtcagccttgatactgctgaccgg

SEQ ID NO: 19060 - DNA, 28 bp, synthetic construct
  source 1..28: mol_type = other DNA
gtatcaaggctgacttgtgttcatgtgg

SEQ ID NO: 19061 - DNA, 28 bp, synthetic construct
  source 1..28: mol_type = other DNA
attctataaatcaattattccccttcgg

SEQ ID NO: 19062 - DNA, 28 bp, synthetic construct
  source 1..28: mol_type = other DNA
aggaaatatatttttaagaccgaagggg

SEQ ID NO: 19063 - DNA, 28 bp, synthetic construct
  source 1..28: mol_type = other DNA
gaggaaatatatttttaagaccgaaggg

SEQ ID NO: 19064 - DNA, 28 bp, synthetic construct
  source 1..28: mol_type = other DNA
tgaggaaatatatttttaagaccgaagg

SEQ ID NO: 19065 - DNA, 28 bp, synthetic construct
  source 1..28: mol_type = other DNA
tttcaacaaaactcaaatgtttatgagg

SEQ ID NO: 19066 - DNA, 28 bp, synthetic construct
  source 1..28: mol_type = other DNA
aaacatttgagttttgttgaaaagatgg

SEQ ID NO: 19067 - DNA, 28 bp, synthetic construct
  source 1..28: mol_type = other DNA
ttacaaagataccattcttgagtcatgg

SEQ ID NO: 19068 - DNA, 28 bp, synthetic construct
  source 1..28: mol_type = other DNA
agcagagaaatccatgactcaagaatgg

SEQ ID NO: 19069 - DNA, 28 bp, synthetic construct
  source 1..28: mol_type = other DNA
agtcatggatttctctgctcacagaagg

SEQ ID NO: 19070 - DNA, 28 bp, synthetic construct
  source 1..28: mol_type = other DNA
gtcatggatttctctgctcacagaaggg

SEQ ID NO: 19071 - DNA, 28 bp, synthetic construct
  source 1..28: mol_type = other DNA
ggatttctctgctcacagaagggtgtgg

SEQ ID NO: 19072 - DNA, 28 bp, synthetic construct
  source 1..28: mol_type = other DNA
tctgctcacagaagggtgtggcatttgg

SEQ ID NO: 19073 - DNA, 28 bp, synthetic construct
  source 1..28: mol_type = other DNA
cacagaagggtgtggcatttggaaacgg

SEQ ID NO: 19074 - DNA, 28 bp, synthetic construct
  source 1..28: mol_type = other DNA
acagaagggtgtggcatttggaaacggg

SEQ ID NO: 19075 - DNA, 28 bp, synthetic construct
  source 1..28: mol_type = other DNA
attgctgcaccaatgcactgagtgaagg

SEQ ID NO: 19076 - DNA, 28 bp, synthetic construct
  source 1..28: mol_type = other DNA
gtctctcttccttcactcagtgcattgg

SEQ ID NO: 19077 - DNA, 28 bp, synthetic construct
  source 1..28: mol_type = other DNA
gcactgagtgaaggaagagagacagagg

SEQ ID NO: 19078 - DNA, 28 bp, synthetic construct
  source 1..28: mol_type = other DNA
gtgaaggaagagagacagaggatcaagg

SEQ ID NO: 19079 - DNA, 28 bp, synthetic construct
  source 1..28: mol_type = other DNA
tgaaggaagagagacagaggatcaaggg

SEQ ID NO: 19080 - DNA, 28 bp, synthetic construct
  source 1..28: mol_type = other DNA
atctttctctgtgattgcatattgaagg

SEQ ID NO: 19081 - DNA, 28 bp, synthetic construct
  source 1..28: mol_type = other DNA
cgccttatccaagttaatatctctaagg

SEQ ID NO: 19082 - DNA, 28 bp, synthetic construct
  source 1..28: mol_type = other DNA
caccttagagatattaacttggataagg

SEQ ID NO: 19083 - DNA, 28 bp, synthetic construct
  source 1..28: mol_type = other DNA
ggctctcaccttagagatattaacttgg

SEQ ID NO: 19084 - DNA, 28 bp, synthetic construct
  source 1..28: mol_type = other DNA
aatttgcaacaaactgactctaagaagg

SEQ ID NO: 19085 - DNA, 28 bp, synthetic construct
  source 1..28: mol_type = other DNA
ggggatggatggaaaagaacagagtagg

SEQ ID NO: 19086 - DNA, 28 bp, synthetic construct
  source 1..28: mol_type = other DNA
tttccatccatccccctgagtcagttgg

SEQ ID NO: 19087 - DNA, 28 bp, synthetic construct
  source 1..28: mol_type = other DNA
caaccaactgactcagggggatggatgg

SEQ ID NO: 19088 - DNA, 28 bp, synthetic construct
  source 1..28: mol_type = other DNA
ccatccccctgagtcagttggttgaagg

SEQ ID NO: 19089 - DNA, 28 bp, synthetic construct
  source 1..28: mol_type = other DNA
catccccctgagtcagttggttgaaggg

SEQ ID NO: 19090 - DNA, 28 bp, synthetic construct
  source 1..28: mol_type = other DNA
actcccttcaaccaactgactcaggggg

SEQ ID NO: 19091 - DNA, 28 bp, synthetic construct
  source 1..28: mol_type = other DNA
aactcccttcaaccaactgactcagggg

SEQ ID NO: 19092 - DNA, 28 bp, synthetic construct
  source 1..28: mol_type = other DNA
taactcccttcaaccaactgactcaggg

SEQ ID NO: 19093 - DNA, 28 bp, synthetic construct
  source 1..28: mol_type = other DNA
ataactcccttcaaccaactgactcagg

SEQ ID NO: 19094 - DNA, 28 bp, synthetic construct
  source 1..28: mol_type = other DNA
ggttgaagggagttattttttcaagtgg

SEQ ID NO: 19095 - DNA, 28 bp, synthetic construct
  source 1..28: mol_type = other DNA
aaccagaactgtaaatagtgattgcagg

SEQ ID NO: 19096 - DNA, 28 bp, synthetic construct
  source 1..28: mol_type = other DNA
ttcctgcaatcactatttacagttctgg

SEQ ID NO: 19097 - DNA, 28 bp, synthetic construct
  source 1..28: mol_type = other DNA
ggctataaaaggcagtgagaggaaaggg

SEQ ID NO: 19098 - DNA, 28 bp, synthetic construct
  source 1..28: mol_type = other DNA
tggctataaaaggcagtgagaggaaagg

SEQ ID NO: 19099 - DNA, 28 bp, synthetic construct
  source 1..28: mol_type = other DNA
tatattggctataaaaggcagtgagagg

SEQ ID NO: 19100 - DNA, 28 bp, synthetic construct
  source 1..28: mol_type = other DNA
aagagacatttatattggctataaaagg

SEQ ID NO: 19101 - DNA, 28 bp, synthetic construct
  source 1..28: mol_type = other DNA
aaggtgtgcaaagagacatttatattgg

SEQ ID NO: 19102 - DNA, 28 bp, synthetic construct
  source 1..28: mol_type = other DNA
atgtctctttgcacaccttttgttgtgg

SEQ ID NO: 19103 - DNA, 28 bp, synthetic construct
  source 1..28: mol_type = other DNA
tgttacaatataaaaccacaacaaaagg

SEQ ID NO: 19104 - DNA, 28 bp, synthetic construct
  source 1..28: mol_type = other DNA
taaatacaatagtttcaaagaaaaatgg

SEQ ID NO: 19105 - DNA, 28 bp, synthetic construct
  source 1..28: mol_type = other DNA
ctttgaaactattgtatttaaagtaagg

SEQ ID NO: 19106 - DNA, 28 bp, synthetic construct
  source 1..28: mol_type = other DNA
agcaagtaattaacttatgtttaaaagg

SEQ ID NO: 19107 - DNA, 28 bp, synthetic construct
  source 1..28: mol_type = other DNA
aagtaattaacttatgtttaaaaggtgg

SEQ ID NO: 19108 - DNA, 28 bp, synthetic construct
  source 1..28: mol_type = other DNA
cttcagcaacttttggtacatgatatgg

SEQ ID NO: 19109 - DNA, 28 bp, synthetic construct
  source 1..28: mol_type = other DNA
ctagaagagaaacttcagcaacttttgg

SEQ ID NO: 19110 - DNA, 28 bp, synthetic construct
  source 1..28: mol_type = other DNA
aagttgctgaagtttctcttctagctgg

SEQ ID NO: 19111 - DNA, 28 bp, synthetic construct
  source 1..28: mol_type = other DNA
aagtttctcttctagctggtaaagtagg

SEQ ID NO: 19112 - DNA, 28 bp, synthetic construct
  source 1..28: mol_type = other DNA
ttgcgtagtttcttctgttgtatgatgg

SEQ ID NO: 19113 - DNA, 28 bp, synthetic construct
  source 1..28: mol_type = other DNA
tgtatgatggcgtgagtgtgtgtcttgg

SEQ ID NO: 19114 - DNA, 28 bp, synthetic construct
  source 1..28: mol_type = other DNA
gtatgatggcgtgagtgtgtgtcttggg

SEQ ID NO: 19115 - DNA, 28 bp, synthetic construct
  source 1..28: mol_type = other DNA
aatctaggcacacagtagtacacagcgg

SEQ ID NO: 19116 - DNA, 28 bp, synthetic construct
  source 1..28: mol_type = other DNA
aacacaacgagagtgcatggaatctagg

SEQ ID NO: 19117 - DNA, 28 bp, synthetic construct
  source 1..28: mol_type = other DNA
ttacttcaaacacaacgagagtgcatgg

SEQ ID NO: 19118 - DNA, 28 bp, synthetic construct
  source 1..28: mol_type = other DNA
ctctcgttgtgtttgaagtaaatattgg

SEQ ID NO: 19119 - DNA, 28 bp, synthetic construct
  source 1..28: mol_type = other DNA
tgtgtttgaagtaaatattggagaccgg

SEQ ID NO: 19120 - DNA, 28 bp, synthetic construct
  source 1..28: mol_type = other DNA
gtttgaagtaaatattggagaccggagg

SEQ ID NO: 19121 - DNA, 28 bp, synthetic construct
  source 1..28: mol_type = other DNA
tttgaagtaaatattggagaccggaggg

SEQ ID NO: 19122 - DNA, 28 bp, synthetic construct
  source 1..28: mol_type = other DNA
taaatattggagaccggagggtaacagg

SEQ ID NO: 19123 - DNA, 28 bp, synthetic construct
  source 1..28: mol_type = other DNA
tattggagaccggagggtaacaggttgg

SEQ ID NO: 19124 - DNA, 28 bp, synthetic construct
  source 1..28: mol_type = other DNA
atcaacaggccaacctgttaccctccgg

SEQ ID NO: 19125 - DNA, 28 bp, synthetic construct
  source 1..28: mol_type = other DNA
acagcgattactagctgtaatcaacagg

SEQ ID NO: 19126 - DNA, 28 bp, synthetic construct
  source 1..28: mol_type = other DNA
ggaagctggggtgtcagggagggggcgg

SEQ ID NO: 19127 - DNA, 28 bp, synthetic construct
  source 1..28: mol_type = other DNA
ctgggaagctggggtgtcagggaggggg

SEQ ID NO: 19128 - DNA, 28 bp, synthetic construct
  source 1..28: mol_type = other DNA
cccctccctgacaccccagcttcccagg

SEQ ID NO: 19129 - DNA, 28 bp, synthetic construct
  source 1..28: mol_type = other DNA
tcctgggaagctggggtgtcagggaggg

SEQ ID NO: 19130 - DNA, 28 bp, synthetic construct
  source 1..28: mol_type = other DNA
atcctgggaagctggggtgtcagggagg

SEQ ID NO: 19131 - DNA, 28 bp, synthetic construct
  source 1..28: mol_type = other DNA
cacatcctgggaagctggggtgtcaggg

SEQ ID NO: 19132 - DNA, 28 bp, synthetic construct
  source 1..28: mol_type = other DNA
cctgacaccccagcttcccaggatgtgg

SEQ ID NO: 19133 - DNA, 28 bp, synthetic construct
  source 1..28: mol_type = other DNA
aggctttccacatcctgggaagctgggg

SEQ ID NO: 19134 - DNA, 28 bp, synthetic construct
  source 1..28: mol_type = other DNA
caggctttccacatcctgggaagctggg

SEQ ID NO: 19135 - DNA, 28 bp, synthetic construct
  source 1..28: mol_type = other DNA
ccagcttcccaggatgtggaaagcctgg

SEQ ID NO: 19136 - DNA, 28 bp, synthetic construct
  source 1..28: mol_type = other DNA
ctgagatccaggctttccacatcctggg

SEQ ID NO: 19137 - DNA, 28 bp, synthetic construct
  source 1..28: mol_type = other DNA
gctgagatccaggctttccacatcctgg

SEQ ID NO: 19138 - DNA, 28 bp, synthetic construct
  source 1..28: mol_type = other DNA
gatatggggcaaggagctgagatccagg

SEQ ID NO: 19139 - DNA, 28 bp, synthetic construct
  source 1..28: mol_type = other DNA
caaattacagaagggatatggggcaagg

SEQ ID NO: 19140 - DNA, 28 bp, synthetic construct
  source 1..28: mol_type = other DNA
aggtacaaattacagaagggatatgggg

SEQ ID NO: 19141 - DNA, 28 bp, synthetic construct
  source 1..28: mol_type = other DNA
taggtacaaattacagaagggatatggg

SEQ ID NO: 19142 - DNA, 28 bp, synthetic construct
  source 1..28: mol_type = other DNA
ttaggtacaaattacagaagggatatgg

SEQ ID NO: 19143 - DNA, 28 bp, synthetic construct
  source 1..28: mol_type = other DNA
cactctttaggtacaaattacagaaggg

SEQ ID NO: 19144 - DNA, 28 bp, synthetic construct
  source 1..28: mol_type = other DNA
acactctttaggtacaaattacagaagg

SEQ ID NO: 19145 - DNA, 28 bp, synthetic construct
  source 1..28: mol_type = other DNA
ttgaattaggataatcacactctttagg

SEQ ID NO: 19146 - DNA, 28 bp, synthetic construct
  source 1..28: mol_type = other DNA
gatgagttttagtgactcttgaattagg

SEQ ID NO: 19147 - DNA, 28 bp, synthetic construct
  source 1..28: mol_type = other DNA
tcacattatcattgcatatcagcaaagg

SEQ ID NO: 19148 - DNA, 28 bp, synthetic construct
  source 1..28: mol_type = other DNA
cacattatcattgcatatcagcaaaggg

SEQ ID NO: 19149 - DNA, 28 bp, synthetic construct
  source 1..28: mol_type = other DNA
gctggtatgtgaagcaattggtgctagg

SEQ ID NO: 19150 - DNA, 28 bp, synthetic construct
  source 1..28: mol_type = other DNA
ggaacatgctggtatgtgaagcaattgg

SEQ ID NO: 19151 - DNA, 28 bp, synthetic construct
  source 1..28: mol_type = other DNA
attctaaattggaaatggaacatgctgg

SEQ ID NO: 19152 - DNA, 28 bp, synthetic construct
  source 1..28: mol_type = other DNA
tatgtggctaattctaaattggaaatgg

SEQ ID NO: 19153 - DNA, 28 bp, synthetic construct
  source 1..28: mol_type = other DNA
ttttattatgtggctaattctaaattgg

SEQ ID NO: 19154 - DNA, 28 bp, synthetic construct
  source 1..28: mol_type = other DNA
aggaagattctaagattttattatgtgg

SEQ ID NO: 19155 - DNA, 28 bp, synthetic construct
  source 1..28: mol_type = other DNA
ctacatctcaggcagctctttctcaagg

SEQ ID NO: 19156 - DNA, 28 bp, synthetic construct
  source 1..28: mol_type = other DNA
ctgcctgagatgtagttttgttatatgg

SEQ ID NO: 19157 - DNA, 28 bp, synthetic construct
  source 1..28: mol_type = other DNA
gaaccatataacaaaactacatctcagg

SEQ ID NO: 19158 - DNA, 28 bp, synthetic construct
  source 1..28: mol_type = other DNA
gaaaaaagcacaaaaatggtcggtgggg

SEQ ID NO: 19159 - DNA, 28 bp, synthetic construct
  source 1..28: mol_type = other DNA
agaaaaaagcacaaaaatggtcggtggg

SEQ ID NO: 19160 - DNA, 28 bp, synthetic construct
  source 1..28: mol_type = other DNA
aagaaaaaagcacaaaaatggtcggtgg

SEQ ID NO: 19161 - DNA, 28 bp, synthetic construct
  source 1..28: mol_type = other DNA
aacaagaaaaaagcacaaaaatggtcgg

SEQ ID NO: 19162 - DNA, 28 bp, synthetic construct
  source 1..28: mol_type = other DNA
acaaaacaagaaaaaagcacaaaaatgg

SEQ ID NO: 19163 - DNA, 28 bp, synthetic construct
  source 1..28: mol_type = other DNA
atctcgcgtttgttttggcaagaagagg

SEQ ID NO: 19164 - DNA, 28 bp, synthetic construct
  source 1..28: mol_type = other DNA
ttgccaaaacaaacgcgagatgaactgg

SEQ ID NO: 19165 - DNA, 28 bp, synthetic construct
  source 1..28: mol_type = other DNA
agtccagttcatctcgcgtttgttttgg

SEQ ID NO: 19166 - DNA, 28 bp, synthetic construct
  source 1..28: mol_type = other DNA
ggaactgaagaaaggaaggatacactgg

SEQ ID NO: 19167 - DNA, 28 bp, synthetic construct
  source 1..28: mol_type = other DNA
attattgctggaactgaagaaaggaagg

SEQ ID NO: 19168 - DNA, 28 bp, synthetic construct
  source 1..28: mol_type = other DNA
attcattattgctggaactgaagaaagg

SEQ ID NO: 19169 - DNA, 28 bp, synthetic construct
  source 1..28: mol_type = other DNA
tttcttcagttccagcaataatgaatgg

SEQ ID NO: 19170 - DNA, 28 bp, synthetic construct
  source 1..28: mol_type = other DNA
aaaaaagttgaccattcattattgctgg

SEQ ID NO: 19171 - DNA, 28 bp, synthetic construct
  source 1..28: mol_type = other DNA
acatcttaaataagtctaataattttgg

SEQ ID NO: 19172 - DNA, 28 bp, synthetic construct
  source 1..28: mol_type = other DNA
attattagacttatttaagatgtacagg

SEQ ID NO: 19173 - DNA, 28 bp, synthetic construct
  source 1..28: mol_type = other DNA
agaaaaaagaagcacataatgcttttgg

SEQ ID NO: 19174 - DNA, 28 bp, synthetic construct
  source 1..28: mol_type = other DNA
gaagcacataatgcttttggtgcgatgg

SEQ ID NO: 19175 - DNA, 28 bp, synthetic construct
  source 1..28: mol_type = other DNA
ggaaacaatattgcatattaatatgtgg

SEQ ID NO: 19176 - DNA, 28 bp, synthetic construct
  source 1..28: mol_type = other DNA
tataaaaaactgtattagaaagtattgg

SEQ ID NO: 19177 - DNA, 28 bp, synthetic construct
  source 1..28: mol_type = other DNA
atacagttttttataatgttgtgtgtgg

SEQ ID NO: 19178 - DNA, 28 bp, synthetic construct
  source 1..28: mol_type = other DNA
ataatgttgtgtgtggtgattgttcagg

SEQ ID NO: 19179 - DNA, 28 bp, synthetic construct
  source 1..28: mol_type = other DNA
aatctgttgtatccagtacagctttagg

SEQ ID NO: 19180 - DNA, 28 bp, synthetic construct
  source 1..28: mol_type = other DNA
ggcagctgaagacctaaagctgtactgg

SEQ ID NO: 19181 - DNA, 28 bp, synthetic construct
  source 1..28: mol_type = other DNA
agctttaggtcttcagctgcccttctgg

SEQ ID NO: 19182 - DNA, 28 bp, synthetic construct
  source 1..28: mol_type = other DNA
ctgcccttctggcgagtacatgcacagg

SEQ ID NO: 19183 - DNA, 28 bp, synthetic construct
  source 1..28: mol_type = other DNA
aatcctgtgcatgtactcgccagaaggg

SEQ ID NO: 19184 - DNA, 28 bp, synthetic construct
  source 1..28: mol_type = other DNA
caatcctgtgcatgtactcgccagaagg

SEQ ID NO: 19185 - DNA, 28 bp, synthetic construct
  source 1..28: mol_type = other DNA
atttaacatcatcatagaggcagactgg

SEQ ID NO: 19186 - DNA, 28 bp, synthetic construct
  source 1..28: mol_type = other DNA
cagcaataatttaacatcatcatagagg

SEQ ID NO: 19187 - DNA, 28 bp, synthetic construct
  source 1..28: mol_type = other DNA
aattattgctgtttagctgtgaacaagg

SEQ ID NO: 19188 - DNA, 28 bp, synthetic construct
  source 1..28: mol_type = other DNA
attattgctgtttagctgtgaacaaggg

SEQ ID NO: 19189 - DNA, 28 bp, synthetic construct
  source 1..28: mol_type = other DNA
tagctgtgaacaagggatgtaccactgg

SEQ ID NO: 19190 - DNA, 28 bp, synthetic construct
  source 1..28: mol_type = other DNA
ctgtgaacaagggatgtaccactggagg

SEQ ID NO: 19191 - DNA, 28 bp, synthetic construct
  source 1..28: mol_type = other DNA
acaaaaggatactctattcctccagtgg

SEQ ID NO: 19192 - DNA, 28 bp, synthetic construct
  source 1..28: mol_type = other DNA
agaagcatttcaaaatgtgtacaaaagg

SEQ ID NO: 19193 - DNA, 28 bp, synthetic construct
  source 1..28: mol_type = other DNA
ctgccctatcccgtgaagtccacactgg

SEQ ID NO: 19194 - DNA, 28 bp, synthetic construct
  source 1..28: mol_type = other DNA
acgccagtgtggacttcacgggataggg

SEQ ID NO: 19195 - DNA, 28 bp, synthetic construct
  source 1..28: mol_type = other DNA
tacgccagtgtggacttcacgggatagg

SEQ ID NO: 19196 - DNA, 28 bp, synthetic construct
  source 1..28: mol_type = other DNA
tctcttacgccagtgtggacttcacggg

SEQ ID NO: 19197 - DNA, 28 bp, synthetic construct
  source 1..28: mol_type = other DNA
ttctcttacgccagtgtggacttcacgg

SEQ ID NO: 19198 - DNA, 28 bp, synthetic construct
  source 1..28: mol_type = other DNA
gtgaagtccacactggcgtaagagaagg

SEQ ID NO: 19199 - DNA, 28 bp, synthetic construct
  source 1..28: mol_type = other DNA
tgctgggccttctcttacgccagtgtgg

SEQ ID NO: 19200 - DNA, 28 bp, synthetic construct
  source 1..28: mol_type = other DNA
ggcgtaagagaaggcccagcagagcagg

SEQ ID NO: 19201 - DNA, 28 bp, synthetic construct
  source 1..28: mol_type = other DNA
agtctaggcagattcctgctctgctggg

SEQ ID NO: 19202 - DNA, 28 bp, synthetic construct
  source 1..28: mol_type = other DNA
aagtctaggcagattcctgctctgctgg

SEQ ID NO: 19203 - DNA, 28 bp, synthetic construct
  source 1..28: mol_type = other DNA
ttgggatctcattgggagaaagtctagg

SEQ ID NO: 19204 - DNA, 28 bp, synthetic construct
  source 1..28: mol_type = other DNA
tctcccaatgagatcccaatatgagagg

SEQ ID NO: 19205 - DNA, 28 bp, synthetic construct
  source 1..28: mol_type = other DNA
ctcccaatgagatcccaatatgagaggg

SEQ ID NO: 19206 - DNA, 28 bp, synthetic construct
  source 1..28: mol_type = other DNA
ctccctctcatattgggatctcattggg

SEQ ID NO: 19207 - DNA, 28 bp, synthetic construct
  source 1..28: mol_type = other DNA
tctccctctcatattgggatctcattgg

SEQ ID NO: 19208 - DNA, 28 bp, synthetic construct
  source 1..28: mol_type = other DNA
atcccaatatgagagggagaagagatgg

SEQ ID NO: 19209 - DNA, 28 bp, synthetic construct
  source 1..28: mol_type = other DNA
tcccaatatgagagggagaagagatggg

SEQ ID NO: 19210 - DNA, 28 bp, synthetic construct
  source 1..28: mol_type = other DNA
gcccatctcttctccctctcatattggg

SEQ ID NO: 19211 - DNA, 28 bp, synthetic construct
  source 1..28: mol_type = other DNA
ggcccatctcttctccctctcatattgg

SEQ ID NO: 19212 - DNA, 28 bp, synthetic construct
  source 1..28: mol_type = other DNA
atgagagggagaagagatgggcctcagg

SEQ ID NO: 19213 - DNA, 28 bp, synthetic construct
  source 1..28: mol_type = other DNA
gcctcaggacagctgcaataccacttgg

SEQ ID NO: 19214 - DNA, 28 bp, synthetic construct
  source 1..28: mol_type = other DNA
cctcaggacagctgcaataccacttggg

SEQ ID NO: 19215 - DNA, 28 bp, synthetic construct
  source 1..28: mol_type = other DNA
ctgcaataccacttgggaacacatgtgg

SEQ ID NO: 19216 - DNA, 28 bp, synthetic construct
  source 1..28: mol_type = other DNA
tcaagacaccacatgtgttcccaagtgg

SEQ ID NO: 19217 - DNA, 28 bp, synthetic construct
  source 1..28: mol_type = other DNA
tgggaacacatgtggtgtcttgatgtgg

SEQ ID NO: 19218 - DNA, 28 bp, synthetic construct
  source 1..28: mol_type = other DNA
ggtacgttgtgctgaactgctgcgctgg

SEQ ID NO: 19219 - DNA, 28 bp, synthetic construct
  source 1..28: mol_type = other DNA
acgtacctcccatctacaacagtgctgg

SEQ ID NO: 19220 - DNA, 28 bp, synthetic construct
  source 1..28: mol_type = other DNA
cacgtccagcactgttgtagatgggagg

SEQ ID NO: 19221 - DNA, 28 bp, synthetic construct
  source 1..28: mol_type = other DNA
ctcccatctacaacagtgctggacgtgg

SEQ ID NO: 19222 - DNA, 28 bp, synthetic construct
  source 1..28: mol_type = other DNA
tcccatctacaacagtgctggacgtggg

SEQ ID NO: 19223 - DNA, 28 bp, synthetic construct
  source 1..28: mol_type = other DNA
tcccacgtccagcactgttgtagatggg

SEQ ID NO: 19224 - DNA, 28 bp, synthetic construct
  source 1..28: mol_type = other DNA
ttcccacgtccagcactgttgtagatgg

SEQ ID NO: 19225 - DNA, 28 bp, synthetic construct
  source 1..28: mol_type = other DNA
gtgggaattctaagtcccagtcttgagg

SEQ ID NO: 19226 - DNA, 28 bp, synthetic construct
  source 1..28: mol_type = other DNA
tgggaattctaagtcccagtcttgaggg

SEQ ID NO: 19227 - DNA, 28 bp, synthetic construct
  source 1..28: mol_type = other DNA
gaattctaagtcccagtcttgagggtgg

SEQ ID NO: 19228 - DNA, 28 bp, synthetic construct
  source 1..28: mol_type = other DNA
aattctaagtcccagtcttgagggtggg

SEQ ID NO: 19229 - DNA, 28 bp, synthetic construct
  source 1..28: mol_type = other DNA
tctaagtcccagtcttgagggtgggtgg

SEQ ID NO: 19230 - DNA, 28 bp, synthetic construct
  source 1..28: mol_type = other DNA
tcccagtcttgagggtgggtggagatgg

SEQ ID NO: 19231 - DNA, 28 bp, synthetic construct
  source 1..28: mol_type = other DNA
tccatctccacccaccctcaagactggg

SEQ ID NO: 19232 - DNA, 28 bp, synthetic construct
  source 1..28: mol_type = other DNA
ctccatctccacccaccctcaagactgg

SEQ ID NO: 19233 - DNA, 28 bp, synthetic construct
  source 1..28: mol_type = other DNA
cagtcttgagggtgggtggagatggagg

SEQ ID NO: 19234 - DNA, 28 bp, synthetic construct
  source 1..28: mol_type = other DNA
agtcttgagggtgggtggagatggaggg

SEQ ID NO: 19235 - DNA, 28 bp, synthetic construct
  source 1..28: mol_type = other DNA
actgaagcatgctgcagtggagaactgg

SEQ ID NO: 19236 - DNA, 28 bp, synthetic construct
  source 1..28: mol_type = other DNA
acagaatgactgaagcatgctgcagtgg

SEQ ID NO: 19237 - DNA, 28 bp, synthetic construct
  source 1..28: mol_type = other DNA
cagcatgcttcagtcattctgtgagtgg

SEQ ID NO: 19238 - DNA, 28 bp, synthetic construct
  source 1..28: mol_type = other DNA
atgcttcagtcattctgtgagtggccgg

SEQ ID NO: 19239 - DNA, 28 bp, synthetic construct
  source 1..28: mol_type = other DNA
tgcttcagtcattctgtgagtggccggg

SEQ ID NO: 19240 - DNA, 28 bp, synthetic construct
  source 1..28: mol_type = other DNA
agtcattctgtgagtggccgggcccagg

SEQ ID NO: 19241 - DNA, 28 bp, synthetic construct
  source 1..28: mol_type = other DNA
gtcattctgtgagtggccgggcccaggg

SEQ ID NO: 19242 - DNA, 28 bp, synthetic construct
  source 1..28: mol_type = other DNA
agtgaaattgtgagggccctgggcccgg

SEQ ID NO: 19243 - DNA, 28 bp, synthetic construct
  source 1..28: mol_type = other DNA
aaggtagtgaaattgtgagggccctggg

SEQ ID NO: 19244 - DNA, 28 bp, synthetic construct
  source 1..28: mol_type = other DNA
caaggtagtgaaattgtgagggccctgg

SEQ ID NO: 19245 - DNA, 28 bp, synthetic construct
  source 1..28: mol_type = other DNA
aaaagacaaggtagtgaaattgtgaggg

SEQ ID NO: 19246 - DNA, 28 bp, synthetic construct
  source 1..28: mol_type = other DNA
taaaagacaaggtagtgaaattgtgagg

SEQ ID NO: 19247 - DNA, 28 bp, synthetic construct
  source 1..28: mol_type = other DNA
aattcttatgactatgtaaaagacaagg

SEQ ID NO: 19248 - DNA, 28 bp, synthetic construct
  source 1..28: mol_type = other DNA
tttacagcgtcaaaaggctatgttgagg

SEQ ID NO: 19249 - DNA, 28 bp, synthetic construct
  source 1..28: mol_type = other DNA
aatactcaagatttacagcgtcaaaagg

SEQ ID NO: 19250 - DNA, 28 bp, synthetic construct
  source 1..28: mol_type = other DNA
attcatttacccttttctgatctcctgg

SEQ ID NO: 19251 - DNA, 28 bp, synthetic construct
  source 1..28: mol_type = other DNA
cagctgtttccaggagatcagaaaaggg

SEQ ID NO: 19252 - DNA, 28 bp, synthetic construct
  source 1..28: mol_type = other DNA
gcagctgtttccaggagatcagaaaagg

SEQ ID NO: 19253 - DNA, 28 bp, synthetic construct
  source 1..28: mol_type = other DNA
gcaatgcaggcaggcagctgtttccagg

SEQ ID NO: 19254 - DNA, 28 bp, synthetic construct
  source 1..28: mol_type = other DNA
tcgggaagagaagtgcaatgcaggcagg

SEQ ID NO: 19255 - DNA, 28 bp, synthetic construct
  source 1..28: mol_type = other DNA
tgcctgcattgcacttctcttcccgagg

SEQ ID NO: 19256 - DNA, 28 bp, synthetic construct
  source 1..28: mol_type = other DNA
ctcctcgggaagagaagtgcaatgcagg

SEQ ID NO: 19257 - DNA, 28 bp, synthetic construct
  source 1..28: mol_type = other DNA
gcattgcacttctcttcccgaggagtgg

SEQ ID NO: 19258 - DNA, 28 bp, synthetic construct
  source 1..28: mol_type = other DNA
cattgcacttctcttcccgaggagtggg

SEQ ID NO: 19259 - DNA, 28 bp, synthetic construct
  source 1..28: mol_type = other DNA
attgcacttctcttcccgaggagtgggg

SEQ ID NO: 19260 - DNA, 28 bp, synthetic construct
  source 1..28: mol_type = other DNA
gacttttaaatttaccccactcctcggg

SEQ ID NO: 19261 - DNA, 28 bp, synthetic construct
  source 1..28: mol_type = other DNA
tgacttttaaatttaccccactcctcgg

SEQ ID NO: 19262 - DNA, 28 bp, synthetic construct
  source 1..28: mol_type = other DNA
taaatttaaaagtcaagttatagtttgg

SEQ ID NO: 19263 - DNA, 28 bp, synthetic construct
  source 1..28: mol_type = other DNA
ggatgttagtatagaattttgaaattgg

SEQ ID NO: 19264 - DNA, 28 bp, synthetic construct
  source 1..28: mol_type = other DNA
gatgttagtatagaattttgaaattggg

SEQ ID NO: 19265 - DNA, 28 bp, synthetic construct
  source 1..28: mol_type = other DNA
attttgaaattgggaattaaaaatcagg

SEQ ID NO: 19266 - DNA, 28 bp, synthetic construct
  source 1..28: mol_type = other DNA
gaaattgggaattaaaaatcaggactgg

SEQ ID NO: 19267 - DNA, 28 bp, synthetic construct
  source 1..28: mol_type = other DNA
aaattgggaattaaaaatcaggactggg

SEQ ID NO: 19268 - DNA, 28 bp, synthetic construct
  source 1..28: mol_type = other DNA
aattgggaattaaaaatcaggactgggg

SEQ ID NO: 19269 - DNA, 28 bp, synthetic construct
  source 1..28: mol_type = other DNA
ggaattaaaaatcaggactggggactgg

SEQ ID NO: 19270 - DNA, 28 bp, synthetic construct
  source 1..28: mol_type = other DNA
gaattaaaaatcaggactggggactggg

SEQ ID NO: 19271 - DNA, 28 bp, synthetic construct
  source 1..28: mol_type = other DNA
catcagaaatgggatcagaaatttttgg

SEQ ID NO: 19272 - DNA, 28 bp, synthetic construct
  source 1..28: mol_type = other DNA
caaaaatttctgatcccatttctgatgg

SEQ ID NO: 19273 - DNA, 28 bp, synthetic construct
  source 1..28: mol_type = other DNA
aaggtgtgacacatccatcagaaatggg

SEQ ID NO: 19274 - DNA, 28 bp, synthetic construct
  source 1..28: mol_type = other DNA
aaaggtgtgacacatccatcagaaatgg

SEQ ID NO: 19275 - DNA, 28 bp, synthetic construct
  source 1..28: mol_type = other DNA
ccttttctgtcaaaataaaatgtcttgg

SEQ ID NO: 19276 - DNA, 28 bp, synthetic construct
  source 1..28: mol_type = other DNA
tttctgtcaaaataaaatgtcttggagg

SEQ ID NO: 19277 - DNA, 28 bp, synthetic construct
  source 1..28: mol_type = other DNA
aaatgtcttggaggttatgactccttgg

SEQ ID NO: 19278 - DNA, 28 bp, synthetic construct
  source 1..28: mol_type = other DNA
atgagaatgtgagaaggtttcaccaagg

SEQ ID NO: 19279 - RNA, 20 nt, synthetic construct
  source 1..20: mol_type = other RNA
aaaacacaccaaacctctgt

SEQ ID NO: 19280 - RNA, 20 nt, synthetic construct
  source 1..20: mol_type = other RNA
caaacctctgtaggatactt

SEQ ID NO: 19281 - RNA, 20 nt, synthetic construct
  source 1..20: mol_type = other RNA
agtgttcagcctacatttac

SEQ ID NO: 19282 - RNA, 20 nt, synthetic construct
  source 1..20: mol_type = other RNA
tagagaatgcctgtaaatgt

SEQ ID NO: 19283 - RNA, 20 nt, synthetic construct
  source 1..20: mol_type = other RNA
tttacaggcattctctaatt

SEQ ID NO: 19284 - RNA, 20 nt, synthetic construct
  source 1..20: mol_type = other RNA
acaggcattctctaattagg

SEQ ID NO: 19285 - RNA, 20 nt, synthetic construct
  source 1..20: mol_type = other RNA
aatctggagatcgttggcta

SEQ ID NO: 19286 - RNA, 20 nt, synthetic construct
  source 1..20: mol_type = other RNA
tcaaataatctggagatcgt

SEQ ID NO: 19287 - RNA, 20 nt, synthetic construct
  source 1..20: mol_type = other RNA
tgtttgcttttcaaataatc

SEQ ID NO: 19288 - RNA, 20 nt, synthetic construct
  source 1..20: mol_type = other RNA
gcaacaatattcttttaaaa

SEQ ID NO: 19289 - RNA, 20 nt, synthetic construct
  source 1..20: mol_type = other RNA
gcttttattgagacacttgt

SEQ ID NO: 19290 - RNA, 20 nt, synthetic construct
  source 1..20: mol_type = other RNA
cttttattgagacacttgta

SEQ ID NO: 19291 - RNA, 20 nt, synthetic construct
  source 1..20: mol_type = other RNA
gattctgcaacatttccagt

SEQ ID NO: 19292 - RNA, 20 nt, synthetic construct
  source 1..20: mol_type = other RNA
attctgcaacatttccagtt

SEQ ID NO: 19293 - RNA, 20 nt, synthetic construct
  source 1..20: mol_type = other RNA
tggaaataaagattcccaac

SEQ ID NO: 19294 - RNA, 20 nt, synthetic construct
  source 1..20: mol_type = other RNA
aatctttatttccaactctt

SEQ ID NO: 19295 - RNA, 20 nt, synthetic construct
  source 1..20: mol_type = other RNA
atctttatttccaactctta

SEQ ID NO: 19296 - RNA, 20 nt, synthetic construct
  source 1..20: mol_type = other RNA
tttatttccaactcttaggg

SEQ ID NO: 19297 - RNA, 20 nt, synthetic construct
  source 1..20: mol_type = other RNA
ggtttagccaccctaagagt

SEQ ID NO: 19298 - RNA, 20 nt, synthetic construct
  source 1..20: mol_type = other RNA
acccttttctgaatgccaaa

SEQ ID NO: 19299 - RNA, 20 nt, synthetic construct
  source 1..20: mol_type = other RNA
gccttttggcattcagaaaa

SEQ ID NO: 19300 - RNA, 20 nt, synthetic construct
  source 1..20: mol_type = other RNA
tgccttttggcattcagaaa

SEQ ID NO: 19301 - RNA, 20 nt, synthetic construct
  source 1..20: mol_type = other RNA
ggtggtgagagtgtgccttt

SEQ ID NO: 19302 - RNA, 20 nt, synthetic construct
  source 1..20: mol_type = other RNA
acactctcaccaccttaatg

SEQ ID NO: 19303 - RNA, 20 nt, synthetic construct
  source 1..20: mol_type = other RNA
agtgtgtttcctcattaagg

SEQ ID NO: 19304 - RNA, 20 nt, synthetic construct
  source 1..20: mol_type = other RNA
ataagtgtgtttcctcatta

SEQ ID NO: 19305 - RNA, 20 nt, synthetic construct
  source 1..20: mol_type = other RNA
tgtctgttccgatatccaac

SEQ ID NO: 19306 - RNA, 20 nt, synthetic construct
  source 1..20: mol_type = other RNA
gtctgttccgatatccaact

SEQ ID NO: 19307 - RNA, 20 nt, synthetic construct
  source 1..20: mol_type = other RNA
tccgatatccaactgggacc

SEQ ID NO: 19308 - RNA, 20 nt, synthetic construct
  source 1..20: mol_type = other RNA
tccaggtcccagttggatat

SEQ ID NO: 19309 - RNA, 20 nt, synthetic construct
  source 1..20: mol_type = other RNA
cttggggtccaggtcccagt

SEQ ID NO: 19310 - RNA, 20 nt, synthetic construct
  source 1..20: mol_type = other RNA
gacctggaccccaagccccg

SEQ ID NO: 19311 - RNA, 20 nt, synthetic construct
  source 1..20: mol_type = other RNA
caccacggggcttggggtcc

SEQ ID NO: 19312 - RNA, 20 nt, synthetic construct
  source 1..20: mol_type = other RNA
acaagacaccacggggcttg

SEQ ID NO: 19313 - RNA, 20 nt, synthetic construct
  source 1..20: mol_type = other RNA
tacaagacaccacggggctt

SEQ ID NO: 19314 - RNA, 20 nt, synthetic construct
  source 1..20: mol_type = other RNA
gtacaagacaccacggggct

SEQ ID NO: 19315 - RNA, 20 nt, synthetic construct
  source 1..20: mol_type = other RNA
gacttgtacaagacaccacg

SEQ ID NO: 19316 - RNA, 20 nt, synthetic construct
  source 1..20: mol_type = other RNA
agacttgtacaagacaccac

SEQ ID NO: 19317 - RNA, 20 nt, synthetic construct
  source 1..20: mol_type = other RNA
gagacttgtacaagacacca

SEQ ID NO: 19318 - RNA, 20 nt, synthetic construct
  source 1..20: mol_type = other RNA
ggcttctgagttgtacgtgg

SEQ ID NO: 19319 - RNA, 20 nt, synthetic construct
  source 1..20: mol_type = other RNA
acaggcttctgagttgtacg

SEQ ID NO: 19320 - RNA, 20 nt, synthetic construct
  source 1..20: mol_type = other RNA
aactcagaagcctgttaatc

SEQ ID NO: 19321 - RNA, 20 nt, synthetic construct
  source 1..20: mol_type = other RNA
actcagaagcctgttaatca

SEQ ID NO: 19322 - RNA, 20 nt, synthetic construct
  source 1..20: mol_type = other RNA
cagaagcctgttaatcaggg

SEQ ID NO: 19323 - RNA, 20 nt, synthetic construct
  source 1..20: mol_type = other RNA
agaagcctgttaatcaggga

SEQ ID NO: 19324 - RNA, 20 nt, synthetic construct
  source 1..20: mol_type = other RNA
aattaccctccctgattaac

SEQ ID NO: 19325 - RNA, 20 nt, synthetic construct
  source 1..20: mol_type = other RNA
atttccaaataaatgtgagc

SEQ ID NO: 19326 - RNA, 20 nt, synthetic construct
  source 1..20: mol_type = other RNA
taggccagctcacatttatt

SEQ ID NO: 19327 - RNA, 20 nt, synthetic construct
  source 1..20: mol_type = other RNA
tgagctggcctaaatccagc

SEQ ID NO: 19328 - RNA, 20 nt, synthetic construct
  source 1..20: mol_type = other RNA
agaaataaccagctggattt

SEQ ID NO: 19329 - RNA, 20 nt, synthetic construct
  source 1..20: mol_type = other RNA
ccagctggttatttctgatt

SEQ ID NO: 19330 - RNA, 20 nt, synthetic construct
  source 1..20: mol_type = other RNA
ccaaatcagaaataaccagc

SEQ ID NO: 19331 - RNA, 20 nt, synthetic construct
  source 1..20: mol_type = other RNA
taatctgtagtatcttaatt

SEQ ID NO: 19332 - RNA, 20 nt, synthetic construct
  source 1..20: mol_type = other RNA
aatctgtagtatcttaattt

SEQ ID NO: 19333 - RNA, 20 nt, synthetic construct
  source 1..20: mol_type = other RNA
atctgtagtatcttaatttg

SEQ ID NO: 19334 - RNA, 20 nt, synthetic construct
  source 1..20: mol_type = other RNA
ggacatcctgtcctaagttt

SEQ ID NO: 19335 - RNA, 20 nt, synthetic construct
  source 1..20: mol_type = other RNA
atcctgtcctaagttttggc

SEQ ID NO: 19336 - RNA, 20 nt, synthetic construct
  source 1..20: mol_type = other RNA
caccagccaaaacttaggac

SEQ ID NO: 19337 - RNA, 20 nt, synthetic construct
  source 1..20: mol_type = other RNA
acatgcaccagccaaaactt

SEQ ID NO: 19338 - RNA, 20 nt, synthetic construct
  source 1..20: mol_type = other RNA
tgttgcatctgttgttatac

SEQ ID NO: 19339 - RNA, 20 nt, synthetic construct
  source 1..20: mol_type = other RNA
tccagccccaaattccttaa

SEQ ID NO: 19340 - RNA, 20 nt, synthetic construct
  source 1..20: mol_type = other RNA
taaggaatttggggctggaa

SEQ ID NO: 19341 - RNA, 20 nt, synthetic construct
  source 1..20: mol_type = other RNA
acctttaaggaatttggggc

SEQ ID NO: 19342 - RNA, 20 nt, synthetic construct
  source 1..20: mol_type = other RNA
tagaacctttaaggaatttg

SEQ ID NO: 19343 - RNA, 20 nt, synthetic construct
  source 1..20: mol_type = other RNA
ctagaacctttaaggaattt

SEQ ID NO: 19344 - RNA, 20 nt, synthetic construct
  source 1..20: mol_type = other RNA
actagaacctttaaggaatt

SEQ ID NO: 19345 - RNA, 20 nt, synthetic construct
  source 1..20: mol_type = other RNA
agagtagactagaaccttta

SEQ ID NO: 19346 - RNA, 20 nt, synthetic construct
  source 1..20: mol_type = other RNA
aagcttctcaacaacagtac

SEQ ID NO: 19347 - RNA, 20 nt, synthetic construct
  source 1..20: mol_type = other RNA
tgttgagaagcttacatttt

SEQ ID NO: 19348 - RNA, 20 nt, synthetic construct
  source 1..20: mol_type = other RNA
gttgagaagcttacatttta

SEQ ID NO: 19349 - RNA, 20 nt, synthetic construct
  source 1..20: mol_type = other RNA
gaagcttacattttagggag

SEQ ID NO: 19350 - RNA, 20 nt, synthetic construct
  source 1..20: mol_type = other RNA
cttacattttagggagaggc

SEQ ID NO: 19351 - RNA, 20 nt, synthetic construct
  source 1..20: mol_type = other RNA
ctggtcaaatctctactctc

SEQ ID NO: 19352 - RNA, 20 nt, synthetic construct
  source 1..20: mol_type = other RNA
attaacaagagtctttcttt

SEQ ID NO: 19353 - RNA, 20 nt, synthetic construct
  source 1..20: mol_type = other RNA
ggaaacagactcagaagtta

SEQ ID NO: 19354 - RNA, 20 nt, synthetic construct
  source 1..20: mol_type = other RNA
cagccacttcagacttcttt

SEQ ID NO: 19355 - RNA, 20 nt, synthetic construct
  source 1..20: mol_type = other RNA
tggcctaaagaagtctgaag

SEQ ID NO: 19356 - RNA, 20 nt, synthetic construct
  source 1..20: mol_type = other RNA
tctttaggccactatccttg

SEQ ID NO: 19357 - RNA, 20 nt, synthetic construct
  source 1..20: mol_type = other RNA
gtcagtcacctcaaggatag

SEQ ID NO: 19358 - RNA, 20 nt, synthetic construct
  source 1..20: mol_type = other RNA
gaggctggtcagtcacctca

SEQ ID NO: 19359 - RNA, 20 nt, synthetic construct
  source 1..20: mol_type = other RNA
gtgactgaccagcctcctca

SEQ ID NO: 19360 - RNA, 20 nt, synthetic construct
  source 1..20: mol_type = other RNA
tgaccagcctcctcatggat

SEQ ID NO: 19361 - RNA, 20 nt, synthetic construct
  source 1..20: mol_type = other RNA
actccaatccatgaggaggc

SEQ ID NO: 19362 - RNA, 20 nt, synthetic construct
  source 1..20: mol_type = other RNA
ggaaactccaatccatgagg

SEQ ID NO: 19363 - RNA, 20 nt, synthetic construct
  source 1..20: mol_type = other RNA
atgggaaactccaatccatg

SEQ ID NO: 19364 - RNA, 20 nt, synthetic construct
  source 1..20: mol_type = other RNA
cccatcattgttttaattgc

SEQ ID NO: 19365 - RNA, 20 nt, synthetic construct
  source 1..20: mol_type = other RNA
ccagcaattaaaacaatgat

SEQ ID NO: 19366 - RNA, 20 nt, synthetic construct
  source 1..20: mol_type = other RNA
tccagcaattaaaacaatga

SEQ ID NO: 19367 - RNA, 20 nt, synthetic construct
  source 1..20: mol_type = other RNA
gttttaattgctggaaatgt

SEQ ID NO: 19368 - RNA, 20 nt, synthetic construct
  source 1..20: mol_type = other RNA
agttacaaggaagcagaatt

SEQ ID NO: 19369 - RNA, 20 nt, synthetic construct
  source 1..20: mol_type = other RNA
ctaaaaagcagaaagttaca

SEQ ID NO: 19370 - RNA, 20 nt, synthetic construct
  source 1..20: mol_type = other RNA
ctttttagtacaagttctct

SEQ ID NO: 19371 - RNA, 20 nt, synthetic construct
  source 1..20: mol_type = other RNA
tttttagtacaagttctctt

SEQ ID NO: 19372 - RNA, 20 nt, synthetic construct
  source 1..20: mol_type = other RNA
ttctcttgggaatctacgca

SEQ ID NO: 19373 - RNA, 20 nt, synthetic construct
  source 1..20: mol_type = other RNA
gctgtaaagatggaaggagc

SEQ ID NO: 19374 - RNA, 20 nt, synthetic construct
  source 1..20: mol_type = other RNA
gacagggctgtaaagatgga

SEQ ID NO: 19375 - RNA, 20 nt, synthetic construct
  source 1..20: mol_type = other RNA
cactgacagggctgtaaaga

SEQ ID NO: 19376 - RNA, 20 nt, synthetic construct
  source 1..20: mol_type = other RNA
tgaagagcacagcactgaca

SEQ ID NO: 19377 - RNA, 20 nt, synthetic construct
  source 1..20: mol_type = other RNA
ttgaagagcacagcactgac

SEQ ID NO: 19378 - RNA, 20 nt, synthetic construct
  source 1..20: mol_type = other RNA
gcctttcccttaatagcaag

SEQ ID NO: 19379 - RNA, 20 nt, synthetic construct
  source 1..20: mol_type = other RNA
cctttcccttaatagcaaga

SEQ ID NO: 19380 - RNA, 20 nt, synthetic construct
  source 1..20: mol_type = other RNA
ccctcttgctattaagggaa

SEQ ID NO: 19381 - RNA, 20 nt, synthetic construct
  source 1..20: mol_type = other RNA
aatagcaagagggccaagag

SEQ ID NO: 19382 - RNA, 20 nt, synthetic construct
  source 1..20: mol_type = other RNA
tcttggccctcttgctatta

SEQ ID NO: 19383 - RNA, 20 nt, synthetic construct
  source 1..20: mol_type = other RNA
gggccaagagtggcaaatag

SEQ ID NO: 19384 - RNA, 20 nt, synthetic construct
  source 1..20: mol_type = other RNA
ctgcctctatttgccactct

SEQ ID NO: 19385 - RNA, 20 nt, synthetic construct
  source 1..20: mol_type = other RNA
gggaacaactgtagtgcagg

SEQ ID NO: 19386 - RNA, 20 nt, synthetic construct
  source 1..20: mol_type = other RNA
gatgggaacaactgtagtgc

SEQ ID NO: 19387 - RNA, 20 nt, synthetic construct
  source 1..20: mol_type = other RNA
ctacagttgttcccatcgta

SEQ ID NO: 19388 - RNA, 20 nt, synthetic construct
  source 1..20: mol_type = other RNA
gttcgttttcaccttacgat

SEQ ID NO: 19389 - RNA, 20 nt, synthetic construct
  source 1..20: mol_type = other RNA
cgttcgttttcaccttacga

SEQ ID NO: 19390 - RNA, 20 nt, synthetic construct
  source 1..20: mol_type = other RNA
aaacaaacaaaaaacccatc

SEQ ID NO: 19391 - RNA, 20 nt, synthetic construct
  source 1..20: mol_type = other RNA
cagaatcttaatagcctgat

SEQ ID NO: 19392 - RNA, 20 nt, synthetic construct
  source 1..20: mol_type = other RNA
gcagaatcttaatagcctga

SEQ ID NO: 19393 - RNA, 20 nt, synthetic construct
  source 1..20: mol_type = other RNA
aaaaaaatgtaaacatggat

SEQ ID NO: 19394 - RNA, 20 nt, synthetic construct
  source 1..20: mol_type = other RNA
taaaaaaaaaaatgtaaaca

SEQ ID NO: 19395 - RNA, 20 nt, synthetic construct
  source 1..20: mol_type = other RNA
agacatttacatatatatgc

SEQ ID NO: 19396 - RNA, 20 nt, synthetic construct
  source 1..20: mol_type = other RNA
aggctctgctccttaacaaa

SEQ ID NO: 19397 - RNA, 20 nt, synthetic construct
  source 1..20: mol_type = other RNA
tttcagttcaccttttgtta

SEQ ID NO: 19398 - RNA, 20 nt, synthetic construct
  source 1..20: mol_type = other RNA
aaggtgaactgaaaaactca

SEQ ID NO: 19399 - RNA, 20 nt, synthetic construct
  source 1..20: mol_type = other RNA
aggtgaactgaaaaactcaa

SEQ ID NO: 19400 - RNA, 20 nt, synthetic construct
  source 1..20: mol_type = other RNA
agaaaaacagattttgtacc

SEQ ID NO: 19401 - RNA, 20 nt, synthetic construct
  source 1..20: mol_type = other RNA
atgctttctcttgaggcacc

SEQ ID NO: 19402 - RNA, 20 nt, synthetic construct
  source 1..20: mol_type = other RNA
aaatagaatgctttctcttg

SEQ ID NO: 19403 - RNA, 20 nt, synthetic construct
  source 1..20: mol_type = other RNA
tatttgcagatgacagatct

SEQ ID NO: 19404 - RNA, 20 nt, synthetic construct
  source 1..20: mol_type = other RNA
atttgcagatgacagatctt

SEQ ID NO: 19405 - RNA, 20 nt, synthetic construct
  source 1..20: mol_type = other RNA
acaagtttcctctgtgactg

SEQ ID NO: 19406 - RNA, 20 nt, synthetic construct
  source 1..20: mol_type = other RNA
acagtcacagaggaaacttg

SEQ ID NO: 19407 - RNA, 20 nt, synthetic construct
  source 1..20: mol_type = other RNA
gatggcagccacagtcacag

SEQ ID NO: 19408 - RNA, 20 nt, synthetic construct
  source 1..20: mol_type = other RNA
catctctgatgaaagagtta

SEQ ID NO: 19409 - RNA, 20 nt, synthetic construct
  source 1..20: mol_type = other RNA
cataactctttcatcagaga

SEQ ID NO: 19410 - RNA, 20 nt, synthetic construct
  source 1..20: mol_type = other RNA
gaaagagttatggcattaaa

SEQ ID NO: 19411 - RNA, 20 nt, synthetic construct
  source 1..20: mol_type = other RNA
ttaaatggcaaaagatataa

SEQ ID NO: 19412 - RNA, 20 nt, synthetic construct
  source 1..20: mol_type = other RNA
aaaagatataatggacacac

SEQ ID NO: 19413 - RNA, 20 nt, synthetic construct
  source 1..20: mol_type = other RNA
gatgcttaaaatgaatacaa

SEQ ID NO: 19414 - RNA, 20 nt, synthetic construct
  source 1..20: mol_type = other RNA
atgcttaaaatgaatacaaa

SEQ ID NO: 19415 - RNA, 20 nt, synthetic construct
  source 1..20: mol_type = other RNA
acagtgtgtcatatattaga

SEQ ID NO: 19416 - RNA, 20 nt, synthetic construct
  source 1..20: mol_type = other RNA
tataaatgaatccaccatga

SEQ ID NO: 19417 - RNA, 20 nt, synthetic construct
  source 1..20: mol_type = other RNA
ttagttcaacaccatcatgg

SEQ ID NO: 19418 - RNA, 20 nt, synthetic construct
  source 1..20: mol_type = other RNA
tctttagttcaacaccatca

SEQ ID NO: 19419 - RNA, 20 nt, synthetic construct
  source 1..20: mol_type = other RNA
atccaaaatgcagcactcat

SEQ ID NO: 19420 - RNA, 20 nt, synthetic construct
  source 1..20: mol_type = other RNA
aaccaatgagtgctgcattt

SEQ ID NO: 19421 - RNA, 20 nt, synthetic construct
  source 1..20: mol_type = other RNA
cacttttatacagatctaaa

SEQ ID NO: 19422 - RNA, 20 nt, synthetic construct
  source 1..20: mol_type = other RNA
cagctgtcaaaaacaaaaac

SEQ ID NO: 19423 - RNA, 20 nt, synthetic construct
  source 1..20: mol_type = other RNA
ttttgacagctgtaatgtca

SEQ ID NO: 19424 - RNA, 20 nt, synthetic construct
  source 1..20: mol_type = other RNA
tctggactctcttgtattat

SEQ ID NO: 19425 - RNA, 20 nt, synthetic construct
  source 1..20: mol_type = other RNA
gtccagatatatatcttacg

SEQ ID NO: 19426 - RNA, 20 nt, synthetic construct
  source 1..20: mol_type = other RNA
agatatatatcttacgtggc

SEQ ID NO: 19427 - RNA, 20 nt, synthetic construct
  source 1..20: mol_type = other RNA
agccacgtaagatatatatc

SEQ ID NO: 19428 - RNA, 20 nt, synthetic construct
  source 1..20: mol_type = other RNA
ctctgttgcaagattgtaca

SEQ ID NO: 19429 - RNA, 20 nt, synthetic construct
  source 1..20: mol_type = other RNA
cttgtacaatcttgcaacag

SEQ ID NO: 19430 - RNA, 20 nt, synthetic construct
  source 1..20: mol_type = other RNA
ctgcgctagtatggactttt

SEQ ID NO: 19431 - RNA, 20 nt, synthetic construct
  source 1..20: mol_type = other RNA
agctcaaaactgcgctagta

SEQ ID NO: 19432 - RNA, 20 nt, synthetic construct
  source 1..20: mol_type = other RNA
cgcagttttgagcttttgct

SEQ ID NO: 19433 - RNA, 20 nt, synthetic construct
  source 1..20: mol_type = other RNA
agagcgtttattacacagca

SEQ ID NO: 19434 - RNA, 20 nt, synthetic construct
  source 1..20: mol_type = other RNA
gagcgtttattacacagcaa

SEQ ID NO: 19435 - RNA, 20 nt, synthetic construct
  source 1..20: mol_type = other RNA
ctaaaaaaagaaatctatga

SEQ ID NO: 19436 - RNA, 20 nt, synthetic construct
  source 1..20: mol_type = other RNA
taaaaaaagaaatctatgat

SEQ ID NO: 19437 - RNA, 20 nt, synthetic construct
  source 1..20: mol_type = other RNA
tatgatgggcacacagtaac

SEQ ID NO: 19438 - RNA, 20 nt, synthetic construct
  source 1..20: mol_type = other RNA
atcatgagcatcacttgaat

SEQ ID NO: 19439 - RNA, 20 nt, synthetic construct
  source 1..20: mol_type = other RNA
taatgtgtatagtagacttt

SEQ ID NO: 19440 - RNA, 20 nt, synthetic construct
  source 1..20: mol_type = other RNA
gtctactatacacattagac

SEQ ID NO: 19441 - RNA, 20 nt, synthetic construct
  source 1..20: mol_type = other RNA
tagactggtagcttgtatgt

SEQ ID NO: 19442 - RNA, 20 nt, synthetic construct
  source 1..20: mol_type = other RNA
ctaattcacatggtagtgta

SEQ ID NO: 19443 - RNA, 20 nt, synthetic construct
  source 1..20: mol_type = other RNA
actaattcacatggtagtgt

SEQ ID NO: 19444 - RNA, 20 nt, synthetic construct
  source 1..20: mol_type = other RNA
aagtgttaaactaattcaca

SEQ ID NO: 19445 - RNA, 20 nt, synthetic construct
  source 1..20: mol_type = other RNA
tctgaccaatcatttcacag

SEQ ID NO: 19446 - RNA, 20 nt, synthetic construct
  source 1..20: mol_type = other RNA
ctgaccaatcatttcacaga

SEQ ID NO: 19447 - RNA, 20 nt, synthetic construct
  source 1..20: mol_type = other RNA
ctttccctctgtgaaatgat

SEQ ID NO: 19448 - RNA, 20 nt, synthetic construct
  source 1..20: mol_type = other RNA
gagggaaagaaatgttgaaa

SEQ ID NO: 19449 - RNA, 20 nt, synthetic construct
  source 1..20: mol_type = other RNA
atacacacgaggaaaagcag

SEQ ID NO: 19450 - RNA, 20 nt, synthetic construct
  source 1..20: mol_type = other RNA
gtgactcatgaatacacacg

SEQ ID NO: 19451 - RNA, 20 nt, synthetic construct
  source 1..20: mol_type = other RNA
ttcatgagtcaccagcttat

SEQ ID NO: 19452 - RNA, 20 nt, synthetic construct
  source 1..20: mol_type = other RNA
aatgtgaaaaaccaataagc

SEQ ID NO: 19453 - RNA, 20 nt, synthetic construct
  source 1..20: mol_type = other RNA
gttaccgtgtctgtcagaga

SEQ ID NO: 19454 - RNA, 20 nt, synthetic construct
  source 1..20: mol_type = other RNA
agaaccttctctgacagaca

SEQ ID NO: 19455 - RNA, 20 nt, synthetic construct
  source 1..20: mol_type = other RNA
ttctaagtctatgacaggac

SEQ ID NO: 19456 - RNA, 20 nt, synthetic construct
  source 1..20: mol_type = other RNA
gttatttctaagtctatgac

SEQ ID NO: 19457 - RNA, 20 nt, synthetic construct
  source 1..20: mol_type = other RNA
atagacttagaaataaccac

SEQ ID NO: 19458 - RNA, 20 nt, synthetic construct
  source 1..20: mol_type = other RNA
aataaccactggaactgcag

SEQ ID NO: 19459 - RNA, 20 nt, synthetic construct
  source 1..20: mol_type = other RNA
tgtggccgctgcagttccag

SEQ ID NO: 19460 - RNA, 20 nt, synthetic construct
  source 1..20: mol_type = other RNA
tggttggactgtggggcatg

SEQ ID NO: 19461 - RNA, 20 nt, synthetic construct
  source 1..20: mol_type = other RNA
cagtccaaccagtactcaca

SEQ ID NO: 19462 - RNA, 20 nt, synthetic construct
  source 1..20: mol_type = other RNA
gtgagtactggttggactgt

SEQ ID NO: 19463 - RNA, 20 nt, synthetic construct
  source 1..20: mol_type = other RNA
tgtgagtactggttggactg

SEQ ID NO: 19464 - RNA, 20 nt, synthetic construct
  source 1..20: mol_type = other RNA
actgccttgtgagtactggt

SEQ ID NO: 19465 - RNA, 20 nt, synthetic construct
  source 1..20: mol_type = other RNA
tggtactgccttgtgagtac

SEQ ID NO: 19466 - RNA, 20 nt, synthetic construct
  source 1..20: mol_type = other RNA
ctgcaaagctgtcttctcac

SEQ ID NO: 19467 - RNA, 20 nt, synthetic construct
  source 1..20: mol_type = other RNA
agacagctttgcagtcacac

SEQ ID NO: 19468 - RNA, 20 nt, synthetic construct
  source 1..20: mol_type = other RNA
acactggatatcagagttcc

SEQ ID NO: 19469 - RNA, 20 nt, synthetic construct
  source 1..20: mol_type = other RNA
gttggtgacatgctgcagcc

SEQ ID NO: 19470 - RNA, 20 nt, synthetic construct
  source 1..20: mol_type = other RNA
tgcagcatgtcaccaacgcc

SEQ ID NO: 19471 - RNA, 20 nt, synthetic construct
  source 1..20: mol_type = other RNA
gcagcatgtcaccaacgcca

SEQ ID NO: 19472 - RNA, 20 nt, synthetic construct
  source 1..20: mol_type = other RNA
gtcaccaacgccagggaacc

SEQ ID NO: 19473 - RNA, 20 nt, synthetic construct
  source 1..20: mol_type = other RNA
cgccagggaacctggcactt

SEQ ID NO: 19474 - RNA, 20 nt, synthetic construct
  source 1..20: mol_type = other RNA
agtgccaggttccctggcgt

SEQ ID NO: 19475 - RNA, 20 nt, synthetic construct
  source 1..20: mol_type = other RNA
ggcctaagtgccaggttccc

SEQ ID NO: 19476 - RNA, 20 nt, synthetic construct
  source 1..20: mol_type = other RNA
aacctggcacttaggcctgt

SEQ ID NO: 19477 - RNA, 20 nt, synthetic construct
  source 1..20: mol_type = other RNA
agccaacaggcctaagtgcc

SEQ ID NO: 19478 - RNA, 20 nt, synthetic construct
  source 1..20: mol_type = other RNA
ttggctgctcagtttaactc

SEQ ID NO: 19479 - RNA, 20 nt, synthetic construct
  source 1..20: mol_type = other RNA
agttaaactgagcagccaac

SEQ ID NO: 19480 - RNA, 20 nt, synthetic construct
  source 1..20: mol_type = other RNA
tccggctaagctgccatgca

SEQ ID NO: 19481 - RNA, 20 nt, synthetic construct
  source 1..20: mol_type = other RNA
ccggctaagctgccatgcat

SEQ ID NO: 19482 - RNA, 20 nt, synthetic construct
  source 1..20: mol_type = other RNA
cccatgcatggcagcttagc

SEQ ID NO: 19483 - RNA, 20 nt, synthetic construct
  source 1..20: mol_type = other RNA
ggagtagctgagcccatgca

SEQ ID NO: 19484 - RNA, 20 nt, synthetic construct
  source 1..20: mol_type = other RNA
cagtttgacaacatgactga

SEQ ID NO: 19485 - RNA, 20 nt, synthetic construct
  source 1..20: mol_type = other RNA
cacaattgacagtgaggatg

SEQ ID NO: 19486 - RNA, 20 nt, synthetic construct
  source 1..20: mol_type = other RNA
gcacaattgacagtgaggat

SEQ ID NO: 19487 - RNA, 20 nt, synthetic construct
  source 1..20: mol_type = other RNA
agcacaattgacagtgagga

SEQ ID NO: 19488 - RNA, 20 nt, synthetic construct
  source 1..20: mol_type = other RNA
gaatagcacaattgacagtg

SEQ ID NO: 19489 - RNA, 20 nt, synthetic construct
  source 1..20: mol_type = other RNA
tgctattctgccactcaatc

SEQ ID NO: 19490 - RNA, 20 nt, synthetic construct
  source 1..20: mol_type = other RNA
gctattctgccactcaatct

SEQ ID NO: 19491 - RNA, 20 nt, synthetic construct
  source 1..20: mol_type = other RNA
ctattctgccactcaatctg

SEQ ID NO: 19492 - RNA, 20 nt, synthetic construct
  source 1..20: mol_type = other RNA
tattctgccactcaatctgg

SEQ ID NO: 19493 - RNA, 20 nt, synthetic construct
  source 1..20: mol_type = other RNA
tatctaacccccagattgag

SEQ ID NO: 19494 - RNA, 20 nt, synthetic construct
  source 1..20: mol_type = other RNA
atgcattcttccactgtgac

SEQ ID NO: 19495 - RNA, 20 nt, synthetic construct
  source 1..20: mol_type = other RNA
ggtctaaggaccagtcacag

SEQ ID NO: 19496 - RNA, 20 nt, synthetic construct
  source 1..20: mol_type = other RNA
agttgaagggttttggtcta

SEQ ID NO: 19497 - RNA, 20 nt, synthetic construct
  source 1..20: mol_type = other RNA
aaacccttcaacttttccat

SEQ ID NO: 19498 - RNA, 20 nt, synthetic construct
  source 1..20: mol_type = other RNA
atggaaaagttgaagggttt

SEQ ID NO: 19499 - RNA, 20 nt, synthetic construct
  source 1..20: mol_type = other RNA
gttcctatggaaaagttgaa

SEQ ID NO: 19500 - RNA, 20 nt, synthetic construct
  source 1..20: mol_type = other RNA
agttcctatggaaaagttga

SEQ ID NO: 19501 - RNA, 20 nt, synthetic construct
  source 1..20: mol_type = other RNA
aaatggaagaatagttccta

SEQ ID NO: 19502 - RNA, 20 nt, synthetic construct
  source 1..20: mol_type = other RNA
gtgacagagagcagttgaaa

SEQ ID NO: 19503 - RNA, 20 nt, synthetic construct
  source 1..20: mol_type = other RNA
ctgctctctgtcaccttgca

SEQ ID NO: 19504 - RNA, 20 nt, synthetic construct
  source 1..20: mol_type = other RNA
ttgcatggtagccttttttt

SEQ ID NO: 19505 - RNA, 20 nt, synthetic construct
  source 1..20: mol_type = other RNA
aaaaaaaaggctaccatgca

SEQ ID NO: 19506 - RNA, 20 nt, synthetic construct
  source 1..20: mol_type = other RNA
gtagccttttttttggcagc

SEQ ID NO: 19507 - RNA, 20 nt, synthetic construct
  source 1..20: mol_type = other RNA
taagccagctgccaaaaaaa

SEQ ID NO: 19508 - RNA, 20 nt, synthetic construct
  source 1..20: mol_type = other RNA
tgctccttgcatcttcgctt

SEQ ID NO: 19509 - RNA, 20 nt, synthetic construct
  source 1..20: mol_type = other RNA
gctccttgcatcttcgcttt

SEQ ID NO: 19510 - RNA, 20 nt, synthetic construct
  source 1..20: mol_type = other RNA
cttcccaaagcgaagatgca

SEQ ID NO: 19511 - RNA, 20 nt, synthetic construct
  source 1..20: mol_type = other RNA
ttgggaagactcgtcagacc

SEQ ID NO: 19512 - RNA, 20 nt, synthetic construct
  source 1..20: mol_type = other RNA
gactcgtcagaccaggttcc

SEQ ID NO: 19513 - RNA, 20 nt, synthetic construct
  source 1..20: mol_type = other RNA
ggttcctggtttcatttcgc

SEQ ID NO: 19514 - RNA, 20 nt, synthetic construct
  source 1..20: mol_type = other RNA
gcgaaatgaaaccaggaacc

SEQ ID NO: 19515 - RNA, 20 nt, synthetic construct
  source 1..20: mol_type = other RNA
aatacctgcgaaatgaaacc

SEQ ID NO: 19516 - RNA, 20 nt, synthetic construct
  source 1..20: mol_type = other RNA
cctcaaagtctgacacttgt

SEQ ID NO: 19517 - RNA, 20 nt, synthetic construct
  source 1..20: mol_type = other RNA
ctcaaagtctgacacttgtt

SEQ ID NO: 19518 - RNA, 20 nt, synthetic construct
  source 1..20: mol_type = other RNA
ccaacaagtgtcagactttg

SEQ ID NO: 19519 - RNA, 20 nt, synthetic construct
  source 1..20: mol_type = other RNA
tctgacacttgttgggatcc

SEQ ID NO: 19520 - RNA, 20 nt, synthetic construct
  source 1..20: mol_type = other RNA
gatccaggcccactctcaga

SEQ ID NO: 19521 - RNA, 20 nt, synthetic construct
  source 1..20: mol_type = other RNA
tctccatctgagagtgggcc

SEQ ID NO: 19522 - RNA, 20 nt, synthetic construct
  source 1..20: mol_type = other RNA
gtgcttctccatctgagagt

SEQ ID NO: 19523 - RNA, 20 nt, synthetic construct
  source 1..20: mol_type = other RNA
ggtgcttctccatctgagag

SEQ ID NO: 19524 - RNA, 20 nt, synthetic construct
  source 1..20: mol_type = other RNA
gatgttgttgagtggaaaga

SEQ ID NO: 19525 - RNA, 20 nt, synthetic construct
  source 1..20: mol_type = other RNA
tccactcaacaacatcgtct

SEQ ID NO: 19526 - RNA, 20 nt, synthetic construct
  source 1..20: mol_type = other RNA
accaagacgatgttgttgag

SEQ ID NO: 19527 - RNA, 20 nt, synthetic construct
  source 1..20: mol_type = other RNA
gcacaatgcatctgatagtg

SEQ ID NO: 19528 - RNA, 20 nt, synthetic construct
  source 1..20: mol_type = other RNA
agatgcattgtgcattagtt

SEQ ID NO: 19529 - RNA, 20 nt, synthetic construct
  source 1..20: mol_type = other RNA
gcattgtgcattagtttggt

SEQ ID NO: 19530 - RNA, 20 nt, synthetic construct
  source 1..20: mol_type = other RNA
cgaaactattcatttgactg

SEQ ID NO: 19531 - RNA, 20 nt, synthetic construct
  source 1..20: mol_type = other RNA
attttgaaccatcctctttt

SEQ ID NO: 19532 - RNA, 20 nt, synthetic construct
  source 1..20: mol_type = other RNA
aagctagaccaaaaagagga

SEQ ID NO: 19533 - RNA, 20 nt, synthetic construct
  source 1..20: mol_type = other RNA
ggagaagctagaccaaaaag

SEQ ID NO: 19534 - RNA, 20 nt, synthetic construct
  source 1..20: mol_type = other RNA
tcagattctgaagcatcctc

SEQ ID NO: 19535 - RNA, 20 nt, synthetic construct
  source 1..20: mol_type = other RNA
tgaggatgcttcagaatctg

SEQ ID NO: 19536 - RNA, 20 nt, synthetic construct
  source 1..20: mol_type = other RNA
tgtactgaaggtaattcctg

SEQ ID NO: 19537 - RNA, 20 nt, synthetic construct
  source 1..20: mol_type = other RNA
accttcagtacatgttcctc

SEQ ID NO: 19538 - RNA, 20 nt, synthetic construct
  source 1..20: mol_type = other RNA
ccttcagtacatgttcctct

SEQ ID NO: 19539 - RNA, 20 nt, synthetic construct
  source 1..20: mol_type = other RNA
cccagaggaacatgtactga

SEQ ID NO: 19540 - RNA, 20 nt, synthetic construct
  source 1..20: mol_type = other RNA
gggttatcgttagagatttt

SEQ ID NO: 19541 - RNA, 20 nt, synthetic construct
  source 1..20: mol_type = other RNA
ttaggttcaacttcaaaaac

SEQ ID NO: 19542 - RNA, 20 nt, synthetic construct
  source 1..20: mol_type = other RNA
taggttcaacttcaaaaaca

SEQ ID NO: 19543 - RNA, 20 nt, synthetic construct
  source 1..20: mol_type = other RNA
acttcaaaaacagggtcaaa

SEQ ID NO: 19544 - RNA, 20 nt, synthetic construct
  source 1..20: mol_type = other RNA
cttcaaaaacagggtcaaaa

SEQ ID NO: 19545 - RNA, 20 nt, synthetic construct
  source 1..20: mol_type = other RNA
aaaagggctaccactttcat

SEQ ID NO: 19546 - RNA, 20 nt, synthetic construct
  source 1..20: mol_type = other RNA
gaagaagaatccaatgaaag

SEQ ID NO: 19547 - RNA, 20 nt, synthetic construct
  source 1..20: mol_type = other RNA
caaattttcaaaactgtctg

SEQ ID NO: 19548 - RNA, 20 nt, synthetic construct
  source 1..20: mol_type = other RNA
ctcagacagttttgaaaatt

SEQ ID NO: 19549 - RNA, 20 nt, synthetic construct
  source 1..20: mol_type = other RNA
aactgtcatcttccttccca

SEQ ID NO: 19550 - RNA, 20 nt, synthetic construct
  source 1..20: mol_type = other RNA
caaaaagctcaaccttggga

SEQ ID NO: 19551 - RNA, 20 nt, synthetic construct
  source 1..20: mol_type = other RNA
ctgacaaaaagctcaacctt

SEQ ID NO: 19552 - RNA, 20 nt, synthetic construct
  source 1..20: mol_type = other RNA
gctgacaaaaagctcaacct

SEQ ID NO: 19553 - RNA, 20 nt, synthetic construct
  source 1..20: mol_type = other RNA
agtcttactagcattgactc

SEQ ID NO: 19554 - RNA, 20 nt, synthetic construct
  source 1..20: mol_type = other RNA
atttgaaaatcatgatgaga

SEQ ID NO: 19555 - RNA, 20 nt, synthetic construct
  source 1..20: mol_type = other RNA
agatggattttgatgctgag

SEQ ID NO: 19556 - RNA, 20 nt, synthetic construct
  source 1..20: mol_type = other RNA
aaataaagtcaagcatgaga

SEQ ID NO: 19557 - RNA, 20 nt, synthetic construct
  source 1..20: mol_type = other RNA
ttaaaccccagcaacacgcc

SEQ ID NO: 19558 - RNA, 20 nt, synthetic construct
  source 1..20: mol_type = other RNA
acaagcctggcgtgttgctg

SEQ ID NO: 19559 - RNA, 20 nt, synthetic construct
  source 1..20: mol_type = other RNA
tacaagcctggcgtgttgct

SEQ ID NO: 19560 - RNA, 20 nt, synthetic construct
  source 1..20: mol_type = other RNA
gtacaagcctggcgtgttgc

SEQ ID NO: 19561 - RNA, 20 nt, synthetic construct
  source 1..20: mol_type = other RNA
gcttgtacttttcacaatca

SEQ ID NO: 19562 - RNA, 20 nt, synthetic construct
  source 1..20: mol_type = other RNA
gattgtgaaaagtacaagcc

SEQ ID NO: 19563 - RNA, 20 nt, synthetic construct
  source 1..20: mol_type = other RNA
tcttccttttgttactaaaa

SEQ ID NO: 19564 - RNA, 20 nt, synthetic construct
  source 1..20: mol_type = other RNA
cttccttttgttactaaaat

SEQ ID NO: 19565 - RNA, 20 nt, synthetic construct
  source 1..20: mol_type = other RNA
cttcccattttagtaacaaa

SEQ ID NO: 19566 - RNA, 20 nt, synthetic construct
  source 1..20: mol_type = other RNA
actcttccataaccataaac

SEQ ID NO: 19567 - RNA, 20 nt, synthetic construct
  source 1..20: mol_type = other RNA
tagcagccagtttatggtta

SEQ ID NO: 19568 - RNA, 20 nt, synthetic construct
  source 1..20: mol_type = other RNA
agaagctagcagccagttta

SEQ ID NO: 19569 - RNA, 20 nt, synthetic construct
  source 1..20: mol_type = other RNA
tagcttctcaatttctctcc

SEQ ID NO: 19570 - RNA, 20 nt, synthetic construct
  source 1..20: mol_type = other RNA
cttctcaatttctctcctgg

SEQ ID NO: 19571 - RNA, 20 nt, synthetic construct
  source 1..20: mol_type = other RNA
ttctcaatttctctcctggt

SEQ ID NO: 19572 - RNA, 20 nt, synthetic construct
  source 1..20: mol_type = other RNA
aatttctctcctggtgggat

SEQ ID NO: 19573 - RNA, 20 nt, synthetic construct
  source 1..20: mol_type = other RNA
atttctctcctggtgggata

SEQ ID NO: 19574 - RNA, 20 nt, synthetic construct
  source 1..20: mol_type = other RNA
acaaacagccctatcccacc

SEQ ID NO: 19575 - RNA, 20 nt, synthetic construct
  source 1..20: mol_type = other RNA
ctttgttagaaagcttttcc

SEQ ID NO: 19576 - RNA, 20 nt, synthetic construct
  source 1..20: mol_type = other RNA
aaagcttttcctggcttcat

SEQ ID NO: 19577 - RNA, 20 nt, synthetic construct
  source 1..20: mol_type = other RNA
aagatgattcctatgaagcc

SEQ ID NO: 19578 - RNA, 20 nt, synthetic construct
  source 1..20: mol_type = other RNA
ggaatcatcttcatgaccct

SEQ ID NO: 19579 - RNA, 20 nt, synthetic construct
  source 1..20: mol_type = other RNA
gaatcatcttcatgaccctt

SEQ ID NO: 19580 - RNA, 20 nt, synthetic construct
  source 1..20: mol_type = other RNA
aatcatcttcatgacccttg

SEQ ID NO: 19581 - RNA, 20 nt, synthetic construct
  source 1..20: mol_type = other RNA
gttttagctttagaccccaa

SEQ ID NO: 19582 - RNA, 20 nt, synthetic construct
  source 1..20: mol_type = other RNA
gggtctaaagctaaaacaac

SEQ ID NO: 19583 - RNA, 20 nt, synthetic construct
  source 1..20: mol_type = other RNA
gctaaaacaacaggctcttc

SEQ ID NO: 19584 - RNA, 20 nt, synthetic construct
  source 1..20: mol_type = other RNA
aggcttctcttcaaagaagc

SEQ ID NO: 19585 - RNA, 20 nt, synthetic construct
  source 1..20: mol_type = other RNA
ggcttctcttcaaagaagct

SEQ ID NO: 19586 - RNA, 20 nt, synthetic construct
  source 1..20: mol_type = other RNA
taactttcgttttttcagta

SEQ ID NO: 19587 - RNA, 20 nt, synthetic construct
  source 1..20: mol_type = other RNA
aactttcgttttttcagtaa

SEQ ID NO: 19588 - RNA, 20 nt, synthetic construct
  source 1..20: mol_type = other RNA
tgctcgtaagtgcgcttcac

SEQ ID NO: 19589 - RNA, 20 nt, synthetic construct
  source 1..20: mol_type = other RNA
cgcttcacaggtgccagact

SEQ ID NO: 19590 - RNA, 20 nt, synthetic construct
  source 1..20: mol_type = other RNA
gcttaatcagtctccaagtc

SEQ ID NO: 19591 - RNA, 20 nt, synthetic construct
  source 1..20: mol_type = other RNA
tggagactgattaagccgag

SEQ ID NO: 19592 - RNA, 20 nt, synthetic construct
  source 1..20: mol_type = other RNA
ggagactgattaagccgaga

SEQ ID NO: 19593 - RNA, 20 nt, synthetic construct
  source 1..20: mol_type = other RNA
agggtgcatttgtcttatcc

SEQ ID NO: 19594 - RNA, 20 nt, synthetic construct
  source 1..20: mol_type = other RNA
ttgtcttatcctggccattt

SEQ ID NO: 19595 - RNA, 20 nt, synthetic construct
  source 1..20: mol_type = other RNA
tgtcttatcctggccatttt

SEQ ID NO: 19596 - RNA, 20 nt, synthetic construct
  source 1..20: mol_type = other RNA
tggaaagacccaaaatggcc

SEQ ID NO: 19597 - RNA, 20 nt, synthetic construct
  source 1..20: mol_type = other RNA
ggcgttggaaagacccaaaa

SEQ ID NO: 19598 - RNA, 20 nt, synthetic construct
  source 1..20: mol_type = other RNA
ctagttcactgcaggggcgt

SEQ ID NO: 19599 - RNA, 20 nt, synthetic construct
  source 1..20: mol_type = other RNA
ctgcatctagttcactgcag

SEQ ID NO: 19600 - RNA, 20 nt, synthetic construct
  source 1..20: mol_type = other RNA
tctgcatctagttcactgca

SEQ ID NO: 19601 - RNA, 20 nt, synthetic construct
  source 1..20: mol_type = other RNA
ctctgcatctagttcactgc

SEQ ID NO: 19602 - RNA, 20 nt, synthetic construct
  source 1..20: mol_type = other RNA
tagatgcagagtgatagttg

SEQ ID NO: 19603 - RNA, 20 nt, synthetic construct
  source 1..20: mol_type = other RNA
atgcagagtgatagttgagg

SEQ ID NO: 19604 - RNA, 20 nt, synthetic construct
  source 1..20: mol_type = other RNA
agttgaggcggtcatgttgc

SEQ ID NO: 19605 - RNA, 20 nt, synthetic construct
  source 1..20: mol_type = other RNA
tgttgctggtatacacacca

SEQ ID NO: 19606 - RNA, 20 nt, synthetic construct
  source 1..20: mol_type = other RNA
tggtatacacaccaaggcaa

SEQ ID NO: 19607 - RNA, 20 nt, synthetic construct
  source 1..20: mol_type = other RNA
aaggcaatggatacatttgt

SEQ ID NO: 19608 - RNA, 20 nt, synthetic construct
  source 1..20: mol_type = other RNA
tacaaatgtatccattgcct

SEQ ID NO: 19609 - RNA, 20 nt, synthetic construct
  source 1..20: mol_type = other RNA
taggtgagctttttctcaac

SEQ ID NO: 19610 - RNA, 20 nt, synthetic construct
  source 1..20: mol_type = other RNA
gatgaaccgtctgaataact

SEQ ID NO: 19611 - RNA, 20 nt, synthetic construct
  source 1..20: mol_type = other RNA
gaggcaccaagttattcaga

SEQ ID NO: 19612 - RNA, 20 nt, synthetic construct
  source 1..20: mol_type = other RNA
ttgcacatcacttacgagag

SEQ ID NO: 19613 - RNA, 20 nt, synthetic construct
  source 1..20: mol_type = other RNA
atgtgcaagtgcatcagata

SEQ ID NO: 19614 - RNA, 20 nt, synthetic construct
  source 1..20: mol_type = other RNA
tgtgcaagtgcatcagatat

SEQ ID NO: 19615 - RNA, 20 nt, synthetic construct
  source 1..20: mol_type = other RNA
catcagatatgggtcctttt

SEQ ID NO: 19616 - RNA, 20 nt, synthetic construct
  source 1..20: mol_type = other RNA
tttaggattgaaaagcaaag

SEQ ID NO: 19617 - RNA, 20 nt, synthetic construct
  source 1..20: mol_type = other RNA
ctttgcttttcaatcctaaa

SEQ ID NO: 19618 - RNA, 20 nt, synthetic construct
  source 1..20: mol_type = other RNA
ttgaaaagcaaagaggacaa

SEQ ID NO: 19619 - RNA, 20 nt, synthetic construct
  source 1..20: mol_type = other RNA
tgaaaagcaaagaggacaaa

SEQ ID NO: 19620 - RNA, 20 nt, synthetic construct
  source 1..20: mol_type = other RNA
tttcccaacatcttttttat

SEQ ID NO: 19621 - RNA, 20 nt, synthetic construct
  source 1..20: mol_type = other RNA
ttcccaacatcttttttata

SEQ ID NO: 19622 - RNA, 20 nt, synthetic construct
  source 1..20: mol_type = other RNA
tgccctataaaaaagatgtt

SEQ ID NO: 19623 - RNA, 20 nt, synthetic construct
  source 1..20: mol_type = other RNA
gtgccctataaaaaagatgt

SEQ ID NO: 19624 - RNA, 20 nt, synthetic construct
  source 1..20: mol_type = other RNA
ttatagggcactgcagcttg

SEQ ID NO: 19625 - RNA, 20 nt, synthetic construct
  source 1..20: mol_type = other RNA
gcttgaggtgaactttttac

SEQ ID NO: 19626 - RNA, 20 nt, synthetic construct
  source 1..20: mol_type = other RNA
cttgaggtgaactttttaca

SEQ ID NO: 19627 - RNA, 20 nt, synthetic construct
  source 1..20: mol_type = other RNA
tctgccttttcctgaacctt

SEQ ID NO: 19628 - RNA, 20 nt, synthetic construct
  source 1..20: mol_type = other RNA
ttttcctgaacctttggctg

SEQ ID NO: 19629 - RNA, 20 nt, synthetic construct
  source 1..20: mol_type = other RNA
acagccaaaggttcaggaaa

SEQ ID NO: 19630 - RNA, 20 nt, synthetic construct
  source 1..20: mol_type = other RNA
tgaacctttggctgtggctt

SEQ ID NO: 19631 - RNA, 20 nt, synthetic construct
  source 1..20: mol_type = other RNA
acctttggctgtggctttgg

SEQ ID NO: 19632 - RNA, 20 nt, synthetic construct
  source 1..20: mol_type = other RNA
ggctgtggctttggaggaac

SEQ ID NO: 19633 - RNA, 20 nt, synthetic construct
  source 1..20: mol_type = other RNA
tgtggctttggaggaactgg

SEQ ID NO: 19634 - RNA, 20 nt, synthetic construct
  source 1..20: mol_type = other RNA
gaggaactggaggattattt

SEQ ID NO: 19635 - RNA, 20 nt, synthetic construct
  source 1..20: mol_type = other RNA
aggaactggaggattatttt

SEQ ID NO: 19636 - RNA, 20 nt, synthetic construct
  source 1..20: mol_type = other RNA
ctggaggattattttgggca

SEQ ID NO: 19637 - RNA, 20 nt, synthetic construct
  source 1..20: mol_type = other RNA
tggtaagcaacagattcagc

SEQ ID NO: 19638 - RNA, 20 nt, synthetic construct
  source 1..20: mol_type = other RNA
ggtaagcaacagattcagct

SEQ ID NO: 19639 - RNA, 20 nt, synthetic construct
  source 1..20: mol_type = other RNA
gtaagcaacagattcagctg

SEQ ID NO: 19640 - RNA, 20 nt, synthetic construct
  source 1..20: mol_type = other RNA
tcagattgtatgtagttacc

SEQ ID NO: 19641 - RNA, 20 nt, synthetic construct
  source 1..20: mol_type = other RNA
ggtaactacatacaatctga

SEQ ID NO: 19642 - RNA, 20 nt, synthetic construct
  source 1..20: mol_type = other RNA
tggtaactacatacaatctg

SEQ ID NO: 19643 - RNA, 20 nt, synthetic construct
  source 1..20: mol_type = other RNA
tgtatgtagttaccaggaga

SEQ ID NO: 19644 - RNA, 20 nt, synthetic construct
  source 1..20: mol_type = other RNA
tcacactaacatccatctcc

SEQ ID NO: 19645 - RNA, 20 nt, synthetic construct
  source 1..20: mol_type = other RNA
tttgatttgacattgcagca

SEQ ID NO: 19646 - RNA, 20 nt, synthetic construct
  source 1..20: mol_type = other RNA
ttttgatttgacattgcagc

SEQ ID NO: 19647 - RNA, 20 nt, synthetic construct
  source 1..20: mol_type = other RNA
ctcaaagtagaatctgtttt

SEQ ID NO: 19648 - RNA, 20 nt, synthetic construct
  source 1..20: mol_type = other RNA
gttcacattgatgaagagat

SEQ ID NO: 19649 - RNA, 20 nt, synthetic construct
  source 1..20: mol_type = other RNA
ggttcacattgatgaagaga

SEQ ID NO: 19650 - RNA, 20 nt, synthetic construct
  source 1..20: mol_type = other RNA
gtgaaccatccgcatgtgtg

SEQ ID NO: 19651 - RNA, 20 nt, synthetic construct
  source 1..20: mol_type = other RNA
gatggccgcacacatgcgga

SEQ ID NO: 19652 - RNA, 20 nt, synthetic construct
  source 1..20: mol_type = other RNA
aaaagatggccgcacacatg

SEQ ID NO: 19653 - RNA, 20 nt, synthetic construct
  source 1..20: mol_type = other RNA
tttcaatgatgtggaaaaga

SEQ ID NO: 19654 - RNA, 20 nt, synthetic construct
  source 1..20: mol_type = other RNA
ccacatcattgaaagttgaa

SEQ ID NO: 19655 - RNA, 20 nt, synthetic construct
  source 1..20: mol_type = other RNA
ccgttcaactttcaatgatg

SEQ ID NO: 19656 - RNA, 20 nt, synthetic construct
  source 1..20: mol_type = other RNA
ttgaaagttgaacggcaata

SEQ ID NO: 19657 - RNA, 20 nt, synthetic construct
  source 1..20: mol_type = other RNA
acagaccatgaattaacata

SEQ ID NO: 19658 - RNA, 20 nt, synthetic construct
  source 1..20: mol_type = other RNA
ctcaaccatatgttaattca

SEQ ID NO: 19659 - RNA, 20 nt, synthetic construct
  source 1..20: mol_type = other RNA
atggttgagcagagtatctg

SEQ ID NO: 19660 - RNA, 20 nt, synthetic construct
  source 1..20: mol_type = other RNA
tggttgagcagagtatctgt

SEQ ID NO: 19661 - RNA, 20 nt, synthetic construct
  source 1..20: mol_type = other RNA
gtaaatagcgattacagtag

SEQ ID NO: 19662 - RNA, 20 nt, synthetic construct
  source 1..20: mol_type = other RNA
gtgtattttcataatgtagt

SEQ ID NO: 19663 - RNA, 20 nt, synthetic construct
  source 1..20: mol_type = other RNA
ataatgtagttggctactgc

SEQ ID NO: 19664 - RNA, 20 nt, synthetic construct
  source 1..20: mol_type = other RNA
taatgtagttggctactgct

SEQ ID NO: 19665 - RNA, 20 nt, synthetic construct
  source 1..20: mol_type = other RNA
tgcacactatagacattttc

SEQ ID NO: 19666 - RNA, 20 nt, synthetic construct
  source 1..20: mol_type = other RNA
tattttccacttttgagttg

SEQ ID NO: 19667 - RNA, 20 nt, synthetic construct
  source 1..20: mol_type = other RNA
acacttcctcaactcaaaag

SEQ ID NO: 19668 - RNA, 20 nt, synthetic construct
  source 1..20: mol_type = other RNA
tgagttgaggaagtgttacc

SEQ ID NO: 19669 - RNA, 20 nt, synthetic construct
  source 1..20: mol_type = other RNA
gagttgaggaagtgttacct

SEQ ID NO: 19670 - RNA, 20 nt, synthetic construct
  source 1..20: mol_type = other RNA
agttgaggaagtgttacctg

SEQ ID NO: 19671 - RNA, 20 nt, synthetic construct
  source 1..20: mol_type = other RNA
gttgaggaagtgttacctgg

SEQ ID NO: 19672 - RNA, 20 nt, synthetic construct
  source 1..20: mol_type = other RNA
gaggaagtgttacctggggg

SEQ ID NO: 19673 - RNA, 20 nt, synthetic construct
  source 1..20: mol_type = other RNA
aggaagtgttacctggggga

SEQ ID NO: 19674 - RNA, 20 nt, synthetic construct
  source 1..20: mol_type = other RNA
gttacctgggggagggcctg

SEQ ID NO: 19675 - RNA, 20 nt, synthetic construct
  source 1..20: mol_type = other RNA
gctgccacaggccctccccc

SEQ ID NO: 19676 - RNA, 20 nt, synthetic construct
  source 1..20: mol_type = other RNA
gggcctgtggcagctgcagc

SEQ ID NO: 19677 - RNA, 20 nt, synthetic construct
  source 1..20: mol_type = other RNA
tgtggcagctgcagcaggtt

SEQ ID NO: 19678 - RNA, 20 nt, synthetic construct
  source 1..20: mol_type = other RNA
aaacctgctgcagctgccac

SEQ ID NO: 19679 - RNA, 20 nt, synthetic construct
  source 1..20: mol_type = other RNA
agctgcagcaggtttggaac

SEQ ID NO: 19680 - RNA, 20 nt, synthetic construct
  source 1..20: mol_type = other RNA
actggactgacctaacactc

SEQ ID NO: 19681 - RNA, 20 nt, synthetic construct
  source 1..20: mol_type = other RNA
tcacaggcatccagagtgtt

SEQ ID NO: 19682 - RNA, 20 nt, synthetic construct
  source 1..20: mol_type = other RNA
tggatgcctgtgactgagag

SEQ ID NO: 19683 - RNA, 20 nt, synthetic construct
  source 1..20: mol_type = other RNA
ggatgcctgtgactgagaga

SEQ ID NO: 19684 - RNA, 20 nt, synthetic construct
  source 1..20: mol_type = other RNA
gcctgtgactgagagaggga

SEQ ID NO: 19685 - RNA, 20 nt, synthetic construct
  source 1..20: mol_type = other RNA
tccttccctctctcagtcac

SEQ ID NO: 19686 - RNA, 20 nt, synthetic construct
  source 1..20: mol_type = other RNA
agagggaaggagactttaac

SEQ ID NO: 19687 - RNA, 20 nt, synthetic construct
  source 1..20: mol_type = other RNA
ctggcccgatgagagagaag

SEQ ID NO: 19688 - RNA, 20 nt, synthetic construct
  source 1..20: mol_type = other RNA
aatgcctcttctctctcatc

SEQ ID NO: 19689 - RNA, 20 nt, synthetic construct
  source 1..20: mol_type = other RNA
taatgcctcttctctctcat

SEQ ID NO: 19690 - RNA, 20 nt, synthetic construct
  source 1..20: mol_type = other RNA
aagaggcattagcagactgc

SEQ ID NO: 19691 - RNA, 20 nt, synthetic construct
  source 1..20: mol_type = other RNA
agaggcattagcagactgca

SEQ ID NO: 19692 - RNA, 20 nt, synthetic construct
  source 1..20: mol_type = other RNA
gactgcagggagtatcttgc

SEQ ID NO: 19693 - RNA, 20 nt, synthetic construct
  source 1..20: mol_type = other RNA
gggagtatcttgctggtgcc

SEQ ID NO: 19694 - RNA, 20 nt, synthetic construct
  source 1..20: mol_type = other RNA
ggagtatcttgctggtgcct

SEQ ID NO: 19695 - RNA, 20 nt, synthetic construct
  source 1..20: mol_type = other RNA
tgggtcagagcagaggtccc

SEQ ID NO: 19696 - RNA, 20 nt, synthetic construct
  source 1..20: mol_type = other RNA
atgggcttgggtcagagcag

SEQ ID NO: 19697 - RNA, 20 nt, synthetic construct
  source 1..20: mol_type = other RNA
acggaaggtcttatgggctt

SEQ ID NO: 19698 - RNA, 20 nt, synthetic construct
  source 1..20: mol_type = other RNA
aacggaaggtcttatgggct

SEQ ID NO: 19699 - RNA, 20 nt, synthetic construct
  source 1..20: mol_type = other RNA
taagaccttccgtttccact

SEQ ID NO: 19700 - RNA, 20 nt, synthetic construct
  source 1..20: mol_type = other RNA
gtggaaacggaaggtcttat

SEQ ID NO: 19701 - RNA, 20 nt, synthetic construct
  source 1..20: mol_type = other RNA
agtggaaacggaaggtctta

SEQ ID NO: 19702 - RNA, 20 nt, synthetic construct
  source 1..20: mol_type = other RNA
tacttccaagtggaaacgga

SEQ ID NO: 19703 - RNA, 20 nt, synthetic construct
  source 1..20: mol_type = other RNA
cagttacttccaagtggaaa

SEQ ID NO: 19704 - RNA, 20 nt, synthetic construct
  source 1..20: mol_type = other RNA
gtaaagcagttacttccaag

SEQ ID NO: 19705 - RNA, 20 nt, synthetic construct
  source 1..20: mol_type = other RNA
tttacagactgagattgttg

SEQ ID NO: 19706 - RNA, 20 nt, synthetic construct
  source 1..20: mol_type = other RNA
agactgagattgttgaggaa

SEQ ID NO: 19707 - RNA, 20 nt, synthetic construct
  source 1..20: mol_type = other RNA
gattgttgaggaatggaaac

SEQ ID NO: 19708 - RNA, 20 nt, synthetic construct
  source 1..20: mol_type = other RNA
tcaatgagactgggtctagg

SEQ ID NO: 19709 - RNA, 20 nt, synthetic construct
  source 1..20: mol_type = other RNA
cagtcaatgagactgggtct

SEQ ID NO: 19710 - RNA, 20 nt, synthetic construct
  source 1..20: mol_type = other RNA
gttggtcagtcaatgagact

SEQ ID NO: 19711 - RNA, 20 nt, synthetic construct
  source 1..20: mol_type = other RNA
tgttggtcagtcaatgagac

SEQ ID NO: 19712 - RNA, 20 nt, synthetic construct
  source 1..20: mol_type = other RNA
actgaccaacactgtaaccc

SEQ ID NO: 19713 - RNA, 20 nt, synthetic construct
  source 1..20: mol_type = other RNA
gtaggccagggttacagtgt

SEQ ID NO: 19714 - RNA, 20 nt, synthetic construct
  source 1..20: mol_type = other RNA
ggagtcaaatctgtaggcca

SEQ ID NO: 19715 - RNA, 20 nt, synthetic construct
  source 1..20: mol_type = other RNA
tggagtcaaatctgtaggcc

SEQ ID NO: 19716 - RNA, 20 nt, synthetic construct
  source 1..20: mol_type = other RNA
aactatggagtcaaatctgt

SEQ ID NO: 19717 - RNA, 20 nt, synthetic construct
  source 1..20: mol_type = other RNA
catctgcagcagaacaacta

SEQ ID NO: 19718 - RNA, 20 nt, synthetic construct
  source 1..20: mol_type = other RNA
gttctgctgcagatgaacac

SEQ ID NO: 19719 - RNA, 20 nt, synthetic construct
  source 1..20: mol_type = other RNA
actcctgtagaatttaagtt

SEQ ID NO: 19720 - RNA, 20 nt, synthetic construct
  source 1..20: mol_type = other RNA
gtagaatttaagttaggctt

SEQ ID NO: 19721 - RNA, 20 nt, synthetic construct
  source 1..20: mol_type = other RNA
aagcctaacttaaattctac

SEQ ID NO: 19722 - RNA, 20 nt, synthetic construct
  source 1..20: mol_type = other RNA
cgattcaccatctgctgtga

SEQ ID NO: 19723 - RNA, 20 nt, synthetic construct
  source 1..20: mol_type = other RNA
tctgctgtgatggtaaagac

SEQ ID NO: 19724 - RNA, 20 nt, synthetic construct
  source 1..20: mol_type = other RNA
gtctttaccatcacagcaga

SEQ ID NO: 19725 - RNA, 20 nt, synthetic construct
  source 1..20: mol_type = other RNA
accggacatttccagaagca

SEQ ID NO: 19726 - RNA, 20 nt, synthetic construct
  source 1..20: mol_type = other RNA
ccggacatttccagaagcaa

SEQ ID NO: 19727 - RNA, 20 nt, synthetic construct
  source 1..20: mol_type = other RNA
cccttgcttctggaaatgtc

SEQ ID NO: 19728 - RNA, 20 nt, synthetic construct
  source 1..20: mol_type = other RNA
gaagcaagggaaccgatcct

SEQ ID NO: 19729 - RNA, 20 nt, synthetic construct
  source 1..20: mol_type = other RNA
aggatcggttcccttgcttc

SEQ ID NO: 19730 - RNA, 20 nt, synthetic construct
  source 1..20: mol_type = other RNA
gcaagggaaccgatccttgg

SEQ ID NO: 19731 - RNA, 20 nt, synthetic construct
  source 1..20: mol_type = other RNA
caagggaaccgatccttggt

SEQ ID NO: 19732 - RNA, 20 nt, synthetic construct
  source 1..20: mol_type = other RNA
atgggactcccaccaaggat

SEQ ID NO: 19733 - RNA, 20 nt, synthetic construct
  source 1..20: mol_type = other RNA
agagcatgggactcccacca

SEQ ID NO: 19734 - RNA, 20 nt, synthetic construct
  source 1..20: mol_type = other RNA
cccatgctcttcttgtcttg

SEQ ID NO: 19735 - RNA, 20 nt, synthetic construct
  source 1..20: mol_type = other RNA
gctcttcttgtcttgaggtt

SEQ ID NO: 19736 - RNA, 20 nt, synthetic construct
  source 1..20: mol_type = other RNA
ctcttcttgtcttgaggttt

SEQ ID NO: 19737 - RNA, 20 nt, synthetic construct
  source 1..20: mol_type = other RNA
tttgggagcaattagcatca

SEQ ID NO: 19738 - RNA, 20 nt, synthetic construct
  source 1..20: mol_type = other RNA
ttgggagcaattagcatcaa

SEQ ID NO: 19739 - RNA, 20 nt, synthetic construct
  source 1..20: mol_type = other RNA
agcaattagcatcaagggtt

SEQ ID NO: 19740 - RNA, 20 nt, synthetic construct
  source 1..20: mol_type = other RNA
ttagcatcaagggtttggat

SEQ ID NO: 19741 - RNA, 20 nt, synthetic construct
  source 1..20: mol_type = other RNA
tagcatcaagggtttggatc

SEQ ID NO: 19742 - RNA, 20 nt, synthetic construct
  source 1..20: mol_type = other RNA
agcatcaagggtttggatcg

SEQ ID NO: 19743 - RNA, 20 nt, synthetic construct
  source 1..20: mol_type = other RNA
tacatttgtgtgcccaatca

SEQ ID NO: 19744 - RNA, 20 nt, synthetic construct
  source 1..20: mol_type = other RNA
gattgggcacacaaatgtag

SEQ ID NO: 19745 - RNA, 20 nt, synthetic construct
  source 1..20: mol_type = other RNA
atcaggtcactgccatgatt

SEQ ID NO: 19746 - RNA, 20 nt, synthetic construct
  source 1..20: mol_type = other RNA
tatcaggtcactgccatgat

SEQ ID NO: 19747 - RNA, 20 nt, synthetic construct
  source 1..20: mol_type = other RNA
cctgatagcctatacgttca

SEQ ID NO: 19748 - RNA, 20 nt, synthetic construct
  source 1..20: mol_type = other RNA
ccatgaacgtataggctatc

SEQ ID NO: 19749 - RNA, 20 nt, synthetic construct
  source 1..20: mol_type = other RNA
atcgaagaccatgaacgtat

SEQ ID NO: 19750 - RNA, 20 nt, synthetic construct
  source 1..20: mol_type = other RNA
atgctgtaccaaagcttcat

SEQ ID NO: 19751 - RNA, 20 nt, synthetic construct
  source 1..20: mol_type = other RNA
accaaagcttcataggactt

SEQ ID NO: 19752 - RNA, 20 nt, synthetic construct
  source 1..20: mol_type = other RNA
gccaaagtcctatgaagctt

SEQ ID NO: 19753 - RNA, 20 nt, synthetic construct
  source 1..20: mol_type = other RNA
cataggactttggcatgaaa

SEQ ID NO: 19754 - RNA, 20 nt, synthetic construct
  source 1..20: mol_type = other RNA
agtgaatactactctcttct

SEQ ID NO: 19755 - RNA, 20 nt, synthetic construct
  source 1..20: mol_type = other RNA
gtgaatactactctcttctc

SEQ ID NO: 19756 - RNA, 20 nt, synthetic construct
  source 1..20: mol_type = other RNA
ttctcgggcattcgagccta

SEQ ID NO: 19757 - RNA, 20 nt, synthetic construct
  source 1..20: mol_type = other RNA
tctcgggcattcgagcctaa

SEQ ID NO: 19758 - RNA, 20 nt, synthetic construct
  source 1..20: mol_type = other RNA
ctcgggcattcgagcctaag

SEQ ID NO: 19759 - RNA, 20 nt, synthetic construct
  source 1..20: mol_type = other RNA
ctcaatggggcagtcccctt

SEQ ID NO: 19760 - RNA, 20 nt, synthetic construct
  source 1..20: mol_type = other RNA
aggagaaaaatcactcaatg

SEQ ID NO: 19761 - RNA, 20 nt, synthetic construct
  source 1..20: mol_type = other RNA
caggagaaaaatcactcaat

SEQ ID NO: 19762 - RNA, 20 nt, synthetic construct
  source 1..20: mol_type = other RNA
gcaggagaaaaatcactcaa

SEQ ID NO: 19763 - RNA, 20 nt, synthetic construct
  source 1..20: mol_type = other RNA
tctcctgcctttgctatgta

SEQ ID NO: 19764 - RNA, 20 nt, synthetic construct
  source 1..20: mol_type = other RNA
gcaccttacatagcaaaggc

SEQ ID NO: 19765 - RNA, 20 nt, synthetic construct
  source 1..20: mol_type = other RNA
ggcagcaccttacatagcaa

SEQ ID NO: 19766 - RNA, 20 nt, synthetic construct
  source 1..20: mol_type = other RNA
cagggaacattttcagcatg

SEQ ID NO: 19767 - RNA, 20 nt, synthetic construct
  source 1..20: mol_type = other RNA
agttaggaagcacatttaca

SEQ ID NO: 19768 - RNA, 20 nt, synthetic construct
  source 1..20: mol_type = other RNA
tagttaggaagcacatttac

SEQ ID NO: 19769 - RNA, 20 nt, synthetic construct
  source 1..20: mol_type = other RNA
ttcctaactatttcataaag

SEQ ID NO: 19770 - RNA, 20 nt, synthetic construct
  source 1..20: mol_type = other RNA
ctatttcataaagaggatct

SEQ ID NO: 19771 - RNA, 20 nt, synthetic construct
  source 1..20: mol_type = other RNA
tctacactgtcagcctgctt

SEQ ID NO: 19772 - RNA, 20 nt, synthetic construct
  source 1..20: mol_type = other RNA
tgtcagcctgcttaggttta

SEQ ID NO: 19773 - RNA, 20 nt, synthetic construct
  source 1..20: mol_type = other RNA
tgatggccttaaacctaagc

SEQ ID NO: 19774 - RNA, 20 nt, synthetic construct
  source 1..20: mol_type = other RNA
aaagataaaaacaaaaatga

SEQ ID NO: 19775 - RNA, 20 nt, synthetic construct
  source 1..20: mol_type = other RNA
ttttatctttgaaagtgctg

SEQ ID NO: 19776 - RNA, 20 nt, synthetic construct
  source 1..20: mol_type = other RNA
aaagtgctgaggctgctact

SEQ ID NO: 19777 - RNA, 20 nt, synthetic construct
  source 1..20: mol_type = other RNA
gaggctgctacttggtgcgc

SEQ ID NO: 19778 - RNA, 20 nt, synthetic construct
  source 1..20: mol_type = other RNA
ctacttggtgcgctggcgtt

SEQ ID NO: 19779 - RNA, 20 nt, synthetic construct
  source 1..20: mol_type = other RNA
agtctttttgtctgcattga

SEQ ID NO: 19780 - RNA, 20 nt, synthetic construct
  source 1..20: mol_type = other RNA
caatgcagacaaaaagactt

SEQ ID NO: 19781 - RNA, 20 nt, synthetic construct
  source 1..20: mol_type = other RNA
gtctgcattgaaggtacagt

SEQ ID NO: 19782 - RNA, 20 nt, synthetic construct
  source 1..20: mol_type = other RNA
tctgcattgaaggtacagta

SEQ ID NO: 19783 - RNA, 20 nt, synthetic construct
  source 1..20: mol_type = other RNA
ctgcattgaaggtacagtag

SEQ ID NO: 19784 - RNA, 20 nt, synthetic construct
  source 1..20: mol_type = other RNA
aggtacagtaggggcaatta

SEQ ID NO: 19785 - RNA, 20 nt, synthetic construct
  source 1..20: mol_type = other RNA
tattttcaaagtcttcacta

SEQ ID NO: 19786 - RNA, 20 nt, synthetic construct
  source 1..20: mol_type = other RNA
atagtgaagactttgaaaat

SEQ ID NO: 19787 - RNA, 20 nt, synthetic construct
  source 1..20: mol_type = other RNA
agtcttcactatggacattg

SEQ ID NO: 19788 - RNA, 20 nt, synthetic construct
  source 1..20: mol_type = other RNA
attgcggaaatgacttttgt

SEQ ID NO: 19789 - RNA, 20 nt, synthetic construct
  source 1..20: mol_type = other RNA
gtaggcagagaagaattttg

SEQ ID NO: 19790 - RNA, 20 nt, synthetic construct
  source 1..20: mol_type = other RNA
gagaagaattttgaggaaaa

SEQ ID NO: 19791 - RNA, 20 nt, synthetic construct
  source 1..20: mol_type = other RNA
ggacaagcgctgcagcagaa

SEQ ID NO: 19792 - RNA, 20 nt, synthetic construct
  source 1..20: mol_type = other RNA
tgtgtttactttaggactat

SEQ ID NO: 19793 - RNA, 20 nt, synthetic construct
  source 1..20: mol_type = other RNA
ctagtttttgtgtttacttt

SEQ ID NO: 19794 - RNA, 20 nt, synthetic construct
  source 1..20: mol_type = other RNA
agtctcctgtgccacttacc

SEQ ID NO: 19795 - RNA, 20 nt, synthetic construct
  source 1..20: mol_type = other RNA
aaaaaccaggtaagtggcac

SEQ ID NO: 19796 - RNA, 20 nt, synthetic construct
  source 1..20: mol_type = other RNA
cttacgaaaaaccaggtaag

SEQ ID NO: 19797 - RNA, 20 nt, synthetic construct
  source 1..20: mol_type = other RNA
acctggtttttcgtaagtga

SEQ ID NO: 19798 - RNA, 20 nt, synthetic construct
  source 1..20: mol_type = other RNA
cctggtttttcgtaagtgat

SEQ ID NO: 19799 - RNA, 20 nt, synthetic construct
  source 1..20: mol_type = other RNA
cccatcacttacgaaaaacc

SEQ ID NO: 19800 - RNA, 20 nt, synthetic construct
  source 1..20: mol_type = other RNA
atgggaggatgtaggactgt

SEQ ID NO: 19801 - RNA, 20 nt, synthetic construct
  source 1..20: mol_type = other RNA
catgggaggatgtaggactg

SEQ ID NO: 19802 - RNA, 20 nt, synthetic construct
  source 1..20: mol_type = other RNA
aacactacatgggaggatgt

SEQ ID NO: 19803 - RNA, 20 nt, synthetic construct
  source 1..20: mol_type = other RNA
tttgaaaaacactacatggg

SEQ ID NO: 19804 - RNA, 20 nt, synthetic construct
  source 1..20: mol_type = other RNA
ttatttgaaaaacactacat

SEQ ID NO: 19805 - RNA, 20 nt, synthetic construct
  source 1..20: mol_type = other RNA
tttatttgaaaaacactaca

SEQ ID NO: 19806 - RNA, 20 nt, synthetic construct
  source 1..20: mol_type = other RNA
tttttcaaataaaagtcatt

SEQ ID NO: 19807 - RNA, 20 nt, synthetic construct
  source 1..20: mol_type = other RNA
aacttatttcactgttttct

SEQ ID NO: 19808 - RNA, 20 nt, synthetic construct
  source 1..20: mol_type = other RNA
aatacttagtgacattgggt

SEQ ID NO: 19809 - RNA, 20 nt, synthetic construct
  source 1..20: mol_type = other RNA
aaaaaatacttagtgacatt

SEQ ID NO: 19810 - RNA, 20 nt, synthetic construct
  source 1..20: mol_type = other RNA
aaaaaaatacttagtgacat

SEQ ID NO: 19811 - RNA, 20 nt, synthetic construct
  source 1..20: mol_type = other RNA
gtatttttttcacagttttc

SEQ ID NO: 19812 - RNA, 20 nt, synthetic construct
  source 1..20: mol_type = other RNA
tatttttttcacagttttcc

SEQ ID NO: 19813 - RNA, 20 nt, synthetic construct
  source 1..20: mol_type = other RNA
ttggcagtttaagaaaagcc

SEQ ID NO: 19814 - RNA, 20 nt, synthetic construct
  source 1..20: mol_type = other RNA
aaactgccaagattgttgac

SEQ ID NO: 19815 - RNA, 20 nt, synthetic construct
  source 1..20: mol_type = other RNA
caagattgttgacaggaagt

SEQ ID NO: 19816 - RNA, 20 nt, synthetic construct
  source 1..20: mol_type = other RNA
caacttcctgtcaacaatct

SEQ ID NO: 19817 - RNA, 20 nt, synthetic construct
  source 1..20: mol_type = other RNA
agttggaacatagtttctat

SEQ ID NO: 19818 - RNA, 20 nt, synthetic construct
  source 1..20: mol_type = other RNA
aaactgtaatgatgatgaac

SEQ ID NO: 19819 - RNA, 20 nt, synthetic construct
  source 1..20: mol_type = other RNA
tcattacagttttgagtgcc

SEQ ID NO: 19820 - RNA, 20 nt, synthetic construct
  source 1..20: mol_type = other RNA
cattacagttttgagtgcca

SEQ ID NO: 19821 - RNA, 20 nt, synthetic construct
  source 1..20: mol_type = other RNA
ttttgagtgccagggtaaag

SEQ ID NO: 19822 - RNA, 20 nt, synthetic construct
  source 1..20: mol_type = other RNA
caacaaaaacctctttaccc

SEQ ID NO: 19823 - RNA, 20 nt, synthetic construct
  source 1..20: mol_type = other RNA
taaagaggtttttgttgaat

SEQ ID NO: 19824 - RNA, 20 nt, synthetic construct
  source 1..20: mol_type = other RNA
aactgtcctgcctactgcta

SEQ ID NO: 19825 - RNA, 20 nt, synthetic construct
  source 1..20: mol_type = other RNA
agaataccgtagcagtaggc

SEQ ID NO: 19826 - RNA, 20 nt, synthetic construct
  source 1..20: mol_type = other RNA
ttaaagaataccgtagcagt

SEQ ID NO: 19827 - RNA, 20 nt, synthetic construct
  source 1..20: mol_type = other RNA
aatatataggtttgttaaat

SEQ ID NO: 19828 - RNA, 20 nt, synthetic construct
  source 1..20: mol_type = other RNA
ctaacagatgaacaatatat

SEQ ID NO: 19829 - RNA, 20 nt, synthetic construct
  source 1..20: mol_type = other RNA
cttagccactcaactgtgct

SEQ ID NO: 19830 - RNA, 20 nt, synthetic construct
  source 1..20: mol_type = other RNA
ctattcctagcacagttgag

SEQ ID NO: 19831 - RNA, 20 nt, synthetic construct
  source 1..20: mol_type = other RNA
atagagagatgagtaagaca

SEQ ID NO: 19832 - RNA, 20 nt, synthetic construct
  source 1..20: mol_type = other RNA
gaagaaatggactgttgaag

SEQ ID NO: 19833 - RNA, 20 nt, synthetic construct
  source 1..20: mol_type = other RNA
ggaagaaatggactgttgaa

SEQ ID NO: 19834 - RNA, 20 nt, synthetic construct
  source 1..20: mol_type = other RNA
tggaagaaatggactgttga

SEQ ID NO: 19835 - RNA, 20 nt, synthetic construct
  source 1..20: mol_type = other RNA
gtattctaagctggaagaaa

SEQ ID NO: 19836 - RNA, 20 nt, synthetic construct
  source 1..20: mol_type = other RNA
tggctatgtgtattctaagc

SEQ ID NO: 19837 - RNA, 20 nt, synthetic construct
  source 1..20: mol_type = other RNA
atagccagccctcaatcagt

SEQ ID NO: 19838 - RNA, 20 nt, synthetic construct
  source 1..20: mol_type = other RNA
tagccagccctcaatcagta

SEQ ID NO: 19839 - RNA, 20 nt, synthetic construct
  source 1..20: mol_type = other RNA
aaaccctactgattgagggc

SEQ ID NO: 19840 - RNA, 20 nt, synthetic construct
  source 1..20: mol_type = other RNA
gtctaaaccctactgattga

SEQ ID NO: 19841 - RNA, 20 nt, synthetic construct
  source 1..20: mol_type = other RNA
tgtctaaaccctactgattg

SEQ ID NO: 19842 - RNA, 20 nt, synthetic construct
  source 1..20: mol_type = other RNA
gaggctgggcaggcaaaaac

SEQ ID NO: 19843 - RNA, 20 nt, synthetic construct
  source 1..20: mol_type = other RNA
ttgcctgcccagcctcctct

SEQ ID NO: 19844 - RNA, 20 nt, synthetic construct
  source 1..20: mol_type = other RNA
tttccaagaggaggctgggc

SEQ ID NO: 19845 - RNA, 20 nt, synthetic construct
  source 1..20: mol_type = other RNA
ggcgtttccaagaggaggct

SEQ ID NO: 19846 - RNA, 20 nt, synthetic construct
  source 1..20: mol_type = other RNA
aggcgtttccaagaggaggc

SEQ ID NO: 19847 - RNA, 20 nt, synthetic construct
  source 1..20: mol_type = other RNA
gcagaggcgtttccaagagg

SEQ ID NO: 19848 - RNA, 20 nt, synthetic construct
  source 1..20: mol_type = other RNA
gtggcagaggcgtttccaag

SEQ ID NO: 19849 - RNA, 20 nt, synthetic construct
  source 1..20: mol_type = other RNA
aacgcctctgccacgattga

SEQ ID NO: 19850 - RNA, 20 nt, synthetic construct
  source 1..20: mol_type = other RNA
tcttccatcaatcgtggcag

SEQ ID NO: 19851 - RNA, 20 nt, synthetic construct
  source 1..20: mol_type = other RNA
tttctgtcttccatcaatcg

SEQ ID NO: 19852 - RNA, 20 nt, synthetic construct
  source 1..20: mol_type = other RNA
tcatgtgtactctgctctgc

SEQ ID NO: 19853 - RNA, 20 nt, synthetic construct
  source 1..20: mol_type = other RNA
gttttgcaaacttgagcatg

SEQ ID NO: 19854 - RNA, 20 nt, synthetic construct
  source 1..20: mol_type = other RNA
atgctcaagtttgcaaaaca

SEQ ID NO: 19855 - RNA, 20 nt, synthetic construct
  source 1..20: mol_type = other RNA
aatttgaaattttaacacat

SEQ ID NO: 19856 - RNA, 20 nt, synthetic construct
  source 1..20: mol_type = other RNA
taatttgaaattttaacaca

SEQ ID NO: 19857 - RNA, 20 nt, synthetic construct
  source 1..20: mol_type = other RNA
acttttgtagcggaaactga

SEQ ID NO: 19858 - RNA, 20 nt, synthetic construct
  source 1..20: mol_type = other RNA
tacaaaagtagaagaacaag

SEQ ID NO: 19859 - RNA, 20 nt, synthetic construct
  source 1..20: mol_type = other RNA
ttgttcttctacttttgtag

SEQ ID NO: 19860 - RNA, 20 nt, synthetic construct
  source 1..20: mol_type = other RNA
aagtagaagaacaagaggag

SEQ ID NO: 19861 - RNA, 20 nt, synthetic construct
  source 1..20: mol_type = other RNA
aagaacaagaggagaggtcc

SEQ ID NO: 19862 - RNA, 20 nt, synthetic construct
  source 1..20: mol_type = other RNA
agaacaagaggagaggtcct

SEQ ID NO: 19863 - RNA, 20 nt, synthetic construct
  source 1..20: mol_type = other RNA
aggtcctgggaaaaatgaaa

SEQ ID NO: 19864 - RNA, 20 nt, synthetic construct
  source 1..20: mol_type = other RNA
ctttccatttcatttttccc

SEQ ID NO: 19865 - RNA, 20 nt, synthetic construct
  source 1..20: mol_type = other RNA
tgaaatggaaagcttttgaa

SEQ ID NO: 19866 - RNA, 20 nt, synthetic construct
  source 1..20: mol_type = other RNA
aatttaattttagcacttta

SEQ ID NO: 19867 - RNA, 20 nt, synthetic construct
  source 1..20: mol_type = other RNA
agttttgttttctctcatgc

SEQ ID NO: 19868 - RNA, 20 nt, synthetic construct
  source 1..20: mol_type = other RNA
atagcaaaccaacaatctaa

SEQ ID NO: 19869 - RNA, 20 nt, synthetic construct
  source 1..20: mol_type = other RNA
tttatttaccattagattgt

SEQ ID NO: 19870 - RNA, 20 nt, synthetic construct
  source 1..20: mol_type = other RNA
ctaatggtaaataaacagcc

SEQ ID NO: 19871 - RNA, 20 nt, synthetic construct
  source 1..20: mol_type = other RNA
ggtaggtaatgtgatgaacc

SEQ ID NO: 19872 - RNA, 20 nt, synthetic construct
  source 1..20: mol_type = other RNA
ataatttttgtataattggt

SEQ ID NO: 19873 - RNA, 20 nt, synthetic construct
  source 1..20: mol_type = other RNA
gattataatttttgtataat

SEQ ID NO: 19874 - RNA, 20 nt, synthetic construct
  source 1..20: mol_type = other RNA
ttattttaaaagttcatcac

SEQ ID NO: 19875 - RNA, 20 nt, synthetic construct
  source 1..20: mol_type = other RNA
cctgaaatagttaacagaca

SEQ ID NO: 19876 - RNA, 20 nt, synthetic construct
  source 1..20: mol_type = other RNA
aaatagttaacagacacggc

SEQ ID NO: 19877 - RNA, 20 nt, synthetic construct
  source 1..20: mol_type = other RNA
ccgtgtctgttaactatttc

SEQ ID NO: 19878 - RNA, 20 nt, synthetic construct
  source 1..20: mol_type = other RNA
attttcctgacctcaattga

SEQ ID NO: 19879 - RNA, 20 nt, synthetic construct
  source 1..20: mol_type = other RNA
ttagtccatcaattgaggtc

SEQ ID NO: 19880 - RNA, 20 nt, synthetic construct
  source 1..20: mol_type = other RNA
tctgtttagtccatcaattg

SEQ ID NO: 19881 - RNA, 20 nt, synthetic construct
  source 1..20: mol_type = other RNA
gaactcttaaaatatgcagc

SEQ ID NO: 19882 - RNA, 20 nt, synthetic construct
  source 1..20: mol_type = other RNA
ttaaaatatgcagcaggaca

SEQ ID NO: 19883 - RNA, 20 nt, synthetic construct
  source 1..20: mol_type = other RNA
taaaatatgcagcaggacaa

SEQ ID NO: 19884 - RNA, 20 nt, synthetic construct
  source 1..20: mol_type = other RNA
ggacaagggtgccatctcac

SEQ ID NO: 19885 - RNA, 20 nt, synthetic construct
  source 1..20: mol_type = other RNA
tgtgagctacacctgtgaga

SEQ ID NO: 19886 - RNA, 20 nt, synthetic construct
  source 1..20: mol_type = other RNA
gctcacagctcccagcactt

SEQ ID NO: 19887 - RNA, 20 nt, synthetic construct
  source 1..20: mol_type = other RNA
acagctcccagcactttgga

SEQ ID NO: 19888 - RNA, 20 nt, synthetic construct
  source 1..20: mol_type = other RNA
cccagcactttggaaggctg

SEQ ID NO: 19889 - RNA, 20 nt, synthetic construct
  source 1..20: mol_type = other RNA
agcactttggaaggctgagg

SEQ ID NO: 19890 - RNA, 20 nt, synthetic construct
  source 1..20: mol_type = other RNA
gcactttggaaggctgaggt

SEQ ID NO: 19891 - RNA, 20 nt, synthetic construct
  source 1..20: mol_type = other RNA
cctcagccttccaaagtgct

SEQ ID NO: 19892 - RNA, 20 nt, synthetic construct
  source 1..20: mol_type = other RNA
acctcagccttccaaagtgc

SEQ ID NO: 19893 - RNA, 20 nt, synthetic construct
  source 1..20: mol_type = other RNA
ctttggaaggctgaggtggg

SEQ ID NO: 19894 - RNA, 20 nt, synthetic construct
  source 1..20: mol_type = other RNA
caggctggtcttgaactctt

SEQ ID NO: 19895 - RNA, 20 nt, synthetic construct
  source 1..20: mol_type = other RNA
tcaggctggtcttgaactct

SEQ ID NO: 19896 - RNA, 20 nt, synthetic construct
  source 1..20: mol_type = other RNA
gtatattcattttggagggt

SEQ ID NO: 19897 - RNA, 20 nt, synthetic construct
  source 1..20: mol_type = other RNA
ggtatattcattttggaggg

SEQ ID NO: 19898 - RNA, 20 nt, synthetic construct
  source 1..20: mol_type = other RNA
tccaaaatgaatatacccac

SEQ ID NO: 19899 - RNA, 20 nt, synthetic construct
  source 1..20: mol_type = other RNA
gtgggtatattcattttgga

SEQ ID NO: 19900 - RNA, 20 nt, synthetic construct
  source 1..20: mol_type = other RNA
ggtgggtatattcattttgg

SEQ ID NO: 19901 - RNA, 20 nt, synthetic construct
  source 1..20: mol_type = other RNA
accggtgggtatattcattt

SEQ ID NO: 19902 - RNA, 20 nt, synthetic construct
  source 1..20: mol_type = other RNA
accggtgtgaattgacaatg

SEQ ID NO: 19903 - RNA, 20 nt, synthetic construct
  source 1..20: mol_type = other RNA
cattgtcaattcacaccggt

SEQ ID NO: 19904 - RNA, 20 nt, synthetic construct
  source 1..20: mol_type = other RNA
acattgtcaattcacaccgg

SEQ ID NO: 19905 - RNA, 20 nt, synthetic construct
  source 1..20: mol_type = other RNA
accacattgtcaattcacac

SEQ ID NO: 19906 - RNA, 20 nt, synthetic construct
  source 1..20: mol_type = other RNA
acaatgtggtccaaagagca

SEQ ID NO: 19907 - RNA, 20 nt, synthetic construct
  source 1..20: mol_type = other RNA
tgtggtccaaagagcaaggc

SEQ ID NO: 19908 - RNA, 20 nt, synthetic construct
  source 1..20: mol_type = other RNA
ccaaagagcaaggcaggaaa

SEQ ID NO: 19909 - RNA, 20 nt, synthetic construct
  source 1..20: mol_type = other RNA
ccgtttcctgccttgctctt

SEQ ID NO: 19910 - RNA, 20 nt, synthetic construct
  source 1..20: mol_type = other RNA
cggagtccagatcctcaaaa

SEQ ID NO: 19911 - RNA, 20 nt, synthetic construct
  source 1..20: mol_type = other RNA
gatcctcaaaatggtagtac

SEQ ID NO: 19912 - RNA, 20 nt, synthetic construct
  source 1..20: mol_type = other RNA
atcctcaaaatggtagtaca

SEQ ID NO: 19913 - RNA, 20 nt, synthetic construct
  source 1..20: mol_type = other RNA
gtactaccattttgaggatc

SEQ ID NO: 19914 - RNA, 20 nt, synthetic construct
  source 1..20: mol_type = other RNA
tgccctgtactaccattttg

SEQ ID NO: 19915 - RNA, 20 nt, synthetic construct
  source 1..20: mol_type = other RNA
tagtacagggcataaccact

SEQ ID NO: 19916 - RNA, 20 nt, synthetic construct
  source 1..20: mol_type = other RNA
tgaactgataggtggcctag

SEQ ID NO: 19917 - RNA, 20 nt, synthetic construct
  source 1..20: mol_type = other RNA
ttttgtactgaactgatagg

SEQ ID NO: 19918 - RNA, 20 nt, synthetic construct
  source 1..20: mol_type = other RNA
actttttgtactgaactgat

SEQ ID NO: 19919 - RNA, 20 nt, synthetic construct
  source 1..20: mol_type = other RNA
aagtacaaccctgcgcatca

SEQ ID NO: 19920 - RNA, 20 nt, synthetic construct
  source 1..20: mol_type = other RNA
gcgcatcatggtgtaaaagc

SEQ ID NO: 19921 - RNA, 20 nt, synthetic construct
  source 1..20: mol_type = other RNA
cgcatcatggtgtaaaagct

SEQ ID NO: 19922 - RNA, 20 nt, synthetic construct
  source 1..20: mol_type = other RNA
gcatcatggtgtaaaagctg

SEQ ID NO: 19923 - RNA, 20 nt, synthetic construct
  source 1..20: mol_type = other RNA
tggtgtaaaagctggggcct

SEQ ID NO: 19924 - RNA, 20 nt, synthetic construct
  source 1..20: mol_type = other RNA
agatgcacaatgcgaaacct

SEQ ID NO: 19925 - RNA, 20 nt, synthetic construct
  source 1..20: mol_type = other RNA
cattgtgcatctcacaccta

SEQ ID NO: 19926 - RNA, 20 nt, synthetic construct
  source 1..20: mol_type = other RNA
acacctatggaaataacaag

SEQ ID NO: 19927 - RNA, 20 nt, synthetic construct
  source 1..20: mol_type = other RNA
actcctcttgttatttccat

SEQ ID NO: 19928 - RNA, 20 nt, synthetic construct
  source 1..20: mol_type = other RNA
aacaagaggagtaaaatcta

SEQ ID NO: 19929 - RNA, 20 nt, synthetic construct
  source 1..20: mol_type = other RNA
gaaatcaacacaccctaaga

SEQ ID NO: 19930 - RNA, 20 nt, synthetic construct
  source 1..20: mol_type = other RNA
atcaacacaccctaagaagg

SEQ ID NO: 19931 - RNA, 20 nt, synthetic construct
  source 1..20: mol_type = other RNA
tcaacacaccctaagaaggt

SEQ ID NO: 19932 - RNA, 20 nt, synthetic construct
  source 1..20: mol_type = other RNA
tgtgagcacccaccttctta

SEQ ID NO: 19933 - RNA, 20 nt, synthetic construct
  source 1..20: mol_type = other RNA
ctgtgagcacccaccttctt

SEQ ID NO: 19934 - RNA, 20 nt, synthetic construct
  source 1..20: mol_type = other RNA
ggtgggtgctcacagaagac

SEQ ID NO: 19935 - RNA, 20 nt, synthetic construct
  source 1..20: mol_type = other RNA
tggtatcaacatttttgtaa

SEQ ID NO: 19936 - RNA, 20 nt, synthetic construct
  source 1..20: mol_type = other RNA
tatcaacatttttgtaaagg

SEQ ID NO: 19937 - RNA, 20 nt, synthetic construct
  source 1..20: mol_type = other RNA
aacatttttgtaaaggtggt

SEQ ID NO: 19938 - RNA, 20 nt, synthetic construct
  source 1..20: mol_type = other RNA
ttggctgctgagataatgaa

SEQ ID NO: 19939 - RNA, 20 nt, synthetic construct
  source 1..20: mol_type = other RNA
ggcaattacaagtccaaatt

SEQ ID NO: 19940 - RNA, 20 nt, synthetic construct
  source 1..20: mol_type = other RNA
aattacaagtccaaatttgg

SEQ ID NO: 19941 - RNA, 20 nt, synthetic construct
  source 1..20: mol_type = other RNA
attacaagtccaaatttgga

SEQ ID NO: 19942 - RNA, 20 nt, synthetic construct
  source 1..20: mol_type = other RNA
atttcgtttccctccaaatt

SEQ ID NO: 19943 - RNA, 20 nt, synthetic construct
  source 1..20: mol_type = other RNA
cgacaatgaagaacccaaca

SEQ ID NO: 19944 - RNA, 20 nt, synthetic construct
  source 1..20: mol_type = other RNA
gacaatgaagaacccaacat

SEQ ID NO: 19945 - RNA, 20 nt, synthetic construct
  source 1..20: mol_type = other RNA
gtaaacatcaagcccatgtt

SEQ ID NO: 19946 - RNA, 20 nt, synthetic construct
  source 1..20: mol_type = other RNA
ggtaaacatcaagcccatgt

SEQ ID NO: 19947 - RNA, 20 nt, synthetic construct
  source 1..20: mol_type = other RNA
gggcttgatgtttaccaaca

SEQ ID NO: 19948 - RNA, 20 nt, synthetic construct
  source 1..20: mol_type = other RNA
catgatttgcaaagccttgt

SEQ ID NO: 19949 - RNA, 20 nt, synthetic construct
  source 1..20: mol_type = other RNA
gttggattaagtgtgtagat

SEQ ID NO: 19950 - RNA, 20 nt, synthetic construct
  source 1..20: mol_type = other RNA
tgttggattaagtgtgtaga

SEQ ID NO: 19951 - RNA, 20 nt, synthetic construct
  source 1..20: mol_type = other RNA
aaatcattcttgagagatgt

SEQ ID NO: 19952 - RNA, 20 nt, synthetic construct
  source 1..20: mol_type = other RNA
atttttaactctcaaagaat

SEQ ID NO: 19953 - RNA, 20 nt, synthetic construct
  source 1..20: mol_type = other RNA
ctcaaagaattggaaagatt

SEQ ID NO: 19954 - RNA, 20 nt, synthetic construct
  source 1..20: mol_type = other RNA
aaagatttggcctatgaaga

SEQ ID NO: 19955 - RNA, 20 nt, synthetic construct
  source 1..20: mol_type = other RNA
aagatttggcctatgaagaa

SEQ ID NO: 19956 - RNA, 20 nt, synthetic construct
  source 1..20: mol_type = other RNA
tggttaactcccttcttcat

SEQ ID NO: 19957 - RNA, 20 nt, synthetic construct
  source 1..20: mol_type = other RNA
aacaggtttgggggcatagc

SEQ ID NO: 19958 - RNA, 20 nt, synthetic construct
  source 1..20: mol_type = other RNA
aaacaaagtaacaggtttgg

SEQ ID NO: 19959 - RNA, 20 nt, synthetic construct
  source 1..20: mol_type = other RNA
gaaacaaagtaacaggtttg

SEQ ID NO: 19960 - RNA, 20 nt, synthetic construct
  source 1..20: mol_type = other RNA
tgaaacaaagtaacaggttt

SEQ ID NO: 19961 - RNA, 20 nt, synthetic construct
  source 1..20: mol_type = other RNA
ttgaaacaaagtaacaggtt

SEQ ID NO: 19962 - RNA, 20 nt, synthetic construct
  source 1..20: mol_type = other RNA
aaggtttgaaacaaagtaac

SEQ ID NO: 19963 - RNA, 20 nt, synthetic construct
  source 1..20: mol_type = other RNA
tctcctttaccaccagactt

SEQ ID NO: 19964 - RNA, 20 nt, synthetic construct
  source 1..20: mol_type = other RNA
aagtctggtggtaaaggaga

SEQ ID NO: 19965 - RNA, 20 nt, synthetic construct
  source 1..20: mol_type = other RNA
tttcctaagtctggtggtaa

SEQ ID NO: 19966 - RNA, 20 nt, synthetic construct
  source 1..20: mol_type = other RNA
caccagacttaggaaagata

SEQ ID NO: 19967 - RNA, 20 nt, synthetic construct
  source 1..20: mol_type = other RNA
catatctttcctaagtctgg

SEQ ID NO: 19968 - RNA, 20 nt, synthetic construct
  source 1..20: mol_type = other RNA
caccatatctttcctaagtc

SEQ ID NO: 19969 - RNA, 20 nt, synthetic construct
  source 1..20: mol_type = other RNA
ggtgacacattcaaaacttg

SEQ ID NO: 19970 - RNA, 20 nt, synthetic construct
  source 1..20: mol_type = other RNA
gacacattcaaaacttgagg

SEQ ID NO: 19971 - RNA, 20 nt, synthetic construct
  source 1..20: mol_type = other RNA
ttgaggtggaagaactccag

SEQ ID NO: 19972 - RNA, 20 nt, synthetic construct
  source 1..20: mol_type = other RNA
ggtggaagaactccagagga

SEQ ID NO: 19973 - RNA, 20 nt, synthetic construct
  source 1..20: mol_type = other RNA
gtggaagaactccagaggaa

SEQ ID NO: 19974 - RNA, 20 nt, synthetic construct
  source 1..20: mol_type = other RNA
gaggaagggaatccgaacca

SEQ ID NO: 19975 - RNA, 20 nt, synthetic construct
  source 1..20: mol_type = other RNA
tggttcggattcccttcctc

SEQ ID NO: 19976 - RNA, 20 nt, synthetic construct
  source 1..20: mol_type = other RNA
tccgaaccaaggatgtgcca

SEQ ID NO: 19977 - RNA, 20 nt, synthetic construct
  source 1..20: mol_type = other RNA
accttggcacatccttggtt

SEQ ID NO: 19978 - RNA, 20 nt, synthetic construct
  source 1..20: mol_type = other RNA
gaatcaccttggcacatcct

SEQ ID NO: 19979 - RNA, 20 nt, synthetic construct
  source 1..20: mol_type = other RNA
ttgttcttgacgaatcacct

SEQ ID NO: 19980 - RNA, 20 nt, synthetic construct
  source 1..20: mol_type = other RNA
tgattcgtcaagaacaaata

SEQ ID NO: 19981 - RNA, 20 nt, synthetic construct
  source 1..20: mol_type = other RNA
cgtcaagaacaaatatggac

SEQ ID NO: 19982 - RNA, 20 nt, synthetic construct
  source 1..20: mol_type = other RNA
gtcaagaacaaatatggact

SEQ ID NO: 19983 - RNA, 20 nt, synthetic construct
  source 1..20: mol_type = other RNA
tcaagaacaaatatggactg

SEQ ID NO: 19984 - RNA, 20 nt, synthetic construct
  source 1..20: mol_type = other RNA
caagaacaaatatggactgg

SEQ ID NO: 19985 - RNA, 20 nt, synthetic construct
  source 1..20: mol_type = other RNA
aacagttttgaaaaagtaaa

SEQ ID NO: 19986 - RNA, 20 nt, synthetic construct
  source 1..20: mol_type = other RNA
ttttactttttcaaaactgt

SEQ ID NO: 19987 - RNA, 20 nt, synthetic construct
  source 1..20: mol_type = other RNA
ggagaaaacttctaaaatgc

SEQ ID NO: 19988 - RNA, 20 nt, synthetic construct
  source 1..20: mol_type = other RNA
gagaaaacttctaaaatgca

SEQ ID NO: 19989 - RNA, 20 nt, synthetic construct
  source 1..20: mol_type = other RNA
aaaacttctaaaatgcaggg

SEQ ID NO: 19990 - RNA, 20 nt, synthetic construct
  source 1..20: mol_type = other RNA
aaacttctaaaatgcagggt

SEQ ID NO: 19991 - RNA, 20 nt, synthetic construct
  source 1..20: mol_type = other RNA
agctgacagcaacatggcga

SEQ ID NO: 19992 - RNA, 20 nt, synthetic construct
  source 1..20: mol_type = other RNA
ttggtgagctgacagcaaca

SEQ ID NO: 19993 - RNA, 20 nt, synthetic construct
  source 1..20: mol_type = other RNA
gacacactcgcactcttagt

SEQ ID NO: 19994 - RNA, 20 nt, synthetic construct
  source 1..20: mol_type = other RNA
agagtgcgagtgtgtcttgc

SEQ ID NO: 19995 - RNA, 20 nt, synthetic construct
  source 1..20: mol_type = other RNA
gagtgcgagtgtgtcttgct

SEQ ID NO: 19996 - RNA, 20 nt, synthetic construct
  source 1..20: mol_type = other RNA
ttgctgggcccattttccca

SEQ ID NO: 19997 - RNA, 20 nt, synthetic construct
  source 1..20: mol_type = other RNA
attttcccatggtctgtaga

SEQ ID NO: 19998 - RNA, 20 nt, synthetic construct
  source 1..20: mol_type = other RNA
tctacagaccatgggaaaat

SEQ ID NO: 19999 - RNA, 20 nt, synthetic construct
  source 1..20: mol_type = other RNA
ttctacagaccatgggaaaa

SEQ ID NO: 20000 - RNA, 20 nt, synthetic construct
  source 1..20: mol_type = other RNA
cagcgccttctacagaccat

SEQ ID NO: 20001 - RNA, 20 nt, synthetic construct
  source 1..20: mol_type = other RNA
acagcgccttctacagacca

SEQ ID NO: 20002 - RNA, 20 nt, synthetic construct
  source 1..20: mol_type = other RNA
aagcacatcctgttctagct

SEQ ID NO: 20003 - RNA, 20 nt, synthetic construct
  source 1..20: mol_type = other RNA
agcacatcctgttctagctc

SEQ ID NO: 20004 - RNA, 20 nt, synthetic construct
  source 1..20: mol_type = other RNA
gcacatcctgttctagctcg

SEQ ID NO: 20005 - RNA, 20 nt, synthetic construct
  source 1..20: mol_type = other RNA
cacatcctgttctagctcgg

SEQ ID NO: 20006 - RNA, 20 nt, synthetic construct
  source 1..20: mol_type = other RNA
aagggcccccgagctagaac

SEQ ID NO: 20007 - RNA, 20 nt, synthetic construct
  source 1..20: mol_type = other RNA
taaggctgcagaggggggaa

SEQ ID NO: 20008 - RNA, 20 nt, synthetic construct
  source 1..20: mol_type = other RNA
gtaaggctgcagagggggga

SEQ ID NO: 20009 - RNA, 20 nt, synthetic construct
  source 1..20: mol_type = other RNA
ctgggtaaggctgcagaggg

SEQ ID NO: 20010 - RNA, 20 nt, synthetic construct
  source 1..20: mol_type = other RNA
actgggtaaggctgcagagg

SEQ ID NO: 20011 - RNA, 20 nt, synthetic construct
  source 1..20: mol_type = other RNA
cactgggtaaggctgcagag

SEQ ID NO: 20012 - RNA, 20 nt, synthetic construct
  source 1..20: mol_type = other RNA
gcactgggtaaggctgcaga

SEQ ID NO: 20013 - RNA, 20 nt, synthetic construct
  source 1..20: mol_type = other RNA
tgcactgggtaaggctgcag

SEQ ID NO: 20014 - RNA, 20 nt, synthetic construct
  source 1..20: mol_type = other RNA
cgcattctctgcactgggta

SEQ ID NO: 20015 - RNA, 20 nt, synthetic construct
  source 1..20: mol_type = other RNA
gggggcgcattctctgcact

SEQ ID NO: 20016 - RNA, 20 nt, synthetic construct
  source 1..20: mol_type = other RNA
agggggcgcattctctgcac

SEQ ID NO: 20017 - RNA, 20 nt, synthetic construct
  source 1..20: mol_type = other RNA
tgagtgttggagtcagtagg

SEQ ID NO: 20018 - RNA, 20 nt, synthetic construct
  source 1..20: mol_type = other RNA
atgagtgttggagtcagtag

SEQ ID NO: 20019 - RNA, 20 nt, synthetic construct
  source 1..20: mol_type = other RNA
gatgagtgttggagtcagta

SEQ ID NO: 20020 - RNA, 20 nt, synthetic construct
  source 1..20: mol_type = other RNA
cgatgagtgttggagtcagt

SEQ ID NO: 20021 - RNA, 20 nt, synthetic construct
  source 1..20: mol_type = other RNA
cggctaaaggcgatgagtgt

SEQ ID NO: 20022 - RNA, 20 nt, synthetic construct
  source 1..20: mol_type = other RNA
ctcatcgcctttagccgact

SEQ ID NO: 20023 - RNA, 20 nt, synthetic construct
  source 1..20: mol_type = other RNA
gcctttagccgacttggctg

SEQ ID NO: 20024 - RNA, 20 nt, synthetic construct
  source 1..20: mol_type = other RNA
accgcagccaagtcggctaa

SEQ ID NO: 20025 - RNA, 20 nt, synthetic construct
  source 1..20: mol_type = other RNA
gacttggctgcggtgcattt

SEQ ID NO: 20026 - RNA, 20 nt, synthetic construct
  source 1..20: mol_type = other RNA
acttggctgcggtgcatttt

SEQ ID NO: 20027 - RNA, 20 nt, synthetic construct
  source 1..20: mol_type = other RNA
aaaatgcaccgcagccaagt

SEQ ID NO: 20028 - RNA, 20 nt, synthetic construct
  source 1..20: mol_type = other RNA
tggctgcggtgcattttggg

SEQ ID NO: 20029 - RNA, 20 nt, synthetic construct
  source 1..20: mol_type = other RNA
ggctgcggtgcattttgggt

SEQ ID NO: 20030 - RNA, 20 nt, synthetic construct
  source 1..20: mol_type = other RNA
gctgcggtgcattttgggtg

SEQ ID NO: 20031 - RNA, 20 nt, synthetic construct
  source 1..20: mol_type = other RNA
ctgcggtgcattttgggtgg

SEQ ID NO: 20032 - RNA, 20 nt, synthetic construct
  source 1..20: mol_type = other RNA
ggtgcattttgggtgggggc

SEQ ID NO: 20033 - RNA, 20 nt, synthetic construct
  source 1..20: mol_type = other RNA
gggggctggtattttctcca

SEQ ID NO: 20034 - RNA, 20 nt, synthetic construct
  source 1..20: mol_type = other RNA
ttgcttctggtttatggcca

SEQ ID NO: 20035 - RNA, 20 nt, synthetic construct
  source 1..20: mol_type = other RNA
gcattgttgcttctggttta

SEQ ID NO: 20036 - RNA, 20 nt, synthetic construct
  source 1..20: mol_type = other RNA
gaaatctgcattgttgcttc

SEQ ID NO: 20037 - RNA, 20 nt, synthetic construct
  source 1..20: mol_type = other RNA
tgaaaaaaaaaaaaatctct

SEQ ID NO: 20038 - RNA, 20 nt, synthetic construct
  source 1..20: mol_type = other RNA
ttttttttttttcattctga

SEQ ID NO: 20039 - RNA, 20 nt, synthetic construct
  source 1..20: mol_type = other RNA
attctgaaggttcaagatac

SEQ ID NO: 20040 - RNA, 20 nt, synthetic construct
  source 1..20: mol_type = other RNA
atacaggcacaagaagcatc

SEQ ID NO: 20041 - RNA, 20 nt, synthetic construct
  source 1..20: mol_type = other RNA
tacaggcacaagaagcatca

SEQ ID NO: 20042 - RNA, 20 nt, synthetic construct
  source 1..20: mol_type = other RNA
ggcacaagaagcatcaggga

SEQ ID NO: 20043 - RNA, 20 nt, synthetic construct
  source 1..20: mol_type = other RNA
gcacaagaagcatcagggat

SEQ ID NO: 20044 - RNA, 20 nt, synthetic construct
  source 1..20: mol_type = other RNA
gaagcatcagggatgggaac

SEQ ID NO: 20045 - RNA, 20 nt, synthetic construct
  source 1..20: mol_type = other RNA
aagcatcagggatgggaact

SEQ ID NO: 20046 - RNA, 20 nt, synthetic construct
  source 1..20: mol_type = other RNA
agggatgggaactgggtgtg

SEQ ID NO: 20047 - RNA, 20 nt, synthetic construct
  source 1..20: mol_type = other RNA
gggatgggaactgggtgtgt

SEQ ID NO: 20048 - RNA, 20 nt, synthetic construct
  source 1..20: mol_type = other RNA
ggatgggaactgggtgtgtg

SEQ ID NO: 20049 - RNA, 20 nt, synthetic construct
  source 1..20: mol_type = other RNA
gggaactgggtgtgtgggga

SEQ ID NO: 20050 - RNA, 20 nt, synthetic construct
  source 1..20: mol_type = other RNA
tgacaaacacagaaacagtt

SEQ ID NO: 20051 - RNA, 20 nt, synthetic construct
  source 1..20: mol_type = other RNA
ctaagcctttgtctgtgaaa

SEQ ID NO: 20052 - RNA, 20 nt, synthetic construct
  source 1..20: mol_type = other RNA
taagcctttgtctgtgaaat

SEQ ID NO: 20053 - RNA, 20 nt, synthetic construct
  source 1..20: mol_type = other RNA
aagcctttgtctgtgaaatg

SEQ ID NO: 20054 - RNA, 20 nt, synthetic construct
  source 1..20: mol_type = other RNA
catttcacagacaaaggctt

SEQ ID NO: 20055 - RNA, 20 nt, synthetic construct
  source 1..20: mol_type = other RNA
ttgtctgtgaaatggggtta

SEQ ID NO: 20056 - RNA, 20 nt, synthetic construct
  source 1..20: mol_type = other RNA
taaccccatttcacagacaa

SEQ ID NO: 20057 - RNA, 20 nt, synthetic construct
  source 1..20: mol_type = other RNA
caagaagtgtccagagtaac

SEQ ID NO: 20058 - RNA, 20 nt, synthetic construct
  source 1..20: mol_type = other RNA
cttgaatttaccagttactc

SEQ ID NO: 20059 - RNA, 20 nt, synthetic construct
  source 1..20: mol_type = other RNA
gattaagaagacttcgtgtg

SEQ ID NO: 20060 - RNA, 20 nt, synthetic construct
  source 1..20: mol_type = other RNA
attaagaagacttcgtgtgt

SEQ ID NO: 20061 - RNA, 20 nt, synthetic construct
  source 1..20: mol_type = other RNA
ttaagaagacttcgtgtgtg

SEQ ID NO: 20062 - RNA, 20 nt, synthetic construct
  source 1..20: mol_type = other RNA
taagaagacttcgtgtgtgg

SEQ ID NO: 20063 - RNA, 20 nt, synthetic construct
  source 1..20: mol_type = other RNA
aagaagacttcgtgtgtggg

SEQ ID NO: 20064 - RNA, 20 nt, synthetic construct
  source 1..20: mol_type = other RNA
gtgtggggggtgtgtgtgtg

SEQ ID NO: 20065 - RNA, 20 nt, synthetic construct
  source 1..20: mol_type = other RNA
gtgtgtgtgtgtggctaaaa

SEQ ID NO: 20066 - RNA, 20 nt, synthetic construct
  source 1..20: mol_type = other RNA
ggatatcagacctagagtct

SEQ ID NO: 20067 - RNA, 20 nt, synthetic construct
  source 1..20: mol_type = other RNA
cagacctagagtcttggtct

SEQ ID NO: 20068 - RNA, 20 nt, synthetic construct
  source 1..20: mol_type = other RNA
agacctagagtcttggtctt

SEQ ID NO: 20069 - RNA, 20 nt, synthetic construct
  source 1..20: mol_type = other RNA
ctgcccaagaccaagactct

SEQ ID NO: 20070 - RNA, 20 nt, synthetic construct
  source 1..20: mol_type = other RNA
gtcttggtcttgggcagaag

SEQ ID NO: 20071 - RNA, 20 nt, synthetic construct
  source 1..20: mol_type = other RNA
tcgcgccttttccagcagac

SEQ ID NO: 20072 - RNA, 20 nt, synthetic construct
  source 1..20: mol_type = other RNA
cgcgccttttccagcagaca

SEQ ID NO: 20073 - RNA, 20 nt, synthetic construct
  source 1..20: mol_type = other RNA
tttccagcagacagggatca

SEQ ID NO: 20074 - RNA, 20 nt, synthetic construct
  source 1..20: mol_type = other RNA
tgatccctgtctgctggaaa

SEQ ID NO: 20075 - RNA, 20 nt, synthetic construct
  source 1..20: mol_type = other RNA
cagcagacagggatcaaggt

SEQ ID NO: 20076 - RNA, 20 nt, synthetic construct
  source 1..20: mol_type = other RNA
agcagacagggatcaaggtt

SEQ ID NO: 20077 - RNA, 20 nt, synthetic construct
  source 1..20: mol_type = other RNA
gcagacagggatcaaggttg

SEQ ID NO: 20078 - RNA, 20 nt, synthetic construct
  source 1..20: mol_type = other RNA
cagacagggatcaaggttgg

SEQ ID NO: 20079 - RNA, 20 nt, synthetic construct
  source 1..20: mol_type = other RNA
agacagggatcaaggttggg

SEQ ID NO: 20080 - RNA, 20 nt, synthetic construct
  source 1..20: mol_type = other RNA
gacagggatcaaggttgggg

SEQ ID NO: 20081 - RNA, 20 nt, synthetic construct
  source 1..20: mol_type = other RNA
agggatcaaggttggggggg

SEQ ID NO: 20082 - RNA, 20 nt, synthetic construct
  source 1..20: mol_type = other RNA
gggatcaaggttggggggga

SEQ ID NO: 20083 - RNA, 20 nt, synthetic construct
  source 1..20: mol_type = other RNA
ggatcaaggttgggggggag

SEQ ID NO: 20084 - RNA, 20 nt, synthetic construct
  source 1..20: mol_type = other RNA
caaggttgggggggagggga

SEQ ID NO: 20085 - RNA, 20 nt, synthetic construct
  source 1..20: mol_type = other RNA
gttgggggggaggggaaggc

SEQ ID NO: 20086 - RNA, 20 nt, synthetic construct
  source 1..20: mol_type = other RNA
ggggggaggggaaggcaggc

SEQ ID NO: 20087 - RNA, 20 nt, synthetic construct
  source 1..20: mol_type = other RNA
aaggcaggcaggcctcccag

SEQ ID NO: 20088 - RNA, 20 nt, synthetic construct
  source 1..20: mol_type = other RNA
ggcctcccagaggaaagaag

SEQ ID NO: 20089 - RNA, 20 nt, synthetic construct
  source 1..20: mol_type = other RNA
cacctcttctttcctctggg

SEQ ID NO: 20090 - RNA, 20 nt, synthetic construct
  source 1..20: mol_type = other RNA
attcacctcttctttcctct

SEQ ID NO: 20091 - RNA, 20 nt, synthetic construct
  source 1..20: mol_type = other RNA
tattcacctcttctttcctc

SEQ ID NO: 20092 - RNA, 20 nt, synthetic construct
  source 1..20: mol_type = other RNA
tttttttaatgtaatgaatg

SEQ ID NO: 20093 - RNA, 20 nt, synthetic construct
  source 1..20: mol_type = other RNA
ttttttttaatgtaatgaat

SEQ ID NO: 20094 - RNA, 20 nt, synthetic construct
  source 1..20: mol_type = other RNA
tttttttttaatgtaatgaa

SEQ ID NO: 20095 - RNA, 20 nt, synthetic construct
  source 1..20: mol_type = other RNA
aaaatctttttgcagctctc

SEQ ID NO: 20096 - RNA, 20 nt, synthetic construct
  source 1..20: mol_type = other RNA
tgcagtaaggtggtagaaaa

SEQ ID NO: 20097 - RNA, 20 nt, synthetic construct
  source 1..20: mol_type = other RNA
ctaccaccttactgcaaagt

SEQ ID NO: 20098 - RNA, 20 nt, synthetic construct
  source 1..20: mol_type = other RNA
taccaccttactgcaaagtt

SEQ ID NO: 20099 - RNA, 20 nt, synthetic construct
  source 1..20: mol_type = other RNA
accaccttactgcaaagttg

SEQ ID NO: 20100 - RNA, 20 nt, synthetic construct
  source 1..20: mol_type = other RNA
gccccaactttgcagtaagg

SEQ ID NO: 20101 - RNA, 20 nt, synthetic construct
  source 1..20: mol_type = other RNA
tgagccccaactttgcagta

SEQ ID NO: 20102 - RNA, 20 nt, synthetic construct
  source 1..20: mol_type = other RNA
gggctcagaatgttcgaaag

SEQ ID NO: 20103 - RNA, 20 nt, synthetic construct
  source 1..20: mol_type = other RNA
gttcgaaagaggtgctgacc

SEQ ID NO: 20104 - RNA, 20 nt, synthetic construct
  source 1..20: mol_type = other RNA
gctgaccaggcagctgagat

SEQ ID NO: 20105 - RNA, 20 nt, synthetic construct
  source 1..20: mol_type = other RNA
ctgaccaggcagctgagatt

SEQ ID NO: 20106 - RNA, 20 nt, synthetic construct
  source 1..20: mol_type = other RNA
tgaccaggcagctgagattg

SEQ ID NO: 20107 - RNA, 20 nt, synthetic construct
  source 1..20: mol_type = other RNA
ggcagctgagattggggaaa

SEQ ID NO: 20108 - RNA, 20 nt, synthetic construct
  source 1..20: mol_type = other RNA
gcagctgagattggggaaaa

SEQ ID NO: 20109 - RNA, 20 nt, synthetic construct
  source 1..20: mol_type = other RNA
tttccccaatctcagctgcc

SEQ ID NO: 20110 - RNA, 20 nt, synthetic construct
  source 1..20: mol_type = other RNA
ctgagattggggaaaaggga

SEQ ID NO: 20111 - RNA, 20 nt, synthetic construct
  source 1..20: mol_type = other RNA
agattggggaaaagggatgg

SEQ ID NO: 20112 - RNA, 20 nt, synthetic construct
  source 1..20: mol_type = other RNA
aaagggatggtggtgaactg

SEQ ID NO: 20113 - RNA, 20 nt, synthetic construct
  source 1..20: mol_type = other RNA
gatggtggtgaactgtggtc

SEQ ID NO: 20114 - RNA, 20 nt, synthetic construct
  source 1..20: mol_type = other RNA
tgaactgtggtcaggataag

SEQ ID NO: 20115 - RNA, 20 nt, synthetic construct
  source 1..20: mol_type = other RNA
ggtcaggataagaggaaagc

SEQ ID NO: 20116 - RNA, 20 nt, synthetic construct
  source 1..20: mol_type = other RNA
aggataagaggaaagctggc

SEQ ID NO: 20117 - RNA, 20 nt, synthetic construct
  source 1..20: mol_type = other RNA
taagaggaaagctggcaggt

SEQ ID NO: 20118 - RNA, 20 nt, synthetic construct
  source 1..20: mol_type = other RNA
aagaggaaagctggcaggtt

SEQ ID NO: 20119 - RNA, 20 nt, synthetic construct
  source 1..20: mol_type = other RNA
agaggaaagctggcaggttg

SEQ ID NO: 20120 - RNA, 20 nt, synthetic construct
  source 1..20: mol_type = other RNA
agctggcaggttggggaaga

SEQ ID NO: 20121 - RNA, 20 nt, synthetic construct
  source 1..20: mol_type = other RNA
ttggggaagaaggattgcac

SEQ ID NO: 20122 - RNA, 20 nt, synthetic construct
  source 1..20: mol_type = other RNA
tggggaagaaggattgcaca

SEQ ID NO: 20123 - RNA, 20 nt, synthetic construct
  source 1..20: mol_type = other RNA
ggggaagaaggattgcacag

SEQ ID NO: 20124 - RNA, 20 nt, synthetic construct
  source 1..20: mol_type = other RNA
gaagaaggattgcacagggg

SEQ ID NO: 20125 - RNA, 20 nt, synthetic construct
  source 1..20: mol_type = other RNA
ggcggggagcatgcatggca

SEQ ID NO: 20126 - RNA, 20 nt, synthetic construct
  source 1..20: mol_type = other RNA
gggggggcggggagcatgca

SEQ ID NO: 20127 - RNA, 20 nt, synthetic construct
  source 1..20: mol_type = other RNA
aagcccggcgccgccgcgcg

SEQ ID NO: 20128 - RNA, 20 nt, synthetic construct
  source 1..20: mol_type = other RNA
gcgccgggcttaccttgact

SEQ ID NO: 20129 - RNA, 20 nt, synthetic construct
  source 1..20: mol_type = other RNA
cttaccttgactcggcctcg

SEQ ID NO: 20130 - RNA, 20 nt, synthetic construct
  source 1..20: mol_type = other RNA
actcggcctcgaggcgcgcg

SEQ ID NO: 20131 - RNA, 20 nt, synthetic construct
  source 1..20: mol_type = other RNA
ctcggcctcgaggcgcgcgc

SEQ ID NO: 20132 - RNA, 20 nt, synthetic construct
  source 1..20: mol_type = other RNA
tcggcctcgaggcgcgcgcg

SEQ ID NO: 20133 - RNA, 20 nt, synthetic construct
  source 1..20: mol_type = other RNA
cctcgaggcgcgcgcggggc

SEQ ID NO: 20134 - RNA, 20 nt, synthetic construct
  source 1..20: mol_type = other RNA
ccggccccgcgcgcgcctcg

SEQ ID NO: 20135 - RNA, 20 nt, synthetic construct
  source 1..20: mol_type = other RNA
gcgcgcggggccggcgtgct

SEQ ID NO: 20136 - RNA, 20 nt, synthetic construct
  source 1..20: mol_type = other RNA
cgcgcggggccggcgtgctc

SEQ ID NO: 20137 - RNA, 20 nt, synthetic construct
  source 1..20: mol_type = other RNA
gcgcggggccggcgtgctcg

SEQ ID NO: 20138 - RNA, 20 nt, synthetic construct
  source 1..20: mol_type = other RNA
cgcggggccggcgtgctcgg

SEQ ID NO: 20139 - RNA, 20 nt, synthetic construct
  source 1..20: mol_type = other RNA
gggccggcgtgctcgggggc

SEQ ID NO: 20140 - RNA, 20 nt, synthetic construct
  source 1..20: mol_type = other RNA
cgtgctcgggggccggacag

SEQ ID NO: 20141 - RNA, 20 nt, synthetic construct
  source 1..20: mol_type = other RNA
tgtccggcccccgagcacgc

SEQ ID NO: 20142 - RNA, 20 nt, synthetic construct
  source 1..20: mol_type = other RNA
gctcgggggccggacagcgg

SEQ ID NO: 20143 - RNA, 20 nt, synthetic construct
  source 1..20: mol_type = other RNA
cgggggccggacagcggcgg

SEQ ID NO: 20144 - RNA, 20 nt, synthetic construct
  source 1..20: mol_type = other RNA
gggccggacagcggcggcgg

SEQ ID NO: 20145 - RNA, 20 nt, synthetic construct
  source 1..20: mol_type = other RNA
ccggacagcggcggcggcgg

SEQ ID NO: 20146 - RNA, 20 nt, synthetic construct
  source 1..20: mol_type = other RNA
cggacagcggcggcggcggc

SEQ ID NO: 20147 - RNA, 20 nt, synthetic construct
  source 1..20: mol_type = other RNA
acagcggcggcggcggcggg

SEQ ID NO: 20148 - RNA, 20 nt, synthetic construct
  source 1..20: mol_type = other RNA
ccgccgccgccgccgctgtc

SEQ ID NO: 20149 - RNA, 20 nt, synthetic construct
  source 1..20: mol_type = other RNA
cggcggcggcggcgggcgga

SEQ ID NO: 20150 - RNA, 20 nt, synthetic construct
  source 1..20: mol_type = other RNA
cggcggcggcgggcggatgg

SEQ ID NO: 20151 - RNA, 20 nt, synthetic construct
  source 1..20: mol_type = other RNA
cggcggcgggcggatggcgg

SEQ ID NO: 20152 - RNA, 20 nt, synthetic construct
  source 1..20: mol_type = other RNA
gcgggcggatggcggcggca

SEQ ID NO: 20153 - RNA, 20 nt, synthetic construct
  source 1..20: mol_type = other RNA
ggcggatggcggcggcacgg

SEQ ID NO: 20154 - RNA, 20 nt, synthetic construct
  source 1..20: mol_type = other RNA
ggatggcggcggcacggcgg

SEQ ID NO: 20155 - RNA, 20 nt, synthetic construct
  source 1..20: mol_type = other RNA
tggcggcggcacggcggtgg

SEQ ID NO: 20156 - RNA, 20 nt, synthetic construct
  source 1..20: mol_type = other RNA
cggcacggcggtggcggcag

SEQ ID NO: 20157 - RNA, 20 nt, synthetic construct
  source 1..20: mol_type = other RNA
ggcacggcggtggcggcagc

SEQ ID NO: 20158 - RNA, 20 nt, synthetic construct
  source 1..20: mol_type = other RNA
gcacggcggtggcggcagcg

SEQ ID NO: 20159 - RNA, 20 nt, synthetic construct
  source 1..20: mol_type = other RNA
cggcggtggcggcagcgggg

SEQ ID NO: 20160 - RNA, 20 nt, synthetic construct
  source 1..20: mol_type = other RNA
ggcggtggcggcagcgggga

SEQ ID NO: 20161 - RNA, 20 nt, synthetic construct
  source 1..20: mol_type = other RNA
ggcagcggggagggcgcgcc

SEQ ID NO: 20162 - RNA, 20 nt, synthetic construct
  source 1..20: mol_type = other RNA
gcagcggggagggcgcgccc

SEQ ID NO: 20163 - RNA, 20 nt, synthetic construct
  source 1..20: mol_type = other RNA
cagcggggagggcgcgcccg

SEQ ID NO: 20164 - RNA, 20 nt, synthetic construct
  source 1..20: mol_type = other RNA
cccggggcctcgtcgcgctc

SEQ ID NO: 20165 - RNA, 20 nt, synthetic construct
  source 1..20: mol_type = other RNA
ggcctcgtcgcgctccggct

SEQ ID NO: 20166 - RNA, 20 nt, synthetic construct
  source 1..20: mol_type = other RNA
gccggagcgcgacgaggccc

SEQ ID NO: 20167 - RNA, 20 nt, synthetic construct
  source 1..20: mol_type = other RNA
ctcgtcgcgctccggctcgg

SEQ ID NO: 20168 - RNA, 20 nt, synthetic construct
  source 1..20: mol_type = other RNA
cgccgagccggagcgcgacg

SEQ ID NO: 20169 - RNA, 20 nt, synthetic construct
  source 1..20: mol_type = other RNA
cgctccggctcggcggactc

SEQ ID NO: 20170 - RNA, 20 nt, synthetic construct
  source 1..20: mol_type = other RNA
cgagccggagtccgccgagc

SEQ ID NO: 20171 - RNA, 20 nt, synthetic construct
  source 1..20: mol_type = other RNA
gcggactccggctcgcgccg

SEQ ID NO: 20172 - RNA, 20 nt, synthetic construct
  source 1..20: mol_type = other RNA
tccggctcgcgccgcggccg

SEQ ID NO: 20173 - RNA, 20 nt, synthetic construct
  source 1..20: mol_type = other RNA
ccggctcgcgccgcggccgc

SEQ ID NO: 20174 - RNA, 20 nt, synthetic construct
  source 1..20: mol_type = other RNA
cccgcggccgcggcgcgagc

SEQ ID NO: 20175 - RNA, 20 nt, synthetic construct
  source 1..20: mol_type = other RNA
gccgcggccgcgggtgctgc

SEQ ID NO: 20176 - RNA, 20 nt, synthetic construct
  source 1..20: mol_type = other RNA
ccgcggccgcgggtgctgcc

SEQ ID NO: 20177 - RNA, 20 nt, synthetic construct
  source 1..20: mol_type = other RNA
cgcggccgcgggtgctgccg

SEQ ID NO: 20178 - RNA, 20 nt, synthetic construct
  source 1..20: mol_type = other RNA
gcggccgcgggtgctgccgg

SEQ ID NO: 20179 - RNA, 20 nt, synthetic construct
  source 1..20: mol_type = other RNA
cggccgcgggtgctgccggg

SEQ ID NO: 20180 - RNA, 20 nt, synthetic construct
  source 1..20: mol_type = other RNA
cccggcagcacccgcggccg

SEQ ID NO: 20181 - RNA, 20 nt, synthetic construct
  source 1..20: mol_type = other RNA
gcgggtgctgccggggggcg

SEQ ID NO: 20182 - RNA, 20 nt, synthetic construct
  source 1..20: mol_type = other RNA
ggtgctgccggggggcgcgg

SEQ ID NO: 20183 - RNA, 20 nt, synthetic construct
  source 1..20: mol_type = other RNA
gtgctgccggggggcgcggc

SEQ ID NO: 20184 - RNA, 20 nt, synthetic construct
  source 1..20: mol_type = other RNA
gctgcgcccgccgcgccccc

SEQ ID NO: 20185 - RNA, 20 nt, synthetic construct
  source 1..20: mol_type = other RNA
gcgcggcgggcgcagcagag

SEQ ID NO: 20186 - RNA, 20 nt, synthetic construct
  source 1..20: mol_type = other RNA
cggcgggcgcagcagagcgg

SEQ ID NO: 20187 - RNA, 20 nt, synthetic construct
  source 1..20: mol_type = other RNA
ggcgggcgcagcagagcggc

SEQ ID NO: 20188 - RNA, 20 nt, synthetic construct
  source 1..20: mol_type = other RNA
gggcgcagcagagcggcggg

SEQ ID NO: 20189 - RNA, 20 nt, synthetic construct
  source 1..20: mol_type = other RNA
cgcagcagagcggcgggcgg

SEQ ID NO: 20190 - RNA, 20 nt, synthetic construct
  source 1..20: mol_type = other RNA
agcagagcggcgggcggcgg

SEQ ID NO: 20191 - RNA, 20 nt, synthetic construct
  source 1..20: mol_type = other RNA
gcggcggcggcgtcgtcgag

SEQ ID NO: 20192 - RNA, 20 nt, synthetic construct
  source 1..20: mol_type = other RNA
tcgtcgagcggtgcagacaa

SEQ ID NO: 20193 - RNA, 20 nt, synthetic construct
  source 1..20: mol_type = other RNA
tcgagcggtgcagacaaagg

SEQ ID NO: 20194 - RNA, 20 nt, synthetic construct
  source 1..20: mol_type = other RNA
cgagcggtgcagacaaagga

SEQ ID NO: 20195 - RNA, 20 nt, synthetic construct
  source 1..20: mol_type = other RNA
gagcggtgcagacaaaggag

SEQ ID NO: 20196 - RNA, 20 nt, synthetic construct
  source 1..20: mol_type = other RNA
cggtgcagacaaaggagggg

SEQ ID NO: 20197 - RNA, 20 nt, synthetic construct
  source 1..20: mol_type = other RNA
tgcagacaaaggaggggcgg

SEQ ID NO: 20198 - RNA, 20 nt, synthetic construct
  source 1..20: mol_type = other RNA
gcagacaaaggaggggcgga

SEQ ID NO: 20199 - RNA, 20 nt, synthetic construct
  source 1..20: mol_type = other RNA
gacaaaggaggggcggaggg

SEQ ID NO: 20200 - RNA, 20 nt, synthetic construct
  source 1..20: mol_type = other RNA
ggaggggcggagggaggaga

SEQ ID NO: 20201 - RNA, 20 nt, synthetic construct
  source 1..20: mol_type = other RNA
ggggcggagggaggagacgg

SEQ ID NO: 20202 - RNA, 20 nt, synthetic construct
  source 1..20: mol_type = other RNA
gggcggagggaggagacgga

SEQ ID NO: 20203 - RNA, 20 nt, synthetic construct
  source 1..20: mol_type = other RNA
gagggaggagacggagggtg

SEQ ID NO: 20204 - RNA, 20 nt, synthetic construct
  source 1..20: mol_type = other RNA
agggaggagacggagggtgt

SEQ ID NO: 20205 - RNA, 20 nt, synthetic construct
  source 1..20: mol_type = other RNA
ggagacggagggtgtgggag

SEQ ID NO: 20206 - RNA, 20 nt, synthetic construct
  source 1..20: mol_type = other RNA
gacggagggtgtgggagagg

SEQ ID NO: 20207 - RNA, 20 nt, synthetic construct
  source 1..20: mol_type = other RNA
tgtgggagaggcggcttcac

SEQ ID NO: 20208 - RNA, 20 nt, synthetic construct
  source 1..20: mol_type = other RNA
gagaggcggcttcaccggcg

SEQ ID NO: 20209 - RNA, 20 nt, synthetic construct
  source 1..20: mol_type = other RNA
agaggcggcttcaccggcgc

SEQ ID NO: 20210 - RNA, 20 nt, synthetic construct
  source 1..20: mol_type = other RNA
ggcggcttcaccggcgcggg

SEQ ID NO: 20211 - RNA, 20 nt, synthetic construct
  source 1..20: mol_type = other RNA
ggcttcaccggcgcgggcgg

SEQ ID NO: 20212 - RNA, 20 nt, synthetic construct
  source 1..20: mol_type = other RNA
ttcaccggcgcgggcggcgg

SEQ ID NO: 20213 - RNA, 20 nt, synthetic construct
  source 1..20: mol_type = other RNA
gcggccgccgccgcccgcgc

SEQ ID NO: 20214 - RNA, 20 nt, synthetic construct
  source 1..20: mol_type = other RNA
ctcctctcgctcctcagcag

SEQ ID NO: 20215 - RNA, 20 nt, synthetic construct
  source 1..20: mol_type = other RNA
tcctctcgctcctcagcagc

SEQ ID NO: 20216 - RNA, 20 nt, synthetic construct
  source 1..20: mol_type = other RNA
cctctcgctcctcagcagcg

SEQ ID NO: 20217 - RNA, 20 nt, synthetic construct
  source 1..20: mol_type = other RNA
ccccgctgctgaggagcgag

SEQ ID NO: 20218 - RNA, 20 nt, synthetic construct
  source 1..20: mol_type = other RNA
tcagcagcggggaccgagag

SEQ ID NO: 20219 - RNA, 20 nt, synthetic construct
  source 1..20: mol_type = other RNA
cagcagcggggaccgagaga

SEQ ID NO: 20220 - RNA, 20 nt, synthetic construct
  source 1..20: mol_type = other RNA
tctctcggtccccgctgctg

SEQ ID NO: 20221 - RNA, 20 nt, synthetic construct
  source 1..20: mol_type = other RNA
tcagacacagctccctctct

SEQ ID NO: 20222 - RNA, 20 nt, synthetic construct
  source 1..20: mol_type = other RNA
atcccccttagcgctgcctg

SEQ ID NO: 20223 - RNA, 20 nt, synthetic construct
  source 1..20: mol_type = other RNA
tcccccttagcgctgcctgc

SEQ ID NO: 20224 - RNA, 20 nt, synthetic construct
  source 1..20: mol_type = other RNA
cccttagcgctgcctgcggg

SEQ ID NO: 20225 - RNA, 20 nt, synthetic construct
  source 1..20: mol_type = other RNA
ccttagcgctgcctgcggga

SEQ ID NO: 20226 - RNA, 20 nt, synthetic construct
  source 1..20: mol_type = other RNA
cttagcgctgcctgcgggag

SEQ ID NO: 20227 - RNA, 20 nt, synthetic construct
  source 1..20: mol_type = other RNA
ttagcgctgcctgcgggagg

SEQ ID NO: 20228 - RNA, 20 nt, synthetic construct
  source 1..20: mol_type = other RNA
ctcccgcaggcagcgctaag

SEQ ID NO: 20229 - RNA, 20 nt, synthetic construct
  source 1..20: mol_type = other RNA
cctcccgcaggcagcgctaa

SEQ ID NO: 20230 - RNA, 20 nt, synthetic construct
  source 1..20: mol_type = other RNA
gcgctgcctgcgggaggggg

SEQ ID NO: 20231 - RNA, 20 nt, synthetic construct
  source 1..20: mol_type = other RNA
cgctgcctgcgggaggggga

SEQ ID NO: 20232 - RNA, 20 nt, synthetic construct
  source 1..20: mol_type = other RNA
gctgcctgcgggagggggag

SEQ ID NO: 20233 - RNA, 20 nt, synthetic construct
  source 1..20: mol_type = other RNA
ctgcctgcgggagggggagg

SEQ ID NO: 20234 - RNA, 20 nt, synthetic construct
  source 1..20: mol_type = other RNA
gtgccccctccccctcccgc

SEQ ID NO: 20235 - RNA, 20 nt, synthetic construct
  source 1..20: mol_type = other RNA
gagggggagggggcacaaga

SEQ ID NO: 20236 - RNA, 20 nt, synthetic construct
  source 1..20: mol_type = other RNA
ggggagggggcacaagatgg

SEQ ID NO: 20237 - RNA, 20 nt, synthetic construct
  source 1..20: mol_type = other RNA
gagggggcacaagatggcgg

SEQ ID NO: 20238 - RNA, 20 nt, synthetic construct
  source 1..20: mol_type = other RNA
gggcacaagatggcggcggc

SEQ ID NO: 20239 - RNA, 20 nt, synthetic construct
  source 1..20: mol_type = other RNA
ggcacaagatggcggcggcc

SEQ ID NO: 20240 - RNA, 20 nt, synthetic construct
  source 1..20: mol_type = other RNA
gcacaagatggcggcggccg

SEQ ID NO: 20241 - RNA, 20 nt, synthetic construct
  source 1..20: mol_type = other RNA
cacaagatggcggcggccgg

SEQ ID NO: 20242 - RNA, 20 nt, synthetic construct
  source 1..20: mol_type = other RNA
acaagatggcggcggccggg

SEQ ID NO: 20243 - RNA, 20 nt, synthetic construct
  source 1..20: mol_type = other RNA
caagatggcggcggccgggg

SEQ ID NO: 20244 - RNA, 20 nt, synthetic construct
  source 1..20: mol_type = other RNA
aagatggcggcggccggggg

SEQ ID NO: 20245 - RNA, 20 nt, synthetic construct
  source 1..20: mol_type = other RNA
agatggcggcggccgggggg

SEQ ID NO: 20246 - RNA, 20 nt, synthetic construct
  source 1..20: mol_type = other RNA
gatggcggcggccggggggg

SEQ ID NO: 20247 - RNA, 20 nt, synthetic construct
  source 1..20: mol_type = other RNA
atggcggcggccgggggggg

SEQ ID NO: 20248 - RNA, 20 nt, synthetic construct
  source 1..20: mol_type = other RNA
tggcggcggccggggggggg

SEQ ID NO: 20249 - RNA, 20 nt, synthetic construct
  source 1..20: mol_type = other RNA
ggcggcggccgggggggggg

SEQ ID NO: 20250 - RNA, 20 nt, synthetic construct
  source 1..20: mol_type = other RNA
ggcggccggggggggggggg

SEQ ID NO: 20251 - RNA, 20 nt, synthetic construct
  source 1..20: mol_type = other RNA
gcggccgggggggggggggc

SEQ ID NO: 20252 - RNA, 20 nt, synthetic construct
  source 1..20: mol_type = other RNA
aactcccgcccccccccccc

SEQ ID NO: 20253 - RNA, 20 nt, synthetic construct
  source 1..20: mol_type = other RNA
gggggcgggagttcagctca

SEQ ID NO: 20254 - RNA, 20 nt, synthetic construct
  source 1..20: mol_type = other RNA
ggagttcagctcatggatcc

SEQ ID NO: 20255 - RNA, 20 nt, synthetic construct
  source 1..20: mol_type = other RNA
gttcagctcatggatcccgg

SEQ ID NO: 20256 - RNA, 20 nt, synthetic construct
  source 1..20: mol_type = other RNA
ttcagctcatggatcccggc

SEQ ID NO: 20257 - RNA, 20 nt, synthetic construct
  source 1..20: mol_type = other RNA
agctcatggatcccggcggg

SEQ ID NO: 20258 - RNA, 20 nt, synthetic construct
  source 1..20: mol_type = other RNA
tcatggatcccggcgggcgg

SEQ ID NO: 20259 - RNA, 20 nt, synthetic construct
  source 1..20: mol_type = other RNA
tggatcccggcgggcggcgg

SEQ ID NO: 20260 - RNA, 20 nt, synthetic construct
  source 1..20: mol_type = other RNA
ggatcccggcgggcggcgga

SEQ ID NO: 20261 - RNA, 20 nt, synthetic construct
  source 1..20: mol_type = other RNA
gatcccggcgggcggcggag

SEQ ID NO: 20262 - RNA, 20 nt, synthetic construct
  source 1..20: mol_type = other RNA
gcgggcggcggaggggagac

SEQ ID NO: 20263 - RNA, 20 nt, synthetic construct
  source 1..20: mol_type = other RNA
cgggcggcggaggggagacc

SEQ ID NO: 20264 - RNA, 20 nt, synthetic construct
  source 1..20: mol_type = other RNA
gtctcccctccgccgcccgc

SEQ ID NO: 20265 - RNA, 20 nt, synthetic construct
  source 1..20: mol_type = other RNA
cggcggaggggagaccgggc

SEQ ID NO: 20266 - RNA, 20 nt, synthetic construct
  source 1..20: mol_type = other RNA
cggaggggagaccgggccgg

SEQ ID NO: 20267 - RNA, 20 nt, synthetic construct
  source 1..20: mol_type = other RNA
aggggagaccgggccggcgg

SEQ ID NO: 20268 - RNA, 20 nt, synthetic construct
  source 1..20: mol_type = other RNA
ggagaccgggccggcggagg

SEQ ID NO: 20269 - RNA, 20 nt, synthetic construct
  source 1..20: mol_type = other RNA
gaccgggccggcggaggcgg

SEQ ID NO: 20270 - RNA, 20 nt, synthetic construct
  source 1..20: mol_type = other RNA
cgggccggcggaggcggcgg

SEQ ID NO: 20271 - RNA, 20 nt, synthetic construct
  source 1..20: mol_type = other RNA
cgccgccgcctccgccggcc

SEQ ID NO: 20272 - RNA, 20 nt, synthetic construct
  source 1..20: mol_type = other RNA
ggcggaggcggcggcggcaa

SEQ ID NO: 20273 - RNA, 20 nt, synthetic construct
  source 1..20: mol_type = other RNA
gcggaggcggcggcggcaac

SEQ ID NO: 20274 - RNA, 20 nt, synthetic construct
  source 1..20: mol_type = other RNA
gttgccgccgccgcctccgc

SEQ ID NO: 20275 - RNA, 20 nt, synthetic construct
  source 1..20: mol_type = other RNA
gaggcggcggcggcaacggg

SEQ ID NO: 20276 - RNA, 20 nt, synthetic construct
  source 1..20: mol_type = other RNA
aggcggcggcggcaacgggc

SEQ ID NO: 20277 - RNA, 20 nt, synthetic construct
  source 1..20: mol_type = other RNA
ggcggcggcggcaacgggcg

SEQ ID NO: 20278 - RNA, 20 nt, synthetic construct
  source 1..20: mol_type = other RNA
gcggcggcggcaacgggcgg

SEQ ID NO: 20279 - RNA, 20 nt, synthetic construct
  source 1..20: mol_type = other RNA
gcggcggcaacgggcggggg

SEQ ID NO: 20280 - RNA, 20 nt, synthetic construct
  source 1..20: mol_type = other RNA
cggcggcaacgggcggggga

SEQ ID NO: 20281 - RNA, 20 nt, synthetic construct
  source 1..20: mol_type = other RNA
ggcggcaacgggcgggggag

SEQ ID NO: 20282 - RNA, 20 nt, synthetic construct
  source 1..20: mol_type = other RNA
gcggcaacgggcgggggagg

SEQ ID NO: 20283 - RNA, 20 nt, synthetic construct
  source 1..20: mol_type = other RNA
tgtctgctgaggggagacgc

SEQ ID NO: 20284 - RNA, 20 nt, synthetic construct
  source 1..20: mol_type = other RNA
ttgtctgctgaggggagacg

SEQ ID NO: 20285 - RNA, 20 nt, synthetic construct
  source 1..20: mol_type = other RNA
cgcttgtattgtctgctgag

SEQ ID NO: 20286 - RNA, 20 nt, synthetic construct
  source 1..20: mol_type = other RNA
agcagacaatacaagcgcct

SEQ ID NO: 20287 - RNA, 20 nt, synthetic construct
  source 1..20: mol_type = other RNA
ggcgcttgtattgtctgctg

SEQ ID NO: 20288 - RNA, 20 nt, synthetic construct
  source 1..20: mol_type = other RNA
aggttcggggactcggtccg

SEQ ID NO: 20289 - RNA, 20 nt, synthetic construct
  source 1..20: mol_type = other RNA
ctagggcaggttcggggact

SEQ ID NO: 20290 - RNA, 20 nt, synthetic construct
  source 1..20: mol_type = other RNA
cgaacctgccctagccaaaa

SEQ ID NO: 20291 - RNA, 20 nt, synthetic construct
  source 1..20: mol_type = other RNA
ttttggctagggcaggttcg

SEQ ID NO: 20292 - RNA, 20 nt, synthetic construct
  source 1..20: mol_type = other RNA
acctgccctagccaaaatgg

SEQ ID NO: 20293 - RNA, 20 nt, synthetic construct
  source 1..20: mol_type = other RNA
cattttggctagggcaggtt

SEQ ID NO: 20294 - RNA, 20 nt, synthetic construct
  source 1..20: mol_type = other RNA
gccgccattttggctagggc

SEQ ID NO: 20295 - RNA, 20 nt, synthetic construct
  source 1..20: mol_type = other RNA
ctcggccgccattttggcta

SEQ ID NO: 20296 - RNA, 20 nt, synthetic construct
  source 1..20: mol_type = other RNA
tctcggccgccattttggct

SEQ ID NO: 20297 - RNA, 20 nt, synthetic construct
  source 1..20: mol_type = other RNA
aaatggcggccgagaaagag

SEQ ID NO: 20298 - RNA, 20 nt, synthetic construct
  source 1..20: mol_type = other RNA
ctctttctcggccgccattt

SEQ ID NO: 20299 - RNA, 20 nt, synthetic construct
  source 1..20: mol_type = other RNA
acgtcacttccgctctttct

SEQ ID NO: 20300 - RNA, 20 nt, synthetic construct
  source 1..20: mol_type = other RNA
aagtgcctcattagcataag

SEQ ID NO: 20301 - RNA, 20 nt, synthetic construct
  source 1..20: mol_type = other RNA
tgagtcctcttatgctaatg

SEQ ID NO: 20302 - RNA, 20 nt, synthetic construct
  source 1..20: mol_type = other RNA
gactcattgtccagctaaat

SEQ ID NO: 20303 - RNA, 20 nt, synthetic construct
  source 1..20: mol_type = other RNA
actcattgtccagctaaata

SEQ ID NO: 20304 - RNA, 20 nt, synthetic construct
  source 1..20: mol_type = other RNA
ctcattgtccagctaaatag

SEQ ID NO: 20305 - RNA, 20 nt, synthetic construct
  source 1..20: mol_type = other RNA
tcattgtccagctaaatagg

SEQ ID NO: 20306 - RNA, 20 nt, synthetic construct
  source 1..20: mol_type = other RNA
cattgtccagctaaataggg

SEQ ID NO: 20307 - RNA, 20 nt, synthetic construct
  source 1..20: mol_type = other RNA
attgtccagctaaatagggg

SEQ ID NO: 20308 - RNA, 20 nt, synthetic construct
  source 1..20: mol_type = other RNA
ttgtccagctaaataggggg

SEQ ID NO: 20309 - RNA, 20 nt, synthetic construct
  source 1..20: mol_type = other RNA
agctaaataggggggggcag

SEQ ID NO: 20310 - RNA, 20 nt, synthetic construct
  source 1..20: mol_type = other RNA
gctaaataggggggggcagt

SEQ ID NO: 20311 - RNA, 20 nt, synthetic construct
  source 1..20: mol_type = other RNA
ctaaataggggggggcagtg

SEQ ID NO: 20312 - RNA, 20 nt, synthetic construct
  source 1..20: mol_type = other RNA
actgcccccccctatttagc

SEQ ID NO: 20313 - RNA, 20 nt, synthetic construct
  source 1..20: mol_type = other RNA
cccctaacccccttttcccc

SEQ ID NO: 20314 - RNA, 20 nt, synthetic construct
  source 1..20: mol_type = other RNA
ccctaacccccttttcccca

SEQ ID NO: 20315 - RNA, 20 nt, synthetic construct
  source 1..20: mol_type = other RNA
cctaacccccttttccccag

SEQ ID NO: 20316 - RNA, 20 nt, synthetic construct
  source 1..20: mol_type = other RNA
ctaacccccttttccccagg

SEQ ID NO: 20317 - RNA, 20 nt, synthetic construct
  source 1..20: mol_type = other RNA
taacccccttttccccaggg

SEQ ID NO: 20318 - RNA, 20 nt, synthetic construct
  source 1..20: mol_type = other RNA
aacccccttttccccagggg

SEQ ID NO: 20319 - RNA, 20 nt, synthetic construct
  source 1..20: mol_type = other RNA
ccctggggaaaagggggtta

SEQ ID NO: 20320 - RNA, 20 nt, synthetic construct
  source 1..20: mol_type = other RNA
cccctggggaaaagggggtt

SEQ ID NO: 20321 - RNA, 20 nt, synthetic construct
  source 1..20: mol_type = other RNA
aaccccccctggggaaaagg

SEQ ID NO: 20322 - RNA, 20 nt, synthetic construct
  source 1..20: mol_type = other RNA
gaaccccccctggggaaaag

SEQ ID NO: 20323 - RNA, 20 nt, synthetic construct
  source 1..20: mol_type = other RNA
ggaaccccccctggggaaaa

SEQ ID NO: 20324 - RNA, 20 nt, synthetic construct
  source 1..20: mol_type = other RNA
aggaaccccccctggggaaa

SEQ ID NO: 20325 - RNA, 20 nt, synthetic construct
  source 1..20: mol_type = other RNA
agtaagaggaaccccccctg

SEQ ID NO: 20326 - RNA, 20 nt, synthetic construct
  source 1..20: mol_type = other RNA
gagtaagaggaaccccccct

SEQ ID NO: 20327 - RNA, 20 nt, synthetic construct
  source 1..20: mol_type = other RNA
ggagtaagaggaaccccccc

SEQ ID NO: 20328 - RNA, 20 nt, synthetic construct
  source 1..20: mol_type = other RNA
caagcaggggtgggagtaag

SEQ ID NO: 20329 - RNA, 20 nt, synthetic construct
  source 1..20: mol_type = other RNA
agttaggtgcaagcaggggt

SEQ ID NO: 20330 - RNA, 20 nt, synthetic construct
  source 1..20: mol_type = other RNA
aagttaggtgcaagcagggg

SEQ ID NO: 20331 - RNA, 20 nt, synthetic construct
  source 1..20: mol_type = other RNA
gaaaagttaggtgcaagcag

SEQ ID NO: 20332 - RNA, 20 nt, synthetic construct
  source 1..20: mol_type = other RNA
cttgcacctaacttttcctg

SEQ ID NO: 20333 - RNA, 20 nt, synthetic construct
  source 1..20: mol_type = other RNA
ttgcacctaacttttcctga

SEQ ID NO: 20334 - RNA, 20 nt, synthetic construct
  source 1..20: mol_type = other RNA
cacctaacttttcctgaggg

SEQ ID NO: 20335 - RNA, 20 nt, synthetic construct
  source 1..20: mol_type = other RNA
acctaacttttcctgaggga

SEQ ID NO: 20336 - RNA, 20 nt, synthetic construct
  source 1..20: mol_type = other RNA
accctccctcaggaaaagtt

SEQ ID NO: 20337 - RNA, 20 nt, synthetic construct
  source 1..20: mol_type = other RNA
tgctgagagcaccctccctc

SEQ ID NO: 20338 - RNA, 20 nt, synthetic construct
  source 1..20: mol_type = other RNA
agcacccccacccccgcttg

SEQ ID NO: 20339 - RNA, 20 nt, synthetic construct
  source 1..20: mol_type = other RNA
gcacccccacccccgcttga

SEQ ID NO: 20340 - RNA, 20 nt, synthetic construct
  source 1..20: mol_type = other RNA
tttccctcaagcgggggtgg

SEQ ID NO: 20341 - RNA, 20 nt, synthetic construct
  source 1..20: mol_type = other RNA
atttccctcaagcgggggtg

SEQ ID NO: 20342 - RNA, 20 nt, synthetic construct
  source 1..20: mol_type = other RNA
aatttccctcaagcgggggt

SEQ ID NO: 20343 - RNA, 20 nt, synthetic construct
  source 1..20: mol_type = other RNA
taatttccctcaagcggggg

SEQ ID NO: 20344 - RNA, 20 nt, synthetic construct
  source 1..20: mol_type = other RNA
atataatttccctcaagcgg

SEQ ID NO: 20345 - RNA, 20 nt, synthetic construct
  source 1..20: mol_type = other RNA
tatataatttccctcaagcg

SEQ ID NO: 20346 - RNA, 20 nt, synthetic construct
  source 1..20: mol_type = other RNA
ttatataatttccctcaagc

SEQ ID NO: 20347 - RNA, 20 nt, synthetic construct
  source 1..20: mol_type = other RNA
attatataatttccctcaag

SEQ ID NO: 20348 - RNA, 20 nt, synthetic construct
  source 1..20: mol_type = other RNA
aaattatataatccccactg

SEQ ID NO: 20349 - RNA, 20 nt, synthetic construct
  source 1..20: mol_type = other RNA
aattatataatccccactga

SEQ ID NO: 20350 - RNA, 20 nt, synthetic construct
  source 1..20: mol_type = other RNA
attatataatccccactgag

SEQ ID NO: 20351 - RNA, 20 nt, synthetic construct
  source 1..20: mol_type = other RNA
ttatataatccccactgagg

SEQ ID NO: 20352 - RNA, 20 nt, synthetic construct
  source 1..20: mol_type = other RNA
tatataatccccactgaggg

SEQ ID NO: 20353 - RNA, 20 nt, synthetic construct
  source 1..20: mol_type = other RNA
cgagagctcccccctcagtg

SEQ ID NO: 20354 - RNA, 20 nt, synthetic construct
  source 1..20: mol_type = other RNA
gcgagagctcccccctcagt

SEQ ID NO: 20355 - RNA, 20 nt, synthetic construct
  source 1..20: mol_type = other RNA
cgcgagagctcccccctcag

SEQ ID NO: 20356 - RNA, 20 nt, synthetic construct
  source 1..20: mol_type = other RNA
ggggagctctcgcgagaacc

SEQ ID NO: 20357 - RNA, 20 nt, synthetic construct
  source 1..20: mol_type = other RNA
gagctctcgcgagaaccagg

SEQ ID NO: 20358 - RNA, 20 nt, synthetic construct
  source 1..20: mol_type = other RNA
gggtcaatggcaaatccgcc

SEQ ID NO: 20359 - RNA, 20 nt, synthetic construct
  source 1..20: mol_type = other RNA
ggatttgccattgacccact

SEQ ID NO: 20360 - RNA, 20 nt, synthetic construct
  source 1..20: mol_type = other RNA
tttgccattgacccactagg

SEQ ID NO: 20361 - RNA, 20 nt, synthetic construct
  source 1..20: mol_type = other RNA
tgacccactaggaggcgccg

SEQ ID NO: 20362 - RNA, 20 nt, synthetic construct
  source 1..20: mol_type = other RNA
ggcgcctcctagtgggtcaa

SEQ ID NO: 20363 - RNA, 20 nt, synthetic construct
  source 1..20: mol_type = other RNA
ctaggaggcgccgcggataa

SEQ ID NO: 20364 - RNA, 20 nt, synthetic construct
  source 1..20: mol_type = other RNA
tatccgcggcgcctcctagt

SEQ ID NO: 20365 - RNA, 20 nt, synthetic construct
  source 1..20: mol_type = other RNA
ttatccgcggcgcctcctag

SEQ ID NO: 20366 - RNA, 20 nt, synthetic construct
  source 1..20: mol_type = other RNA
cgcactgcggccattatccg

SEQ ID NO: 20367 - RNA, 20 nt, synthetic construct
  source 1..20: mol_type = other RNA
taatggccgcagtgcgctcc

SEQ ID NO: 20368 - RNA, 20 nt, synthetic construct
  source 1..20: mol_type = other RNA
aatggccgcagtgcgctccc

SEQ ID NO: 20369 - RNA, 20 nt, synthetic construct
  source 1..20: mol_type = other RNA
atggccgcagtgcgctcccg

SEQ ID NO: 20370 - RNA, 20 nt, synthetic construct
  source 1..20: mol_type = other RNA
cgggccccgggagcgcactg

SEQ ID NO: 20371 - RNA, 20 nt, synthetic construct
  source 1..20: mol_type = other RNA
gctcccggggcccgtgtgct

SEQ ID NO: 20372 - RNA, 20 nt, synthetic construct
  source 1..20: mol_type = other RNA
cccggggcccgtgtgctcgg

SEQ ID NO: 20373 - RNA, 20 nt, synthetic construct
  source 1..20: mol_type = other RNA
ccggggcccgtgtgctcggc

SEQ ID NO: 20374 - RNA, 20 nt, synthetic construct
  source 1..20: mol_type = other RNA
ccgccgagcacacgggcccc

SEQ ID NO: 20375 - RNA, 20 nt, synthetic construct
  source 1..20: mol_type = other RNA
cccgccgagcacacgggccc

SEQ ID NO: 20376 - RNA, 20 nt, synthetic construct
  source 1..20: mol_type = other RNA
aaggcgcccgccgagcacac

SEQ ID NO: 20377 - RNA, 20 nt, synthetic construct
  source 1..20: mol_type = other RNA
gaaggcgcccgccgagcaca

SEQ ID NO: 20378 - RNA, 20 nt, synthetic construct
  source 1..20: mol_type = other RNA
gctcggcgggcgccttcctc

SEQ ID NO: 20379 - RNA, 20 nt, synthetic construct
  source 1..20: mol_type = other RNA
ccttcctctggccgcagcgc

SEQ ID NO: 20380 - RNA, 20 nt, synthetic construct
  source 1..20: mol_type = other RNA
tcctctggccgcagcgccgg

SEQ ID NO: 20381 - RNA, 20 nt, synthetic construct
  source 1..20: mol_type = other RNA
ccggcgctgcggccagagga

SEQ ID NO: 20382 - RNA, 20 nt, synthetic construct
  source 1..20: mol_type = other RNA
tctggccgcagcgccggcgg

SEQ ID NO: 20383 - RNA, 20 nt, synthetic construct
  source 1..20: mol_type = other RNA
ggccgcagcgccggcggcgg

SEQ ID NO: 20384 - RNA, 20 nt, synthetic construct
  source 1..20: mol_type = other RNA
tgcctccgccgccggcgctg

SEQ ID NO: 20385 - RNA, 20 nt, synthetic construct
  source 1..20: mol_type = other RNA
ggcggcggaggcagaagcag

SEQ ID NO: 20386 - RNA, 20 nt, synthetic construct
  source 1..20: mol_type = other RNA
gcggcggaggcagaagcagc

SEQ ID NO: 20387 - RNA, 20 nt, synthetic construct
  source 1..20: mol_type = other RNA
gctgcttctgcctccgccgc

SEQ ID NO: 20388 - RNA, 20 nt, synthetic construct
  source 1..20: mol_type = other RNA
agcacgcccagcactcagtc

SEQ ID NO: 20389 - RNA, 20 nt, synthetic construct
  source 1..20: mol_type = other RNA
actgagtgctgggcgtgctg

SEQ ID NO: 20390 - RNA, 20 nt, synthetic construct
  source 1..20: mol_type = other RNA
acgcccagcactcagtcagg

SEQ ID NO: 20391 - RNA, 20 nt, synthetic construct
  source 1..20: mol_type = other RNA
cggccacctgactgagtgct

SEQ ID NO: 20392 - RNA, 20 nt, synthetic construct
  source 1..20: mol_type = other RNA
actcagtcaggtggccgtgc

SEQ ID NO: 20393 - RNA, 20 nt, synthetic construct
  source 1..20: mol_type = other RNA
ctcagtcaggtggccgtgct

SEQ ID NO: 20394 - RNA, 20 nt, synthetic construct
  source 1..20: mol_type = other RNA
tcagtcaggtggccgtgctg

SEQ ID NO: 20395 - RNA, 20 nt, synthetic construct
  source 1..20: mol_type = other RNA
ccgtgctggggatccctgcg

SEQ ID NO: 20396 - RNA, 20 nt, synthetic construct
  source 1..20: mol_type = other RNA
cgtgctggggatccctgcgc

SEQ ID NO: 20397 - RNA, 20 nt, synthetic construct
  source 1..20: mol_type = other RNA
ccgcgcagggatccccagca

SEQ ID NO: 20398 - RNA, 20 nt, synthetic construct
  source 1..20: mol_type = other RNA
gatccctgcgcgggcccagc

SEQ ID NO: 20399 - RNA, 20 nt, synthetic construct
  source 1..20: mol_type = other RNA
atccctgcgcgggcccagct

SEQ ID NO: 20400 - RNA, 20 nt, synthetic construct
  source 1..20: mol_type = other RNA
tgcgcgggcccagctgggcc

SEQ ID NO: 20401 - RNA, 20 nt, synthetic construct
  source 1..20: mol_type = other RNA
ggcccagctgggcccgcgca

SEQ ID NO: 20402 - RNA, 20 nt, synthetic construct
  source 1..20: mol_type = other RNA
aggcccagctgggcccgcgc

SEQ ID NO: 20403 - RNA, 20 nt, synthetic construct
  source 1..20: mol_type = other RNA
agctgggcctggactacatc

SEQ ID NO: 20404 - RNA, 20 nt, synthetic construct
  source 1..20: mol_type = other RNA
gatgtagtccaggcccagct

SEQ ID NO: 20405 - RNA, 20 nt, synthetic construct
  source 1..20: mol_type = other RNA
tgggcctggactacatctgg

SEQ ID NO: 20406 - RNA, 20 nt, synthetic construct
  source 1..20: mol_type = other RNA
gggcctggactacatctggc

SEQ ID NO: 20407 - RNA, 20 nt, synthetic construct
  source 1..20: mol_type = other RNA
cctggactacatctggcggg

SEQ ID NO: 20408 - RNA, 20 nt, synthetic construct
  source 1..20: mol_type = other RNA
ctggactacatctggcggga

SEQ ID NO: 20409 - RNA, 20 nt, synthetic construct
  source 1..20: mol_type = other RNA
tggactacatctggcgggag

SEQ ID NO: 20410 - RNA, 20 nt, synthetic construct
  source 1..20: mol_type = other RNA
cctcccgccagatgtagtcc

SEQ ID NO: 20411 - RNA, 20 nt, synthetic construct
  source 1..20: mol_type = other RNA
catctggcgggaggggtgtg

SEQ ID NO: 20412 - RNA, 20 nt, synthetic construct
  source 1..20: mol_type = other RNA
atctggcgggaggggtgtgc

SEQ ID NO: 20413 - RNA, 20 nt, synthetic construct
  source 1..20: mol_type = other RNA
tctggcgggaggggtgtgcg

SEQ ID NO: 20414 - RNA, 20 nt, synthetic construct
  source 1..20: mol_type = other RNA
ggcgggaggggtgtgcgggg

SEQ ID NO: 20415 - RNA, 20 nt, synthetic construct
  source 1..20: mol_type = other RNA
gaggggtgtgcggggcggcc

SEQ ID NO: 20416 - RNA, 20 nt, synthetic construct
  source 1..20: mol_type = other RNA
aggggtgtgcggggcggcct

SEQ ID NO: 20417 - RNA, 20 nt, synthetic construct
  source 1..20: mol_type = other RNA
ggggtgtgcggggcggcctg

SEQ ID NO: 20418 - RNA, 20 nt, synthetic construct
  source 1..20: mol_type = other RNA
gtgtgcggggcggcctgggg

SEQ ID NO: 20419 - RNA, 20 nt, synthetic construct
  source 1..20: mol_type = other RNA
tgagcacgtggagccgcccc

SEQ ID NO: 20420 - RNA, 20 nt, synthetic construct
  source 1..20: mol_type = other RNA
agcgcgggcatctgagcacg

SEQ ID NO: 20421 - RNA, 20 nt, synthetic construct
  source 1..20: mol_type = other RNA
ctcagatgcccgcgcttcca

SEQ ID NO: 20422 - RNA, 20 nt, synthetic construct
  source 1..20: mol_type = other RNA
gcgcttccacggctgagaag

SEQ ID NO: 20423 - RNA, 20 nt, synthetic construct
  source 1..20: mol_type = other RNA
cttctcagccgtggaagcgc

SEQ ID NO: 20424 - RNA, 20 nt, synthetic construct
  source 1..20: mol_type = other RNA
cttccacggctgagaagcgg

SEQ ID NO: 20425 - RNA, 20 nt, synthetic construct
  source 1..20: mol_type = other RNA
ttccacggctgagaagcggc

SEQ ID NO: 20426 - RNA, 20 nt, synthetic construct
  source 1..20: mol_type = other RNA
acggctgagaagcggcggga

SEQ ID NO: 20427 - RNA, 20 nt, synthetic construct
  source 1..20: mol_type = other RNA
ttcccgccgcttctcagccg

SEQ ID NO: 20428 - RNA, 20 nt, synthetic construct
  source 1..20: mol_type = other RNA
gagaagcggcgggaaggcgc

SEQ ID NO: 20429 - RNA, 20 nt, synthetic construct
  source 1..20: mol_type = other RNA
agaagcggcgggaaggcgcc

SEQ ID NO: 20430 - RNA, 20 nt, synthetic construct
  source 1..20: mol_type = other RNA
cgggaaggcgccgggacacc

SEQ ID NO: 20431 - RNA, 20 nt, synthetic construct
  source 1..20: mol_type = other RNA
aaggcgccgggacacctggc

SEQ ID NO: 20432 - RNA, 20 nt, synthetic construct
  source 1..20: mol_type = other RNA
gggcgaccggccaggtgtcc

SEQ ID NO: 20433 - RNA, 20 nt, synthetic construct
  source 1..20: mol_type = other RNA
ggcgtcaggggcgaccggcc

SEQ ID NO: 20434 - RNA, 20 nt, synthetic construct
  source 1..20: mol_type = other RNA
caggaggcgtcaggggcgac

SEQ ID NO: 20435 - RNA, 20 nt, synthetic construct
  source 1..20: mol_type = other RNA
gacgcctcctgccttaaatg

SEQ ID NO: 20436 - RNA, 20 nt, synthetic construct
  source 1..20: mol_type = other RNA
atttaaggcaggaggcgtca

SEQ ID NO: 20437 - RNA, 20 nt, synthetic construct
  source 1..20: mol_type = other RNA
catttaaggcaggaggcgtc

SEQ ID NO: 20438 - RNA, 20 nt, synthetic construct
  source 1..20: mol_type = other RNA
cctgccttaaatgaggtgtg

SEQ ID NO: 20439 - RNA, 20 nt, synthetic construct
  source 1..20: mol_type = other RNA
ctgccttaaatgaggtgtga

SEQ ID NO: 20440 - RNA, 20 nt, synthetic construct
  source 1..20: mol_type = other RNA
cacacctcatttaaggcagg

SEQ ID NO: 20441 - RNA, 20 nt, synthetic construct
  source 1..20: mol_type = other RNA
cctcacacctcatttaaggc

SEQ ID NO: 20442 - RNA, 20 nt, synthetic construct
  source 1..20: mol_type = other RNA
aggccctcacacctcattta

SEQ ID NO: 20443 - RNA, 20 nt, synthetic construct
  source 1..20: mol_type = other RNA
aagtcgctgtgtgaagcacg

SEQ ID NO: 20444 - RNA, 20 nt, synthetic construct
  source 1..20: mol_type = other RNA
tgagatgagacacaacccca

SEQ ID NO: 20445 - RNA, 20 nt, synthetic construct
  source 1..20: mol_type = other RNA
atggatgccttagcccttcc

SEQ ID NO: 20446 - RNA, 20 nt, synthetic construct
  source 1..20: mol_type = other RNA
gaagggctaaggcatccatg

SEQ ID NO: 20447 - RNA, 20 nt, synthetic construct
  source 1..20: mol_type = other RNA
ggaagggctaaggcatccat

SEQ ID NO: 20448 - RNA, 20 nt, synthetic construct
  source 1..20: mol_type = other RNA
gatgccttagcccttcctgg

SEQ ID NO: 20449 - RNA, 20 nt, synthetic construct
  source 1..20: mol_type = other RNA
atgccttagcccttcctggt

SEQ ID NO: 20450 - RNA, 20 nt, synthetic construct
  source 1..20: mol_type = other RNA
tgccttagcccttcctggtg

SEQ ID NO: 20451 - RNA, 20 nt, synthetic construct
  source 1..20: mol_type = other RNA
gcccttcctggtggggtatt

SEQ ID NO: 20452 - RNA, 20 nt, synthetic construct
  source 1..20: mol_type = other RNA
accgaataccccaccaggaa

SEQ ID NO: 20453 - RNA, 20 nt, synthetic construct
  source 1..20: mol_type = other RNA
caccgaataccccaccagga

SEQ ID NO: 20454 - RNA, 20 nt, synthetic construct
  source 1..20: mol_type = other RNA
tggtggggtattcggtgcag

SEQ ID NO: 20455 - RNA, 20 nt, synthetic construct
  source 1..20: mol_type = other RNA
ggtggggtattcggtgcaga

SEQ ID NO: 20456 - RNA, 20 nt, synthetic construct
  source 1..20: mol_type = other RNA
gtggggtattcggtgcagag

SEQ ID NO: 20457 - RNA, 20 nt, synthetic construct
  source 1..20: mol_type = other RNA
tctgcaccgaataccccacc

SEQ ID NO: 20458 - RNA, 20 nt, synthetic construct
  source 1..20: mol_type = other RNA
gaggggccgagattttatta

SEQ ID NO: 20459 - RNA, 20 nt, synthetic construct
  source 1..20: mol_type = other RNA
ggcggaccttaataaaatct

SEQ ID NO: 20460 - RNA, 20 nt, synthetic construct
  source 1..20: mol_type = other RNA
gtcaagtcacagggtaacgg

SEQ ID NO: 20461 - RNA, 20 nt, synthetic construct
  source 1..20: mol_type = other RNA
aatgtcaagtcacagggtaa

SEQ ID NO: 20462 - RNA, 20 nt, synthetic construct
  source 1..20: mol_type = other RNA
gggaagaatgtcaagtcaca

SEQ ID NO: 20463 - RNA, 20 nt, synthetic construct
  source 1..20: mol_type = other RNA
tgggaagaatgtcaagtcac

SEQ ID NO: 20464 - RNA, 20 nt, synthetic construct
  source 1..20: mol_type = other RNA
attcttcccagtcacagtga

SEQ ID NO: 20465 - RNA, 20 nt, synthetic construct
  source 1..20: mol_type = other RNA
aagagtccatcactgtgact

SEQ ID NO: 20466 - RNA, 20 nt, synthetic construct
  source 1..20: mol_type = other RNA
gaagagtccatcactgtgac

SEQ ID NO: 20467 - RNA, 20 nt, synthetic construct
  source 1..20: mol_type = other RNA
gacctgaataaaaaaaaaaa

SEQ ID NO: 20468 - RNA, 20 nt, synthetic construct
  source 1..20: mol_type = other RNA
acctgaataaaaaaaaaaat

SEQ ID NO: 20469 - RNA, 20 nt, synthetic construct
  source 1..20: mol_type = other RNA
tcccatttttttttttattc

SEQ ID NO: 20470 - RNA, 20 nt, synthetic construct
  source 1..20: mol_type = other RNA
atgggaatcctagtgccttg

SEQ ID NO: 20471 - RNA, 20 nt, synthetic construct
  source 1..20: mol_type = other RNA
gtgccttgaggccacccaac

SEQ ID NO: 20472 - RNA, 20 nt, synthetic construct
  source 1..20: mol_type = other RNA
ttgggtggcctcaaggcact

SEQ ID NO: 20473 - RNA, 20 nt, synthetic construct
  source 1..20: mol_type = other RNA
tcaccagttgggtggcctca

SEQ ID NO: 20474 - RNA, 20 nt, synthetic construct
  source 1..20: mol_type = other RNA
cacccaactggtgaaactta

SEQ ID NO: 20475 - RNA, 20 nt, synthetic construct
  source 1..20: mol_type = other RNA
cttaagtttcaccagttggg

SEQ ID NO: 20476 - RNA, 20 nt, synthetic construct
  source 1..20: mol_type = other RNA
atccttaagtttcaccagtt

SEQ ID NO: 20477 - RNA, 20 nt, synthetic construct
  source 1..20: mol_type = other RNA
catccttaagtttcaccagt

SEQ ID NO: 20478 - RNA, 20 nt, synthetic construct
  source 1..20: mol_type = other RNA
tgagaagtgatgttgccaat

SEQ ID NO: 20479 - RNA, 20 nt, synthetic construct
  source 1..20: mol_type = other RNA
gagaagtgatgttgccaata

SEQ ID NO: 20480 - RNA, 20 nt, synthetic construct
  source 1..20: mol_type = other RNA
agaagtgatgttgccaatag

SEQ ID NO: 20481 - RNA, 20 nt, synthetic construct
  source 1..20: mol_type = other RNA
gatgttgccaataggggcat

SEQ ID NO: 20482 - RNA, 20 nt, synthetic construct
  source 1..20: mol_type = other RNA
cagagagccaatgcccctat

SEQ ID NO: 20483 - RNA, 20 nt, synthetic construct
  source 1..20: mol_type = other RNA
actacaaagtgtgttgttta

SEQ ID NO: 20484 - RNA, 20 nt, synthetic construct
  source 1..20: mol_type = other RNA
acaacacactttgtagtcct

SEQ ID NO: 20485 - RNA, 20 nt, synthetic construct
  source 1..20: mol_type = other RNA
caacacactttgtagtccta

SEQ ID NO: 20486 - RNA, 20 nt, synthetic construct
  source 1..20: mol_type = other RNA
agtcctagggacatagcttt

SEQ ID NO: 20487 - RNA, 20 nt, synthetic construct
  source 1..20: mol_type = other RNA
gcaccaaaagctatgtccct

SEQ ID NO: 20488 - RNA, 20 nt, synthetic construct
  source 1..20: mol_type = other RNA
cttttggtgctcccacaatc

SEQ ID NO: 20489 - RNA, 20 nt, synthetic construct
  source 1..20: mol_type = other RNA
ttttggtgctcccacaatct

SEQ ID NO: 20490 - RNA, 20 nt, synthetic construct
  source 1..20: mol_type = other RNA
tcttatgctacccagattgt

SEQ ID NO: 20491 - RNA, 20 nt, synthetic construct
  source 1..20: mol_type = other RNA
gtcttatgctacccagattg

SEQ ID NO: 20492 - RNA, 20 nt, synthetic construct
  source 1..20: mol_type = other RNA
gggtagcataagacagcaca

SEQ ID NO: 20493 - RNA, 20 nt, synthetic construct
  source 1..20: mol_type = other RNA
catggttgctttgtaaattt

SEQ ID NO: 20494 - RNA, 20 nt, synthetic construct
  source 1..20: mol_type = other RNA
gaggagataatgtattggtt

SEQ ID NO: 20495 - RNA, 20 nt, synthetic construct
  source 1..20: mol_type = other RNA
tgaggagataatgtattggt

SEQ ID NO: 20496 - RNA, 20 nt, synthetic construct
  source 1..20: mol_type = other RNA
atgttgaggagataatgtat

SEQ ID NO: 20497 - RNA, 20 nt, synthetic construct
  source 1..20: mol_type = other RNA
aggttggttcaaaaatgttg

SEQ ID NO: 20498 - RNA, 20 nt, synthetic construct
  source 1..20: mol_type = other RNA
ttgaaccaaccttttaaagt

SEQ ID NO: 20499 - RNA, 20 nt, synthetic construct
  source 1..20: mol_type = other RNA
aacaacctactttaaaaggt

SEQ ID NO: 20500 - RNA, 20 nt, synthetic construct
  source 1..20: mol_type = other RNA
tttgaacaacctactttaaa

SEQ ID NO: 20501 - RNA, 20 nt, synthetic construct
  source 1..20: mol_type = other RNA
attatgatttaaagtatcat

SEQ ID NO: 20502 - RNA, 20 nt, synthetic construct
  source 1..20: mol_type = other RNA
tgatttaaagtatcattggt

SEQ ID NO: 20503 - RNA, 20 nt, synthetic construct
  source 1..20: mol_type = other RNA
agtaatagatgtcaatagtg

SEQ ID NO: 20504 - RNA, 20 nt, synthetic construct
  source 1..20: mol_type = other RNA
acatattaaggaaacaggct

SEQ ID NO: 20505 - RNA, 20 nt, synthetic construct
  source 1..20: mol_type = other RNA
ttccttaatatgtgatcttt

SEQ ID NO: 20506 - RNA, 20 nt, synthetic construct
  source 1..20: mol_type = other RNA
tacctaaagatcacatatta

SEQ ID NO: 20507 - RNA, 20 nt, synthetic construct
  source 1..20: mol_type = other RNA
gtaaagaaacagcaaaagac

SEQ ID NO: 20508 - RNA, 20 nt, synthetic construct
  source 1..20: mol_type = other RNA
ttattttcggatgttaagta

SEQ ID NO: 20509 - RNA, 20 nt, synthetic construct
  source 1..20: mol_type = other RNA
cagcgaactcagattatttt

SEQ ID NO: 20510 - RNA, 20 nt, synthetic construct
  source 1..20: mol_type = other RNA
gctgcaagtagtataaattg

SEQ ID NO: 20511 - RNA, 20 nt, synthetic construct
  source 1..20: mol_type = other RNA
gtataaaagtttgttaaaca

SEQ ID NO: 20512 - RNA, 20 nt, synthetic construct
  source 1..20: mol_type = other RNA
tgtataaaagtttgttaaac

SEQ ID NO: 20513 - RNA, 20 nt, synthetic construct
  source 1..20: mol_type = other RNA
aaagccaagtcagtatttca

SEQ ID NO: 20514 - RNA, 20 nt, synthetic construct
  source 1..20: mol_type = other RNA
aagccaagtcagtatttcaa

SEQ ID NO: 20515 - RNA, 20 nt, synthetic construct
  source 1..20: mol_type = other RNA
tttcccttgaaatactgact

SEQ ID NO: 20516 - RNA, 20 nt, synthetic construct
  source 1..20: mol_type = other RNA
aaaacagctgaaaaaagtcg

SEQ ID NO: 20517 - RNA, 20 nt, synthetic construct
  source 1..20: mol_type = other RNA
ctgaaaaaagtcgtggaaaa

SEQ ID NO: 20518 - RNA, 20 nt, synthetic construct
  source 1..20: mol_type = other RNA
tgaaaaaagtcgtggaaaaa

SEQ ID NO: 20519 - RNA, 20 nt, synthetic construct
  source 1..20: mol_type = other RNA
gaaaaaagtcgtggaaaaag

SEQ ID NO: 20520 - RNA, 20 nt, synthetic construct
  source 1..20: mol_type = other RNA
aaagtcgtggaaaaaggggt

SEQ ID NO: 20521 - RNA, 20 nt, synthetic construct
  source 1..20: mol_type = other RNA
aagtcgtggaaaaaggggtt

SEQ ID NO: 20522 - RNA, 20 nt, synthetic construct
  source 1..20: mol_type = other RNA
agtcgtggaaaaaggggttg

SEQ ID NO: 20523 - DNA, 28 bp, synthetic construct
  source 1..28: mol_type = other DNA
aaaacaaaacacaccaaacctctgtagg

SEQ ID NO: 20524 - DNA, 28 bp, synthetic construct
  source 1..28: mol_type = other DNA
cacaccaaacctctgtaggatacttagg

SEQ ID NO: 20525 - DNA, 28 bp, synthetic construct
  source 1..28: mol_type = other DNA
ttagaagtgttcagcctacatttacagg

SEQ ID NO: 20526 - DNA, 28 bp, synthetic construct
  source 1..28: mol_type = other DNA
ctaattagagaatgcctgtaaatgtagg

SEQ ID NO: 20527 - DNA, 28 bp, synthetic construct
  source 1..28: mol_type = other DNA
ctacatttacaggcattctctaattagg

SEQ ID NO: 20528 - DNA, 28 bp, synthetic construct
  source 1..28: mol_type = other DNA
catttacaggcattctctaattaggtgg

SEQ ID NO: 20529 - DNA, 28 bp, synthetic construct
  source 1..28: mol_type = other DNA
caaataatctggagatcgttggctatgg

SEQ ID NO: 20530 - DNA, 28 bp, synthetic construct
  source 1..28: mol_type = other DNA
gcttttcaaataatctggagatcgttgg

SEQ ID NO: 20531 - DNA, 28 bp, synthetic construct
  source 1..28: mol_type = other DNA
gctactgtttgcttttcaaataatctgg

SEQ ID NO: 20532 - DNA, 28 bp, synthetic construct
  source 1..28: mol_type = other DNA
cagtagcaacaatattcttttaaaatgg

SEQ ID NO: 20533 - DNA, 28 bp, synthetic construct
  source 1..28: mol_type = other DNA
aaatggcttttattgagacacttgtagg

SEQ ID NO: 20534 - DNA, 28 bp, synthetic construct
  source 1..28: mol_type = other DNA
aatggcttttattgagacacttgtaggg

SEQ ID NO: 20535 - DNA, 28 bp, synthetic construct
  source 1..28: mol_type = other DNA
gtagggattctgcaacatttccagttgg

SEQ ID NO: 20536 - DNA, 28 bp, synthetic construct
  source 1..28: mol_type = other DNA
tagggattctgcaacatttccagttggg

SEQ ID NO: 20537 - DNA, 28 bp, synthetic construct
  source 1..28: mol_type = other DNA
agagttggaaataaagattcccaactgg

SEQ ID NO: 20538 - DNA, 28 bp, synthetic construct
  source 1..28: mol_type = other DNA
ttgggaatctttatttccaactcttagg

SEQ ID NO: 20539 - DNA, 28 bp, synthetic construct
  source 1..28: mol_type = other DNA
tgggaatctttatttccaactcttaggg

SEQ ID NO: 20540 - DNA, 28 bp, synthetic construct
  source 1..28: mol_type = other DNA
gaatctttatttccaactcttagggtgg

SEQ ID NO: 20541 - DNA, 28 bp, synthetic construct
  source 1..28: mol_type = other DNA
aaaagggtttagccaccctaagagttgg

SEQ ID NO: 20542 - DNA, 28 bp, synthetic construct
  source 1..28: mol_type = other DNA
gctaaacccttttctgaatgccaaaagg

SEQ ID NO: 20543 - DNA, 28 bp, synthetic construct
  source 1..28: mol_type = other DNA
agtgtgccttttggcattcagaaaaggg

SEQ ID NO: 20544 - DNA, 28 bp, synthetic construct
  source 1..28: mol_type = other DNA
gagtgtgccttttggcattcagaaaagg

SEQ ID NO: 20545 - DNA, 28 bp, synthetic construct
  source 1..28: mol_type = other DNA
attaaggtggtgagagtgtgccttttgg

SEQ ID NO: 20546 - DNA, 28 bp, synthetic construct
  source 1..28: mol_type = other DNA
aaggcacactctcaccaccttaatgagg

SEQ ID NO: 20547 - DNA, 28 bp, synthetic construct
  source 1..28: mol_type = other DNA
agataagtgtgtttcctcattaaggtgg

SEQ ID NO: 20548 - DNA, 28 bp, synthetic construct
  source 1..28: mol_type = other DNA
cacagataagtgtgtttcctcattaagg

SEQ ID NO: 20549 - DNA, 28 bp, synthetic construct
  source 1..28: mol_type = other DNA
atctgtgtctgttccgatatccaactgg

SEQ ID NO: 20550 - DNA, 28 bp, synthetic construct
  source 1..28: mol_type = other DNA
tctgtgtctgttccgatatccaactggg

SEQ ID NO: 20551 - DNA, 28 bp, synthetic construct
  source 1..28: mol_type = other DNA
tctgttccgatatccaactgggacctgg

SEQ ID NO: 20552 - DNA, 28 bp, synthetic construct
  source 1..28: mol_type = other DNA
tggggtccaggtcccagttggatatcgg

SEQ ID NO: 20553 - DNA, 28 bp, synthetic construct
  source 1..28: mol_type = other DNA
cggggcttggggtccaggtcccagttgg

SEQ ID NO: 20554 - DNA, 28 bp, synthetic construct
  source 1..28: mol_type = other DNA
actgggacctggaccccaagccccgtgg

SEQ ID NO: 20555 - DNA, 28 bp, synthetic construct
  source 1..28: mol_type = other DNA
caagacaccacggggcttggggtccagg

SEQ ID NO: 20556 - DNA, 28 bp, synthetic construct
  source 1..28: mol_type = other DNA
cttgtacaagacaccacggggcttgggg

SEQ ID NO: 20557 - DNA, 28 bp, synthetic construct
  source 1..28: mol_type = other DNA
acttgtacaagacaccacggggcttggg

SEQ ID NO: 20558 - DNA, 28 bp, synthetic construct
  source 1..28: mol_type = other DNA
gacttgtacaagacaccacggggcttgg

SEQ ID NO: 20559 - DNA, 28 bp, synthetic construct
  source 1..28: mol_type = other DNA
aatgagacttgtacaagacaccacgggg

SEQ ID NO: 20560 - DNA, 28 bp, synthetic construct
  source 1..28: mol_type = other DNA
taatgagacttgtacaagacaccacggg

SEQ ID NO: 20561 - DNA, 28 bp, synthetic construct
  source 1..28: mol_type = other DNA
ctaatgagacttgtacaagacaccacgg

SEQ ID NO: 20562 - DNA, 28 bp, synthetic construct
  source 1..28: mol_type = other DNA
taacaggcttctgagttgtacgtggagg

SEQ ID NO: 20563 - DNA, 28 bp, synthetic construct
  source 1..28: mol_type = other DNA
gattaacaggcttctgagttgtacgtgg

SEQ ID NO: 20564 - DNA, 28 bp, synthetic construct
  source 1..28: mol_type = other DNA
cgtacaactcagaagcctgttaatcagg

SEQ ID NO: 20565 - DNA, 28 bp, synthetic construct
  source 1..28: mol_type = other DNA
gtacaactcagaagcctgttaatcaggg

SEQ ID NO: 20566 - DNA, 28 bp, synthetic construct
  source 1..28: mol_type = other DNA
caactcagaagcctgttaatcagggagg

SEQ ID NO: 20567 - DNA, 28 bp, synthetic construct
  source 1..28: mol_type = other DNA
aactcagaagcctgttaatcagggaggg

SEQ ID NO: 20568 - DNA, 28 bp, synthetic construct
  source 1..28: mol_type = other DNA
ttggaaattaccctccctgattaacagg

SEQ ID NO: 20569 - DNA, 28 bp, synthetic construct
  source 1..28: mol_type = other DNA
gggtaatttccaaataaatgtgagctgg

SEQ ID NO: 20570 - DNA, 28 bp, synthetic construct
  source 1..28: mol_type = other DNA
ggatttaggccagctcacatttatttgg

SEQ ID NO: 20571 - DNA, 28 bp, synthetic construct
  source 1..28: mol_type = other DNA
aaatgtgagctggcctaaatccagctgg

SEQ ID NO: 20572 - DNA, 28 bp, synthetic construct
  source 1..28: mol_type = other DNA
aaatcagaaataaccagctggatttagg

SEQ ID NO: 20573 - DNA, 28 bp, synthetic construct
  source 1..28: mol_type = other DNA
taaatccagctggttatttctgatttgg

SEQ ID NO: 20574 - DNA, 28 bp, synthetic construct
  source 1..28: mol_type = other DNA
gattaccaaatcagaaataaccagctgg

SEQ ID NO: 20575 - DNA, 28 bp, synthetic construct
  source 1..28: mol_type = other DNA
tttggtaatctgtagtatcttaatttgg

SEQ ID NO: 20576 - DNA, 28 bp, synthetic construct
  source 1..28: mol_type = other DNA
ttggtaatctgtagtatcttaatttggg

SEQ ID NO: 20577 - DNA, 28 bp, synthetic construct
  source 1..28: mol_type = other DNA
tggtaatctgtagtatcttaatttgggg

SEQ ID NO: 20578 - DNA, 28 bp, synthetic construct
  source 1..28: mol_type = other DNA
tttggggacatcctgtcctaagttttgg

SEQ ID NO: 20579 - DNA, 28 bp, synthetic construct
  source 1..28: mol_type = other DNA
gggacatcctgtcctaagttttggctgg

SEQ ID NO: 20580 - DNA, 28 bp, synthetic construct
  source 1..28: mol_type = other DNA
acatgcaccagccaaaacttaggacagg

SEQ ID NO: 20581 - DNA, 28 bp, synthetic construct
  source 1..28: mol_type = other DNA
gttctacatgcaccagccaaaacttagg

SEQ ID NO: 20582 - DNA, 28 bp, synthetic construct
  source 1..28: mol_type = other DNA
agctatgttgcatctgttgttatacagg

SEQ ID NO: 20583 - DNA, 28 bp, synthetic construct
  source 1..28: mol_type = other DNA
tccgttccagccccaaattccttaaagg

SEQ ID NO: 20584 - DNA, 28 bp, synthetic construct
  source 1..28: mol_type = other DNA
acctttaaggaatttggggctggaacgg

SEQ ID NO: 20585 - DNA, 28 bp, synthetic construct
  source 1..28: mol_type = other DNA
ctagaacctttaaggaatttggggctgg

SEQ ID NO: 20586 - DNA, 28 bp, synthetic construct
  source 1..28: mol_type = other DNA
tagactagaacctttaaggaatttgggg

SEQ ID NO: 20587 - DNA, 28 bp, synthetic construct
  source 1..28: mol_type = other DNA
gtagactagaacctttaaggaatttggg

SEQ ID NO: 20588 - DNA, 28 bp, synthetic construct
  source 1..28: mol_type = other DNA
agtagactagaacctttaaggaatttgg

SEQ ID NO: 20589 - DNA, 28 bp, synthetic construct
  source 1..28: mol_type = other DNA
gtgcaagagtagactagaacctttaagg

SEQ ID NO: 20590 - DNA, 28 bp, synthetic construct
  source 1..28: mol_type = other DNA
aatgtaagcttctcaacaacagtacagg

SEQ ID NO: 20591 - DNA, 28 bp, synthetic construct
  source 1..28: mol_type = other DNA
actgttgttgagaagcttacattttagg

SEQ ID NO: 20592 - DNA, 28 bp, synthetic construct
  source 1..28: mol_type = other DNA
ctgttgttgagaagcttacattttaggg

SEQ ID NO: 20593 - DNA, 28 bp, synthetic construct
  source 1..28: mol_type = other DNA
gttgagaagcttacattttagggagagg

SEQ ID NO: 20594 - DNA, 28 bp, synthetic construct
  source 1..28: mol_type = other DNA
agaagcttacattttagggagaggctgg

SEQ ID NO: 20595 - DNA, 28 bp, synthetic construct
  source 1..28: mol_type = other DNA
agaggctggtcaaatctctactctctgg

SEQ ID NO: 20596 - DNA, 28 bp, synthetic construct
  source 1..28: mol_type = other DNA
acagcattaacaagagtctttcttttgg

SEQ ID NO: 20597 - DNA, 28 bp, synthetic construct
  source 1..28: mol_type = other DNA
cttttggaaacagactcagaagttatgg

SEQ ID NO: 20598 - DNA, 28 bp, synthetic construct
  source 1..28: mol_type = other DNA
gacatcagccacttcagacttctttagg

SEQ ID NO: 20599 - DNA, 28 bp, synthetic construct
  source 1..28: mol_type = other DNA
gatagtggcctaaagaagtctgaagtgg

SEQ ID NO: 20600 - DNA, 28 bp, synthetic construct
  source 1..28: mol_type = other DNA
agacttctttaggccactatccttgagg

SEQ ID NO: 20601 - DNA, 28 bp, synthetic construct
  source 1..28: mol_type = other DNA
ggctggtcagtcacctcaaggatagtgg

SEQ ID NO: 20602 - DNA, 28 bp, synthetic construct
  source 1..28: mol_type = other DNA
atgaggaggctggtcagtcacctcaagg

SEQ ID NO: 20603 - DNA, 28 bp, synthetic construct
  source 1..28: mol_type = other DNA
ttgaggtgactgaccagcctcctcatgg

SEQ ID NO: 20604 - DNA, 28 bp, synthetic construct
  source 1..28: mol_type = other DNA
gtgactgaccagcctcctcatggattgg

SEQ ID NO: 20605 - DNA, 28 bp, synthetic construct
  source 1..28: mol_type = other DNA
gggaaactccaatccatgaggaggctgg

SEQ ID NO: 20606 - DNA, 28 bp, synthetic construct
  source 1..28: mol_type = other DNA
tgatgggaaactccaatccatgaggagg

SEQ ID NO: 20607 - DNA, 28 bp, synthetic construct
  source 1..28: mol_type = other DNA
caatgatgggaaactccaatccatgagg

SEQ ID NO: 20608 - DNA, 28 bp, synthetic construct
  source 1..28: mol_type = other DNA
agtttcccatcattgttttaattgctgg

SEQ ID NO: 20609 - DNA, 28 bp, synthetic construct
  source 1..28: mol_type = other DNA
catttccagcaattaaaacaatgatggg

SEQ ID NO: 20610 - DNA, 28 bp, synthetic construct
  source 1..28: mol_type = other DNA
acatttccagcaattaaaacaatgatgg

SEQ ID NO: 20611 - DNA, 28 bp, synthetic construct
  source 1..28: mol_type = other DNA
tcattgttttaattgctggaaatgttgg

SEQ ID NO: 20612 - DNA, 28 bp, synthetic construct
  source 1..28: mol_type = other DNA
cagaaagttacaaggaagcagaattagg

SEQ ID NO: 20613 - DNA, 28 bp, synthetic construct
  source 1..28: mol_type = other DNA
ttgtactaaaaagcagaaagttacaagg

SEQ ID NO: 20614 - DNA, 28 bp, synthetic construct
  source 1..28: mol_type = other DNA
ttctgctttttagtacaagttctcttgg

SEQ ID NO: 20615 - DNA, 28 bp, synthetic construct
  source 1..28: mol_type = other DNA
tctgctttttagtacaagttctcttggg

SEQ ID NO: 20616 - DNA, 28 bp, synthetic construct
  source 1..28: mol_type = other DNA
acaagttctcttgggaatctacgcatgg

SEQ ID NO: 20617 - DNA, 28 bp, synthetic construct
  source 1..28: mol_type = other DNA
acagggctgtaaagatggaaggagctgg

SEQ ID NO: 20618 - DNA, 28 bp, synthetic construct
  source 1..28: mol_type = other DNA
gcactgacagggctgtaaagatggaagg

SEQ ID NO: 20619 - DNA, 28 bp, synthetic construct
  source 1..28: mol_type = other DNA
cacagcactgacagggctgtaaagatgg

SEQ ID NO: 20620 - DNA, 28 bp, synthetic construct
  source 1..28: mol_type = other DNA
ggctttgaagagcacagcactgacaggg

SEQ ID NO: 20621 - DNA, 28 bp, synthetic construct
  source 1..28: mol_type = other DNA
aggctttgaagagcacagcactgacagg

SEQ ID NO: 20622 - DNA, 28 bp, synthetic construct
  source 1..28: mol_type = other DNA
tcaaagcctttcccttaatagcaagagg

SEQ ID NO: 20623 - DNA, 28 bp, synthetic construct
  source 1..28: mol_type = other DNA
caaagcctttcccttaatagcaagaggg

SEQ ID NO: 20624 - DNA, 28 bp, synthetic construct
  source 1..28: mol_type = other DNA
cttggccctcttgctattaagggaaagg

SEQ ID NO: 20625 - DNA, 28 bp, synthetic construct
  source 1..28: mol_type = other DNA
cccttaatagcaagagggccaagagtgg

SEQ ID NO: 20626 - DNA, 28 bp, synthetic construct
  source 1..28: mol_type = other DNA
gccactcttggccctcttgctattaagg

SEQ ID NO: 20627 - DNA, 28 bp, synthetic construct
  source 1..28: mol_type = other DNA
caagagggccaagagtggcaaatagagg

SEQ ID NO: 20628 - DNA, 28 bp, synthetic construct
  source 1..28: mol_type = other DNA
cggctctgcctctatttgccactcttgg

SEQ ID NO: 20629 - DNA, 28 bp, synthetic construct
  source 1..28: mol_type = other DNA
acgatgggaacaactgtagtgcaggcgg

SEQ ID NO: 20630 - DNA, 28 bp, synthetic construct
  source 1..28: mol_type = other DNA
cttacgatgggaacaactgtagtgcagg

SEQ ID NO: 20631 - DNA, 28 bp, synthetic construct
  source 1..28: mol_type = other DNA
ctgcactacagttgttcccatcgtaagg

SEQ ID NO: 20632 - DNA, 28 bp, synthetic construct
  source 1..28: mol_type = other DNA
taaacgttcgttttcaccttacgatggg

SEQ ID NO: 20633 - DNA, 28 bp, synthetic construct
  source 1..28: mol_type = other DNA
ttaaacgttcgttttcaccttacgatgg

SEQ ID NO: 20634 - DNA, 28 bp, synthetic construct
  source 1..28: mol_type = other DNA
agaaaaaacaaacaaaaaacccatcagg

SEQ ID NO: 20635 - DNA, 28 bp, synthetic construct
  source 1..28: mol_type = other DNA
gcaagcagaatcttaatagcctgatggg

SEQ ID NO: 20636 - DNA, 28 bp, synthetic construct
  source 1..28: mol_type = other DNA
tgcaagcagaatcttaatagcctgatgg

SEQ ID NO: 20637 - DNA, 28 bp, synthetic construct
  source 1..28: mol_type = other DNA
taaaaaaaaaaatgtaaacatggattgg

SEQ ID NO: 20638 - DNA, 28 bp, synthetic construct
  source 1..28: mol_type = other DNA
aatgataaaaaaaaaaatgtaaacatgg

SEQ ID NO: 20639 - DNA, 28 bp, synthetic construct
  source 1..28: mol_type = other DNA
cattgagacatttacatatatatgcagg

SEQ ID NO: 20640 - DNA, 28 bp, synthetic construct
  source 1..28: mol_type = other DNA
tatgcaggctctgctccttaacaaaagg

SEQ ID NO: 20641 - DNA, 28 bp, synthetic construct
  source 1..28: mol_type = other DNA
gagtttttcagttcaccttttgttaagg

SEQ ID NO: 20642 - DNA, 28 bp, synthetic construct
  source 1..28: mol_type = other DNA
aacaaaaggtgaactgaaaaactcaagg

SEQ ID NO: 20643 - DNA, 28 bp, synthetic construct
  source 1..28: mol_type = other DNA
acaaaaggtgaactgaaaaactcaaggg

SEQ ID NO: 20644 - DNA, 28 bp, synthetic construct
  source 1..28: mol_type = other DNA
aaaaaagaaaaacagattttgtaccagg

SEQ ID NO: 20645 - DNA, 28 bp, synthetic construct
  source 1..28: mol_type = other DNA
atagaatgctttctcttgaggcacctgg

SEQ ID NO: 20646 - DNA, 28 bp, synthetic construct
  source 1..28: mol_type = other DNA
tctgcaaatagaatgctttctcttgagg

SEQ ID NO: 20647 - DNA, 28 bp, synthetic construct
  source 1..28: mol_type = other DNA
cattctatttgcagatgacagatcttgg

SEQ ID NO: 20648 - DNA, 28 bp, synthetic construct
  source 1..28: mol_type = other DNA
attctatttgcagatgacagatcttggg

SEQ ID NO: 20649 - DNA, 28 bp, synthetic construct
  source 1..28: mol_type = other DNA
tttccacaagtttcctctgtgactgtgg

SEQ ID NO: 20650 - DNA, 28 bp, synthetic construct
  source 1..28: mol_type = other DNA
cagccacagtcacagaggaaacttgtgg

SEQ ID NO: 20651 - DNA, 28 bp, synthetic construct
  source 1..28: mol_type = other DNA
tcagagatggcagccacagtcacagagg

SEQ ID NO: 20652 - DNA, 28 bp, synthetic construct
  source 1..28: mol_type = other DNA
gctgccatctctgatgaaagagttatgg

SEQ ID NO: 20653 - DNA, 28 bp, synthetic construct
  source 1..28: mol_type = other DNA
aatgccataactctttcatcagagatgg

SEQ ID NO: 20654 - DNA, 28 bp, synthetic construct
  source 1..28: mol_type = other DNA
ctgatgaaagagttatggcattaaatgg

SEQ ID NO: 20655 - DNA, 28 bp, synthetic construct
  source 1..28: mol_type = other DNA
tggcattaaatggcaaaagatataatgg

SEQ ID NO: 20656 - DNA, 28 bp, synthetic construct
  source 1..28: mol_type = other DNA
atggcaaaagatataatggacacacagg

SEQ ID NO: 20657 - DNA, 28 bp, synthetic construct
  source 1..28: mol_type = other DNA
atttagatgcttaaaatgaatacaaagg

SEQ ID NO: 20658 - DNA, 28 bp, synthetic construct
  source 1..28: mol_type = other DNA
tttagatgcttaaaatgaatacaaaggg

SEQ ID NO: 20659 - DNA, 28 bp, synthetic construct
  source 1..28: mol_type = other DNA
ctacaacagtgtgtcatatattagatgg

SEQ ID NO: 20660 - DNA, 28 bp, synthetic construct
  source 1..28: mol_type = other DNA
gatggtataaatgaatccaccatgatgg

SEQ ID NO: 20661 - DNA, 28 bp, synthetic construct
  source 1..28: mol_type = other DNA
tatctttagttcaacaccatcatggtgg

SEQ ID NO: 20662 - DNA, 28 bp, synthetic construct
  source 1..28: mol_type = other DNA
ttttatctttagttcaacaccatcatgg

SEQ ID NO: 20663 - DNA, 28 bp, synthetic construct
  source 1..28: mol_type = other DNA
taaatatccaaaatgcagcactcattgg

SEQ ID NO: 20664 - DNA, 28 bp, synthetic construct
  source 1..28: mol_type = other DNA
cagcaaaccaatgagtgctgcattttgg

SEQ ID NO: 20665 - DNA, 28 bp, synthetic construct
  source 1..28: mol_type = other DNA
caacacacttttatacagatctaaaagg

SEQ ID NO: 20666 - DNA, 28 bp, synthetic construct
  source 1..28: mol_type = other DNA
cattacagctgtcaaaaacaaaaactgg

SEQ ID NO: 20667 - DNA, 28 bp, synthetic construct
  source 1..28: mol_type = other DNA
tttgtttttgacagctgtaatgtcaagg

SEQ ID NO: 20668 - DNA, 28 bp, synthetic construct
  source 1..28: mol_type = other DNA
atatatctggactctcttgtattatagg

SEQ ID NO: 20669 - DNA, 28 bp, synthetic construct
  source 1..28: mol_type = other DNA
agagagtccagatatatatcttacgtgg

SEQ ID NO: 20670 - DNA, 28 bp, synthetic construct
  source 1..28: mol_type = other DNA
agtccagatatatatcttacgtggctgg

SEQ ID NO: 20671 - DNA, 28 bp, synthetic construct
  source 1..28: mol_type = other DNA
aggccagccacgtaagatatatatctgg

SEQ ID NO: 20672 - DNA, 28 bp, synthetic construct
  source 1..28: mol_type = other DNA
ctggcctctgttgcaagattgtacaagg

SEQ ID NO: 20673 - DNA, 28 bp, synthetic construct
  source 1..28: mol_type = other DNA
ataaccttgtacaatcttgcaacagagg

SEQ ID NO: 20674 - DNA, 28 bp, synthetic construct
  source 1..28: mol_type = other DNA
caaaactgcgctagtatggactttttgg

SEQ ID NO: 20675 - DNA, 28 bp, synthetic construct
  source 1..28: mol_type = other DNA
gcaaaagctcaaaactgcgctagtatgg

SEQ ID NO: 20676 - DNA, 28 bp, synthetic construct
  source 1..28: mol_type = other DNA
actagcgcagttttgagcttttgctagg

SEQ ID NO: 20677 - DNA, 28 bp, synthetic construct
  source 1..28: mol_type = other DNA
tagatagagcgtttattacacagcaagg

SEQ ID NO: 20678 - DNA, 28 bp, synthetic construct
  source 1..28: mol_type = other DNA
agatagagcgtttattacacagcaaggg

SEQ ID NO: 20679 - DNA, 28 bp, synthetic construct
  source 1..28: mol_type = other DNA
caacactaaaaaaagaaatctatgatgg

SEQ ID NO: 20680 - DNA, 28 bp, synthetic construct
  source 1..28: mol_type = other DNA
aacactaaaaaaagaaatctatgatggg

SEQ ID NO: 20681 - DNA, 28 bp, synthetic construct
  source 1..28: mol_type = other DNA
aaatctatgatgggcacacagtaacagg

SEQ ID NO: 20682 - DNA, 28 bp, synthetic construct
  source 1..28: mol_type = other DNA
acaggatcatgagcatcacttgaatagg

SEQ ID NO: 20683 - DNA, 28 bp, synthetic construct
  source 1..28: mol_type = other DNA
cagtctaatgtgtatagtagactttggg

SEQ ID NO: 20684 - DNA, 28 bp, synthetic construct
  source 1..28: mol_type = other DNA
ccaaagtctactatacacattagactgg

SEQ ID NO: 20685 - DNA, 28 bp, synthetic construct
  source 1..28: mol_type = other DNA
cacattagactggtagcttgtatgttgg

SEQ ID NO: 20686 - DNA, 28 bp, synthetic construct
  source 1..28: mol_type = other DNA
ttaaactaattcacatggtagtgtaggg

SEQ ID NO: 20687 - DNA, 28 bp, synthetic construct
  source 1..28: mol_type = other DNA
gttaaactaattcacatggtagtgtagg

SEQ ID NO: 20688 - DNA, 28 bp, synthetic construct
  source 1..28: mol_type = other DNA
ttgagaagtgttaaactaattcacatgg

SEQ ID NO: 20689 - DNA, 28 bp, synthetic construct
  source 1..28: mol_type = other DNA
agacatctgaccaatcatttcacagagg

SEQ ID NO: 20690 - DNA, 28 bp, synthetic construct
  source 1..28: mol_type = other DNA
gacatctgaccaatcatttcacagaggg

SEQ ID NO: 20691 - DNA, 28 bp, synthetic construct
  source 1..28: mol_type = other DNA
catttctttccctctgtgaaatgattgg

SEQ ID NO: 20692 - DNA, 28 bp, synthetic construct
  source 1..28: mol_type = other DNA
tcacagagggaaagaaatgttgaaaagg

SEQ ID NO: 20693 - DNA, 28 bp, synthetic construct
  source 1..28: mol_type = other DNA
catgaatacacacgaggaaaagcagagg

SEQ ID NO: 20694 - DNA, 28 bp, synthetic construct
  source 1..28: mol_type = other DNA
agctggtgactcatgaatacacacgagg

SEQ ID NO: 20695 - DNA, 28 bp, synthetic construct
  source 1..28: mol_type = other DNA
gtgtattcatgagtcaccagcttattgg

SEQ ID NO: 20696 - DNA, 28 bp, synthetic construct
  source 1..28: mol_type = other DNA
aactaaatgtgaaaaaccaataagctgg

SEQ ID NO: 20697 - DNA, 28 bp, synthetic construct
  source 1..28: mol_type = other DNA
atttagttaccgtgtctgtcagagaagg

SEQ ID NO: 20698 - DNA, 28 bp, synthetic construct
  source 1..28: mol_type = other DNA
gcttcagaaccttctctgacagacacgg

SEQ ID NO: 20699 - DNA, 28 bp, synthetic construct
  source 1..28: mol_type = other DNA
gttatttctaagtctatgacaggacagg

SEQ ID NO: 20700 - DNA, 28 bp, synthetic construct
  source 1..28: mol_type = other DNA
cagtggttatttctaagtctatgacagg

SEQ ID NO: 20701 - DNA, 28 bp, synthetic construct
  source 1..28: mol_type = other DNA
ctgtcatagacttagaaataaccactgg

SEQ ID NO: 20702 - DNA, 28 bp, synthetic construct
  source 1..28: mol_type = other DNA
ttagaaataaccactggaactgcagcgg

SEQ ID NO: 20703 - DNA, 28 bp, synthetic construct
  source 1..28: mol_type = other DNA
gggcatgtggccgctgcagttccagtgg

SEQ ID NO: 20704 - DNA, 28 bp, synthetic construct
  source 1..28: mol_type = other DNA
agtactggttggactgtggggcatgtgg

SEQ ID NO: 20705 - DNA, 28 bp, synthetic construct
  source 1..28: mol_type = other DNA
ccccacagtccaaccagtactcacaagg

SEQ ID NO: 20706 - DNA, 28 bp, synthetic construct
  source 1..28: mol_type = other DNA
gccttgtgagtactggttggactgtggg

SEQ ID NO: 20707 - DNA, 28 bp, synthetic construct
  source 1..28: mol_type = other DNA
tgccttgtgagtactggttggactgtgg

SEQ ID NO: 20708 - DNA, 28 bp, synthetic construct
  source 1..28: mol_type = other DNA
ctggtactgccttgtgagtactggttgg

SEQ ID NO: 20709 - DNA, 28 bp, synthetic construct
  source 1..28: mol_type = other DNA
ctcactggtactgccttgtgagtactgg

SEQ ID NO: 20710 - DNA, 28 bp, synthetic construct
  source 1..28: mol_type = other DNA
tgtgactgcaaagctgtcttctcactgg

SEQ ID NO: 20711 - DNA, 28 bp, synthetic construct
  source 1..28: mol_type = other DNA
tgagaagacagctttgcagtcacactgg

SEQ ID NO: 20712 - DNA, 28 bp, synthetic construct
  source 1..28: mol_type = other DNA
cagtcacactggatatcagagttccagg

SEQ ID NO: 20713 - DNA, 28 bp, synthetic construct
  source 1..28: mol_type = other DNA
ctggcgttggtgacatgctgcagcctgg

SEQ ID NO: 20714 - DNA, 28 bp, synthetic construct
  source 1..28: mol_type = other DNA
caggctgcagcatgtcaccaacgccagg

SEQ ID NO: 20715 - DNA, 28 bp, synthetic construct
  source 1..28: mol_type = other DNA
aggctgcagcatgtcaccaacgccaggg

SEQ ID NO: 20716 - DNA, 28 bp, synthetic construct
  source 1..28: mol_type = other DNA
agcatgtcaccaacgccagggaacctgg

SEQ ID NO: 20717 - DNA, 28 bp, synthetic construct
  source 1..28: mol_type = other DNA
accaacgccagggaacctggcacttagg

SEQ ID NO: 20718 - DNA, 28 bp, synthetic construct
  source 1..28: mol_type = other DNA
gcctaagtgccaggttccctggcgttgg

SEQ ID NO: 20719 - DNA, 28 bp, synthetic construct
  source 1..28: mol_type = other DNA
caacaggcctaagtgccaggttccctgg

SEQ ID NO: 20720 - DNA, 28 bp, synthetic construct
  source 1..28: mol_type = other DNA
cagggaacctggcacttaggcctgttgg

SEQ ID NO: 20721 - DNA, 28 bp, synthetic construct
  source 1..28: mol_type = other DNA
tgagcagccaacaggcctaagtgccagg

SEQ ID NO: 20722 - DNA, 28 bp, synthetic construct
  source 1..28: mol_type = other DNA
gcctgttggctgctcagtttaactccgg

SEQ ID NO: 20723 - DNA, 28 bp, synthetic construct
  source 1..28: mol_type = other DNA
gccggagttaaactgagcagccaacagg

SEQ ID NO: 20724 - DNA, 28 bp, synthetic construct
  source 1..28: mol_type = other DNA
ttaactccggctaagctgccatgcatgg

SEQ ID NO: 20725 - DNA, 28 bp, synthetic construct
  source 1..28: mol_type = other DNA
taactccggctaagctgccatgcatggg

SEQ ID NO: 20726 - DNA, 28 bp, synthetic construct
  source 1..28: mol_type = other DNA
ctgagcccatgcatggcagcttagccgg

SEQ ID NO: 20727 - DNA, 28 bp, synthetic construct
  source 1..28: mol_type = other DNA
ctgatggagtagctgagcccatgcatgg

SEQ ID NO: 20728 - DNA, 28 bp, synthetic construct
  source 1..28: mol_type = other DNA
gggaacagtttgacaacatgactgatgg

SEQ ID NO: 20729 - DNA, 28 bp, synthetic construct
  source 1..28: mol_type = other DNA
aatagcacaattgacagtgaggatgggg

SEQ ID NO: 20730 - DNA, 28 bp, synthetic construct
  source 1..28: mol_type = other DNA
gaatagcacaattgacagtgaggatggg

SEQ ID NO: 20731 - DNA, 28 bp, synthetic construct
  source 1..28: mol_type = other DNA
agaatagcacaattgacagtgaggatgg

SEQ ID NO: 20732 - DNA, 28 bp, synthetic construct
  source 1..28: mol_type = other DNA
tggcagaatagcacaattgacagtgagg

SEQ ID NO: 20733 - DNA, 28 bp, synthetic construct
  source 1..28: mol_type = other DNA
aattgtgctattctgccactcaatctgg

SEQ ID NO: 20734 - DNA, 28 bp, synthetic construct
  source 1..28: mol_type = other DNA
attgtgctattctgccactcaatctggg

SEQ ID NO: 20735 - DNA, 28 bp, synthetic construct
  source 1..28: mol_type = other DNA
ttgtgctattctgccactcaatctgggg

SEQ ID NO: 20736 - DNA, 28 bp, synthetic construct
  source 1..28: mol_type = other DNA
tgtgctattctgccactcaatctggggg

SEQ ID NO: 20737 - DNA, 28 bp, synthetic construct
  source 1..28: mol_type = other DNA
gcgcttatctaacccccagattgagtgg

SEQ ID NO: 20738 - DNA, 28 bp, synthetic construct
  source 1..28: mol_type = other DNA
ctcagatgcattcttccactgtgactgg

SEQ ID NO: 20739 - DNA, 28 bp, synthetic construct
  source 1..28: mol_type = other DNA
gttttggtctaaggaccagtcacagtgg

SEQ ID NO: 20740 - DNA, 28 bp, synthetic construct
  source 1..28: mol_type = other DNA
ggaaaagttgaagggttttggtctaagg

SEQ ID NO: 20741 - DNA, 28 bp, synthetic construct
  source 1..28: mol_type = other DNA
gaccaaaacccttcaacttttccatagg

SEQ ID NO: 20742 - DNA, 28 bp, synthetic construct
  source 1..28: mol_type = other DNA
ttcctatggaaaagttgaagggttttgg

SEQ ID NO: 20743 - DNA, 28 bp, synthetic construct
  source 1..28: mol_type = other DNA
gaatagttcctatggaaaagttgaaggg

SEQ ID NO: 20744 - DNA, 28 bp, synthetic construct
  source 1..28: mol_type = other DNA
agaatagttcctatggaaaagttgaagg

SEQ ID NO: 20745 - DNA, 28 bp, synthetic construct
  source 1..28: mol_type = other DNA
agttgaaatggaagaatagttcctatgg

SEQ ID NO: 20746 - DNA, 28 bp, synthetic construct
  source 1..28: mol_type = other DNA
gcaaggtgacagagagcagttgaaatgg

SEQ ID NO: 20747 - DNA, 28 bp, synthetic construct
  source 1..28: mol_type = other DNA
ttcaactgctctctgtcaccttgcatgg

SEQ ID NO: 20748 - DNA, 28 bp, synthetic construct
  source 1..28: mol_type = other DNA
tcaccttgcatggtagccttttttttgg

SEQ ID NO: 20749 - DNA, 28 bp, synthetic construct
  source 1..28: mol_type = other DNA
ctgccaaaaaaaaggctaccatgcaagg

SEQ ID NO: 20750 - DNA, 28 bp, synthetic construct
  source 1..28: mol_type = other DNA
gcatggtagccttttttttggcagctgg

SEQ ID NO: 20751 - DNA, 28 bp, synthetic construct
  source 1..28: mol_type = other DNA
agcagtaagccagctgccaaaaaaaagg

SEQ ID NO: 20752 - DNA, 28 bp, synthetic construct
  source 1..28: mol_type = other DNA
cttactgctccttgcatcttcgctttgg

SEQ ID NO: 20753 - DNA, 28 bp, synthetic construct
  source 1..28: mol_type = other DNA
ttactgctccttgcatcttcgctttggg

SEQ ID NO: 20754 - DNA, 28 bp, synthetic construct
  source 1..28: mol_type = other DNA
cgagtcttcccaaagcgaagatgcaagg

SEQ ID NO: 20755 - DNA, 28 bp, synthetic construct
  source 1..28: mol_type = other DNA
tcgctttgggaagactcgtcagaccagg

SEQ ID NO: 20756 - DNA, 28 bp, synthetic construct
  source 1..28: mol_type = other DNA
gggaagactcgtcagaccaggttcctgg

SEQ ID NO: 20757 - DNA, 28 bp, synthetic construct
  source 1..28: mol_type = other DNA
gaccaggttcctggtttcatttcgcagg

SEQ ID NO: 20758 - DNA, 28 bp, synthetic construct
  source 1..28: mol_type = other DNA
tacctgcgaaatgaaaccaggaacctgg

SEQ ID NO: 20759 - DNA, 28 bp, synthetic construct
  source 1..28: mol_type = other DNA
aggacaatacctgcgaaatgaaaccagg

SEQ ID NO: 20760 - DNA, 28 bp, synthetic construct
  source 1..28: mol_type = other DNA
attgtcctcaaagtctgacacttgttgg

SEQ ID NO: 20761 - DNA, 28 bp, synthetic construct
  source 1..28: mol_type = other DNA
ttgtcctcaaagtctgacacttgttggg

SEQ ID NO: 20762 - DNA, 28 bp, synthetic construct
  source 1..28: mol_type = other DNA
ggatcccaacaagtgtcagactttgagg

SEQ ID NO: 20763 - DNA, 28 bp, synthetic construct
  source 1..28: mol_type = other DNA
caaagtctgacacttgttgggatccagg

SEQ ID NO: 20764 - DNA, 28 bp, synthetic construct
  source 1..28: mol_type = other DNA
gttgggatccaggcccactctcagatgg

SEQ ID NO: 20765 - DNA, 28 bp, synthetic construct
  source 1..28: mol_type = other DNA
gtgcttctccatctgagagtgggcctgg

SEQ ID NO: 20766 - DNA, 28 bp, synthetic construct
  source 1..28: mol_type = other DNA
agacggtgcttctccatctgagagtggg

SEQ ID NO: 20767 - DNA, 28 bp, synthetic construct
  source 1..28: mol_type = other DNA
aagacggtgcttctccatctgagagtgg

SEQ ID NO: 20768 - DNA, 28 bp, synthetic construct
  source 1..28: mol_type = other DNA
aagacgatgttgttgagtggaaagacgg

SEQ ID NO: 20769 - DNA, 28 bp, synthetic construct
  source 1..28: mol_type = other DNA
gtctttccactcaacaacatcgtcttgg

SEQ ID NO: 20770 - DNA, 28 bp, synthetic construct
  source 1..28: mol_type = other DNA
ggttgaccaagacgatgttgttgagtgg

SEQ ID NO: 20771 - DNA, 28 bp, synthetic construct
  source 1..28: mol_type = other DNA
ctaatgcacaatgcatctgatagtgagg

SEQ ID NO: 20772 - DNA, 28 bp, synthetic construct
  source 1..28: mol_type = other DNA
ctatcagatgcattgtgcattagtttgg

SEQ ID NO: 20773 - DNA, 28 bp, synthetic construct
  source 1..28: mol_type = other DNA
cagatgcattgtgcattagtttggttgg

SEQ ID NO: 20774 - DNA, 28 bp, synthetic construct
  source 1..28: mol_type = other DNA
aaatacgaaactattcatttgactgagg

SEQ ID NO: 20775 - DNA, 28 bp, synthetic construct
  source 1..28: mol_type = other DNA
ttcgtattttgaaccatcctctttttgg

SEQ ID NO: 20776 - DNA, 28 bp, synthetic construct
  source 1..28: mol_type = other DNA
aggagaagctagaccaaaaagaggatgg

SEQ ID NO: 20777 - DNA, 28 bp, synthetic construct
  source 1..28: mol_type = other DNA
tctgaggagaagctagaccaaaaagagg

SEQ ID NO: 20778 - DNA, 28 bp, synthetic construct
  source 1..28: mol_type = other DNA
tctcctcagattctgaagcatcctcagg

SEQ ID NO: 20779 - DNA, 28 bp, synthetic construct
  source 1..28: mol_type = other DNA
attcctgaggatgcttcagaatctgagg

SEQ ID NO: 20780 - DNA, 28 bp, synthetic construct
  source 1..28: mol_type = other DNA
gaacatgtactgaaggtaattcctgagg

SEQ ID NO: 20781 - DNA, 28 bp, synthetic construct
  source 1..28: mol_type = other DNA
gaattaccttcagtacatgttcctctgg

SEQ ID NO: 20782 - DNA, 28 bp, synthetic construct
  source 1..28: mol_type = other DNA
aattaccttcagtacatgttcctctggg

SEQ ID NO: 20783 - DNA, 28 bp, synthetic construct
  source 1..28: mol_type = other DNA
gataacccagaggaacatgtactgaagg

SEQ ID NO: 20784 - DNA, 28 bp, synthetic construct
  source 1..28: mol_type = other DNA
cctctgggttatcgttagagattttagg

SEQ ID NO: 20785 - DNA, 28 bp, synthetic construct
  source 1..28: mol_type = other DNA
agattttaggttcaacttcaaaaacagg

SEQ ID NO: 20786 - DNA, 28 bp, synthetic construct
  source 1..28: mol_type = other DNA
gattttaggttcaacttcaaaaacaggg

SEQ ID NO: 20787 - DNA, 28 bp, synthetic construct
  source 1..28: mol_type = other DNA
gttcaacttcaaaaacagggtcaaaagg

SEQ ID NO: 20788 - DNA, 28 bp, synthetic construct
  source 1..28: mol_type = other DNA
ttcaacttcaaaaacagggtcaaaaggg

SEQ ID NO: 20789 - DNA, 28 bp, synthetic construct
  source 1..28: mol_type = other DNA
gggtcaaaagggctaccactttcattgg

SEQ ID NO: 20790 - DNA, 28 bp, synthetic construct
  source 1..28: mol_type = other DNA
atttggaagaagaatccaatgaaagtgg

SEQ ID NO: 20791 - DNA, 28 bp, synthetic construct
  source 1..28: mol_type = other DNA
tcttccaaattttcaaaactgtctgagg

SEQ ID NO: 20792 - DNA, 28 bp, synthetic construct
  source 1..28: mol_type = other DNA
agttcctcagacagttttgaaaatttgg

SEQ ID NO: 20793 - DNA, 28 bp, synthetic construct
  source 1..28: mol_type = other DNA
tgaggaactgtcatcttccttcccaagg

SEQ ID NO: 20794 - DNA, 28 bp, synthetic construct
  source 1..28: mol_type = other DNA
gctgacaaaaagctcaaccttgggaagg

SEQ ID NO: 20795 - DNA, 28 bp, synthetic construct
  source 1..28: mol_type = other DNA
gactgctgacaaaaagctcaaccttggg

SEQ ID NO: 20796 - DNA, 28 bp, synthetic construct
  source 1..28: mol_type = other DNA
agactgctgacaaaaagctcaaccttgg

SEQ ID NO: 20797 - DNA, 28 bp, synthetic construct
  source 1..28: mol_type = other DNA
tcagcagtcttactagcattgactctgg

SEQ ID NO: 20798 - DNA, 28 bp, synthetic construct
  source 1..28: mol_type = other DNA
tggctatttgaaaatcatgatgagaagg

SEQ ID NO: 20799 - DNA, 28 bp, synthetic construct
  source 1..28: mol_type = other DNA
gcatgagatggattttgatgctgagtgg

SEQ ID NO: 20800 - DNA, 28 bp, synthetic construct
  source 1..28: mol_type = other DNA
gaattaaataaagtcaagcatgagatgg

SEQ ID NO: 20801 - DNA, 28 bp, synthetic construct
  source 1..28: mol_type = other DNA
tcatgttaaaccccagcaacacgccagg

SEQ ID NO: 20802 - DNA, 28 bp, synthetic construct
  source 1..28: mol_type = other DNA
aaagtacaagcctggcgtgttgctgggg

SEQ ID NO: 20803 - DNA, 28 bp, synthetic construct
  source 1..28: mol_type = other DNA
aaaagtacaagcctggcgtgttgctggg

SEQ ID NO: 20804 - DNA, 28 bp, synthetic construct
  source 1..28: mol_type = other DNA
gaaaagtacaagcctggcgtgttgctgg

SEQ ID NO: 20805 - DNA, 28 bp, synthetic construct
  source 1..28: mol_type = other DNA
gccaggcttgtacttttcacaatcacgg

SEQ ID NO: 20806 - DNA, 28 bp, synthetic construct
  source 1..28: mol_type = other DNA
tccgtgattgtgaaaagtacaagcctgg

SEQ ID NO: 20807 - DNA, 28 bp, synthetic construct
  source 1..28: mol_type = other DNA
acacttcttccttttgttactaaaatgg

SEQ ID NO: 20808 - DNA, 28 bp, synthetic construct
  source 1..28: mol_type = other DNA
cacttcttccttttgttactaaaatggg

SEQ ID NO: 20809 - DNA, 28 bp, synthetic construct
  source 1..28: mol_type = other DNA
catcgcttcccattttagtaacaaaagg

SEQ ID NO: 20810 - DNA, 28 bp, synthetic construct
  source 1..28: mol_type = other DNA
atgtcactcttccataaccataaactgg

SEQ ID NO: 20811 - DNA, 28 bp, synthetic construct
  source 1..28: mol_type = other DNA
gaagctagcagccagtttatggttatgg

SEQ ID NO: 20812 - DNA, 28 bp, synthetic construct
  source 1..28: mol_type = other DNA
aattgagaagctagcagccagtttatgg

SEQ ID NO: 20813 - DNA, 28 bp, synthetic construct
  source 1..28: mol_type = other DNA
gctgctagcttctcaatttctctcctgg

SEQ ID NO: 20814 - DNA, 28 bp, synthetic construct
  source 1..28: mol_type = other DNA
gctagcttctcaatttctctcctggtgg

SEQ ID NO: 20815 - DNA, 28 bp, synthetic construct
  source 1..28: mol_type = other DNA
ctagcttctcaatttctctcctggtggg

SEQ ID NO: 20816 - DNA, 28 bp, synthetic construct
  source 1..28: mol_type = other DNA
ttctcaatttctctcctggtgggatagg

SEQ ID NO: 20817 - DNA, 28 bp, synthetic construct
  source 1..28: mol_type = other DNA
tctcaatttctctcctggtgggataggg

SEQ ID NO: 20818 - DNA, 28 bp, synthetic construct
  source 1..28: mol_type = other DNA
tttcaacaaacagccctatcccaccagg

SEQ ID NO: 20819 - DNA, 28 bp, synthetic construct
  source 1..28: mol_type = other DNA
aaatactttgttagaaagcttttcctgg

SEQ ID NO: 20820 - DNA, 28 bp, synthetic construct
  source 1..28: mol_type = other DNA
gttagaaagcttttcctggcttcatagg

SEQ ID NO: 20821 - DNA, 28 bp, synthetic construct
  source 1..28: mol_type = other DNA
tcatgaagatgattcctatgaagccagg

SEQ ID NO: 20822 - DNA, 28 bp, synthetic construct
  source 1..28: mol_type = other DNA
tcataggaatcatcttcatgacccttgg

SEQ ID NO: 20823 - DNA, 28 bp, synthetic construct
  source 1..28: mol_type = other DNA
cataggaatcatcttcatgacccttggg

SEQ ID NO: 20824 - DNA, 28 bp, synthetic construct
  source 1..28: mol_type = other DNA
ataggaatcatcttcatgacccttgggg

SEQ ID NO: 20825 - DNA, 28 bp, synthetic construct
  source 1..28: mol_type = other DNA
ctgttgttttagctttagaccccaaggg

SEQ ID NO: 20826 - DNA, 28 bp, synthetic construct
  source 1..28: mol_type = other DNA
ccttggggtctaaagctaaaacaacagg

SEQ ID NO: 20827 - DNA, 28 bp, synthetic construct
  source 1..28: mol_type = other DNA
ctaaagctaaaacaacaggctcttcagg

SEQ ID NO: 20828 - DNA, 28 bp, synthetic construct
  source 1..28: mol_type = other DNA
tcttcaggcttctcttcaaagaagctgg

SEQ ID NO: 20829 - DNA, 28 bp, synthetic construct
  source 1..28: mol_type = other DNA
cttcaggcttctcttcaaagaagctggg

SEQ ID NO: 20830 - DNA, 28 bp, synthetic construct
  source 1..28: mol_type = other DNA
tcatctaactttcgttttttcagtaagg

SEQ ID NO: 20831 - DNA, 28 bp, synthetic construct
  source 1..28: mol_type = other DNA
catctaactttcgttttttcagtaaggg

SEQ ID NO: 20832 - DNA, 28 bp, synthetic construct
  source 1..28: mol_type = other DNA
ccatttgctcgtaagtgcgcttcacagg

SEQ ID NO: 20833 - DNA, 28 bp, synthetic construct
  source 1..28: mol_type = other DNA
aagtgcgcttcacaggtgccagacttgg

SEQ ID NO: 20834 - DNA, 28 bp, synthetic construct
  source 1..28: mol_type = other DNA
tctcggcttaatcagtctccaagtctgg

SEQ ID NO: 20835 - DNA, 28 bp, synthetic construct
  source 1..28: mol_type = other DNA
agacttggagactgattaagccgagagg

SEQ ID NO: 20836 - DNA, 28 bp, synthetic construct
  source 1..28: mol_type = other DNA
gacttggagactgattaagccgagaggg

SEQ ID NO: 20837 - DNA, 28 bp, synthetic construct
  source 1..28: mol_type = other DNA
ccgagagggtgcatttgtcttatcctgg

SEQ ID NO: 20838 - DNA, 28 bp, synthetic construct
  source 1..28: mol_type = other DNA
tgcatttgtcttatcctggccattttgg

SEQ ID NO: 20839 - DNA, 28 bp, synthetic construct
  source 1..28: mol_type = other DNA
gcatttgtcttatcctggccattttggg

SEQ ID NO: 20840 - DNA, 28 bp, synthetic construct
  source 1..28: mol_type = other DNA
ggcgttggaaagacccaaaatggccagg

SEQ ID NO: 20841 - DNA, 28 bp, synthetic construct
  source 1..28: mol_type = other DNA
gcaggggcgttggaaagacccaaaatgg

SEQ ID NO: 20842 - DNA, 28 bp, synthetic construct
  source 1..28: mol_type = other DNA
tgcatctagttcactgcaggggcgttgg

SEQ ID NO: 20843 - DNA, 28 bp, synthetic construct
  source 1..28: mol_type = other DNA
tcactctgcatctagttcactgcagggg

SEQ ID NO: 20844 - DNA, 28 bp, synthetic construct
  source 1..28: mol_type = other DNA
atcactctgcatctagttcactgcaggg

SEQ ID NO: 20845 - DNA, 28 bp, synthetic construct
  source 1..28: mol_type = other DNA
tatcactctgcatctagttcactgcagg

SEQ ID NO: 20846 - DNA, 28 bp, synthetic construct
  source 1..28: mol_type = other DNA
tgaactagatgcagagtgatagttgagg

SEQ ID NO: 20847 - DNA, 28 bp, synthetic construct
  source 1..28: mol_type = other DNA
actagatgcagagtgatagttgaggcgg

SEQ ID NO: 20848 - DNA, 28 bp, synthetic construct
  source 1..28: mol_type = other DNA
gtgatagttgaggcggtcatgttgctgg

SEQ ID NO: 20849 - DNA, 28 bp, synthetic construct
  source 1..28: mol_type = other DNA
ggtcatgttgctggtatacacaccaagg

SEQ ID NO: 20850 - DNA, 28 bp, synthetic construct
  source 1..28: mol_type = other DNA
gttgctggtatacacaccaaggcaatgg

SEQ ID NO: 20851 - DNA, 28 bp, synthetic construct
  source 1..28: mol_type = other DNA
acaccaaggcaatggatacatttgtagg

SEQ ID NO: 20852 - DNA, 28 bp, synthetic construct
  source 1..28: mol_type = other DNA
tcacctacaaatgtatccattgccttgg

SEQ ID NO: 20853 - DNA, 28 bp, synthetic construct
  source 1..28: mol_type = other DNA
atttgtaggtgagctttttctcaactgg

SEQ ID NO: 20854 - DNA, 28 bp, synthetic construct
  source 1..28: mol_type = other DNA
aactggatgaaccgtctgaataacttgg

SEQ ID NO: 20855 - DNA, 28 bp, synthetic construct
  source 1..28: mol_type = other DNA
cgagagaggcaccaagttattcagacgg

SEQ ID NO: 20856 - DNA, 28 bp, synthetic construct
  source 1..28: mol_type = other DNA
tgcacttgcacatcacttacgagagagg

SEQ ID NO: 20857 - DNA, 28 bp, synthetic construct
  source 1..28: mol_type = other DNA
aagtgatgtgcaagtgcatcagatatgg

SEQ ID NO: 20858 - DNA, 28 bp, synthetic construct
  source 1..28: mol_type = other DNA
agtgatgtgcaagtgcatcagatatggg

SEQ ID NO: 20859 - DNA, 28 bp, synthetic construct
  source 1..28: mol_type = other DNA
aagtgcatcagatatgggtccttttagg

SEQ ID NO: 20860 - DNA, 28 bp, synthetic construct
  source 1..28: mol_type = other DNA
gtccttttaggattgaaaagcaaagagg

SEQ ID NO: 20861 - DNA, 28 bp, synthetic construct
  source 1..28: mol_type = other DNA
gtcctctttgcttttcaatcctaaaagg

SEQ ID NO: 20862 - DNA, 28 bp, synthetic construct
  source 1..28: mol_type = other DNA
taggattgaaaagcaaagaggacaaagg

SEQ ID NO: 20863 - DNA, 28 bp, synthetic construct
  source 1..28: mol_type = other DNA
aggattgaaaagcaaagaggacaaaggg

SEQ ID NO: 20864 - DNA, 28 bp, synthetic construct
  source 1..28: mol_type = other DNA
agggttttcccaacatcttttttatagg

SEQ ID NO: 20865 - DNA, 28 bp, synthetic construct
  source 1..28: mol_type = other DNA
gggttttcccaacatcttttttataggg

SEQ ID NO: 20866 - DNA, 28 bp, synthetic construct
  source 1..28: mol_type = other DNA
tgcagtgccctataaaaaagatgttggg

SEQ ID NO: 20867 - DNA, 28 bp, synthetic construct
  source 1..28: mol_type = other DNA
ctgcagtgccctataaaaaagatgttgg

SEQ ID NO: 20868 - DNA, 28 bp, synthetic construct
  source 1..28: mol_type = other DNA
cttttttatagggcactgcagcttgagg

SEQ ID NO: 20869 - DNA, 28 bp, synthetic construct
  source 1..28: mol_type = other DNA
ctgcagcttgaggtgaactttttacagg

SEQ ID NO: 20870 - DNA, 28 bp, synthetic construct
  source 1..28: mol_type = other DNA
tgcagcttgaggtgaactttttacaggg

SEQ ID NO: 20871 - DNA, 28 bp, synthetic construct
  source 1..28: mol_type = other DNA
ggatatctgccttttcctgaacctttgg

SEQ ID NO: 20872 - DNA, 28 bp, synthetic construct
  source 1..28: mol_type = other DNA
ctgccttttcctgaacctttggctgtgg

SEQ ID NO: 20873 - DNA, 28 bp, synthetic construct
  source 1..28: mol_type = other DNA
aagccacagccaaaggttcaggaaaagg

SEQ ID NO: 20874 - DNA, 28 bp, synthetic construct
  source 1..28: mol_type = other DNA
tttcctgaacctttggctgtggctttgg

SEQ ID NO: 20875 - DNA, 28 bp, synthetic construct
  source 1..28: mol_type = other DNA
cctgaacctttggctgtggctttggagg

SEQ ID NO: 20876 - DNA, 28 bp, synthetic construct
  source 1..28: mol_type = other DNA
cctttggctgtggctttggaggaactgg

SEQ ID NO: 20877 - DNA, 28 bp, synthetic construct
  source 1..28: mol_type = other DNA
ttggctgtggctttggaggaactggagg

SEQ ID NO: 20878 - DNA, 28 bp, synthetic construct
  source 1..28: mol_type = other DNA
ctttggaggaactggaggattattttgg

SEQ ID NO: 20879 - DNA, 28 bp, synthetic construct
  source 1..28: mol_type = other DNA
tttggaggaactggaggattattttggg

SEQ ID NO: 20880 - DNA, 28 bp, synthetic construct
  source 1..28: mol_type = other DNA
aggaactggaggattattttgggcatgg

SEQ ID NO: 20881 - DNA, 28 bp, synthetic construct
  source 1..28: mol_type = other DNA
gggcatggtaagcaacagattcagctgg

SEQ ID NO: 20882 - DNA, 28 bp, synthetic construct
  source 1..28: mol_type = other DNA
ggcatggtaagcaacagattcagctggg

SEQ ID NO: 20883 - DNA, 28 bp, synthetic construct
  source 1..28: mol_type = other DNA
gcatggtaagcaacagattcagctgggg

SEQ ID NO: 20884 - DNA, 28 bp, synthetic construct
  source 1..28: mol_type = other DNA
atccctcagattgtatgtagttaccagg

SEQ ID NO: 20885 - DNA, 28 bp, synthetic construct
  source 1..28: mol_type = other DNA
ctcctggtaactacatacaatctgaggg

SEQ ID NO: 20886 - DNA, 28 bp, synthetic construct
  source 1..28: mol_type = other DNA
tctcctggtaactacatacaatctgagg

SEQ ID NO: 20887 - DNA, 28 bp, synthetic construct
  source 1..28: mol_type = other DNA
cagattgtatgtagttaccaggagatgg

SEQ ID NO: 20888 - DNA, 28 bp, synthetic construct
  source 1..28: mol_type = other DNA
ggtagtcacactaacatccatctcctgg

SEQ ID NO: 20889 - DNA, 28 bp, synthetic construct
  source 1..28: mol_type = other DNA
tgagttttgatttgacattgcagcaggg

SEQ ID NO: 20890 - DNA, 28 bp, synthetic construct
  source 1..28: mol_type = other DNA
ttgagttttgatttgacattgcagcagg

SEQ ID NO: 20891 - DNA, 28 bp, synthetic construct
  source 1..28: mol_type = other DNA
caaaactcaaagtagaatctgttttagg

SEQ ID NO: 20892 - DNA, 28 bp, synthetic construct
  source 1..28: mol_type = other DNA
ggatggttcacattgatgaagagatggg

SEQ ID NO: 20893 - DNA, 28 bp, synthetic construct
  source 1..28: mol_type = other DNA
cggatggttcacattgatgaagagatgg

SEQ ID NO: 20894 - DNA, 28 bp, synthetic construct
  source 1..28: mol_type = other DNA
tcaatgtgaaccatccgcatgtgtgcgg

SEQ ID NO: 20895 - DNA, 28 bp, synthetic construct
  source 1..28: mol_type = other DNA
gaaaagatggccgcacacatgcggatgg

SEQ ID NO: 20896 - DNA, 28 bp, synthetic construct
  source 1..28: mol_type = other DNA
tgtggaaaagatggccgcacacatgcgg

SEQ ID NO: 20897 - DNA, 28 bp, synthetic construct
  source 1..28: mol_type = other DNA
tcaactttcaatgatgtggaaaagatgg

SEQ ID NO: 20898 - DNA, 28 bp, synthetic construct
  source 1..28: mol_type = other DNA
cttttccacatcattgaaagttgaacgg

SEQ ID NO: 20899 - DNA, 28 bp, synthetic construct
  source 1..28: mol_type = other DNA
tattgccgttcaactttcaatgatgtgg

SEQ ID NO: 20900 - DNA, 28 bp, synthetic construct
  source 1..28: mol_type = other DNA
catcattgaaagttgaacggcaatatgg

SEQ ID NO: 20901 - DNA, 28 bp, synthetic construct
  source 1..28: mol_type = other DNA
acaagacagaccatgaattaacatatgg

SEQ ID NO: 20902 - DNA, 28 bp, synthetic construct
  source 1..28: mol_type = other DNA
ctctgctcaaccatatgttaattcatgg

SEQ ID NO: 20903 - DNA, 28 bp, synthetic construct
  source 1..28: mol_type = other DNA
aacatatggttgagcagagtatctgtgg

SEQ ID NO: 20904 - DNA, 28 bp, synthetic construct
  source 1..28: mol_type = other DNA
acatatggttgagcagagtatctgtggg

SEQ ID NO: 20905 - DNA, 28 bp, synthetic construct
  source 1..28: mol_type = other DNA
tgtgggtaaatagcgattacagtagagg

SEQ ID NO: 20906 - DNA, 28 bp, synthetic construct
  source 1..28: mol_type = other DNA
aaattgtgtattttcataatgtagttgg

SEQ ID NO: 20907 - DNA, 28 bp, synthetic construct
  source 1..28: mol_type = other DNA
ttttcataatgtagttggctactgctgg

SEQ ID NO: 20908 - DNA, 28 bp, synthetic construct
  source 1..28: mol_type = other DNA
tttcataatgtagttggctactgctggg

SEQ ID NO: 20909 - DNA, 28 bp, synthetic construct
  source 1..28: mol_type = other DNA
cgaagtgcacactatagacattttcagg

SEQ ID NO: 20910 - DNA, 28 bp, synthetic construct
  source 1..28: mol_type = other DNA
gtacatattttccacttttgagttgagg

SEQ ID NO: 20911 - DNA, 28 bp, synthetic construct
  source 1..28: mol_type = other DNA
aggtaacacttcctcaactcaaaagtgg

SEQ ID NO: 20912 - DNA, 28 bp, synthetic construct
  source 1..28: mol_type = other DNA
acttttgagttgaggaagtgttacctgg

SEQ ID NO: 20913 - DNA, 28 bp, synthetic construct
  source 1..28: mol_type = other DNA
cttttgagttgaggaagtgttacctggg

SEQ ID NO: 20914 - DNA, 28 bp, synthetic construct
  source 1..28: mol_type = other DNA
ttttgagttgaggaagtgttacctgggg

SEQ ID NO: 20915 - DNA, 28 bp, synthetic construct
  source 1..28: mol_type = other DNA
tttgagttgaggaagtgttacctggggg

SEQ ID NO: 20916 - DNA, 28 bp, synthetic construct
  source 1..28: mol_type = other DNA
gagttgaggaagtgttacctgggggagg

SEQ ID NO: 20917 - DNA, 28 bp, synthetic construct
  source 1..28: mol_type = other DNA
agttgaggaagtgttacctgggggaggg

SEQ ID NO: 20918 - DNA, 28 bp, synthetic construct
  source 1..28: mol_type = other DNA
gaagtgttacctgggggagggcctgtgg

SEQ ID NO: 20919 - DNA, 28 bp, synthetic construct
  source 1..28: mol_type = other DNA
ctgcagctgccacaggccctcccccagg

SEQ ID NO: 20920 - DNA, 28 bp, synthetic construct
  source 1..28: mol_type = other DNA
ggggagggcctgtggcagctgcagcagg

SEQ ID NO: 20921 - DNA, 28 bp, synthetic construct
  source 1..28: mol_type = other DNA
gggcctgtggcagctgcagcaggtttgg

SEQ ID NO: 20922 - DNA, 28 bp, synthetic construct
  source 1..28: mol_type = other DNA
gttccaaacctgctgcagctgccacagg

SEQ ID NO: 20923 - DNA, 28 bp, synthetic construct
  source 1..28: mol_type = other DNA
gtggcagctgcagcaggtttggaactgg

SEQ ID NO: 20924 - DNA, 28 bp, synthetic construct
  source 1..28: mol_type = other DNA
ttggaactggactgacctaacactctgg

SEQ ID NO: 20925 - DNA, 28 bp, synthetic construct
  source 1..28: mol_type = other DNA
ctcagtcacaggcatccagagtgttagg

SEQ ID NO: 20926 - DNA, 28 bp, synthetic construct
  source 1..28: mol_type = other DNA
cactctggatgcctgtgactgagagagg

SEQ ID NO: 20927 - DNA, 28 bp, synthetic construct
  source 1..28: mol_type = other DNA
actctggatgcctgtgactgagagaggg

SEQ ID NO: 20928 - DNA, 28 bp, synthetic construct
  source 1..28: mol_type = other DNA
tggatgcctgtgactgagagagggaagg

SEQ ID NO: 20929 - DNA, 28 bp, synthetic construct
  source 1..28: mol_type = other DNA
aagtctccttccctctctcagtcacagg

SEQ ID NO: 20930 - DNA, 28 bp, synthetic construct
  source 1..28: mol_type = other DNA
ctgagagagggaaggagactttaactgg

SEQ ID NO: 20931 - DNA, 28 bp, synthetic construct
  source 1..28: mol_type = other DNA
tttaactggcccgatgagagagaagagg

SEQ ID NO: 20932 - DNA, 28 bp, synthetic construct
  source 1..28: mol_type = other DNA
ctgctaatgcctcttctctctcatcggg

SEQ ID NO: 20933 - DNA, 28 bp, synthetic construct
  source 1..28: mol_type = other DNA
tctgctaatgcctcttctctctcatcgg

SEQ ID NO: 20934 - DNA, 28 bp, synthetic construct
  source 1..28: mol_type = other DNA
gagagaagaggcattagcagactgcagg

SEQ ID NO: 20935 - DNA, 28 bp, synthetic construct
  source 1..28: mol_type = other DNA
agagaagaggcattagcagactgcaggg

SEQ ID NO: 20936 - DNA, 28 bp, synthetic construct
  source 1..28: mol_type = other DNA
tagcagactgcagggagtatcttgctgg

SEQ ID NO: 20937 - DNA, 28 bp, synthetic construct
  source 1..28: mol_type = other DNA
ctgcagggagtatcttgctggtgcctgg

SEQ ID NO: 20938 - DNA, 28 bp, synthetic construct
  source 1..28: mol_type = other DNA
tgcagggagtatcttgctggtgcctggg

SEQ ID NO: 20939 - DNA, 28 bp, synthetic construct
  source 1..28: mol_type = other DNA
gggcttgggtcagagcagaggtcccagg

SEQ ID NO: 20940 - DNA, 28 bp, synthetic construct
  source 1..28: mol_type = other DNA
gtcttatgggcttgggtcagagcagagg

SEQ ID NO: 20941 - DNA, 28 bp, synthetic construct
  source 1..28: mol_type = other DNA
tggaaacggaaggtcttatgggcttggg

SEQ ID NO: 20942 - DNA, 28 bp, synthetic construct
  source 1..28: mol_type = other DNA
gtggaaacggaaggtcttatgggcttgg

SEQ ID NO: 20943 - DNA, 28 bp, synthetic construct
  source 1..28: mol_type = other DNA
gcccataagaccttccgtttccacttgg

SEQ ID NO: 20944 - DNA, 28 bp, synthetic construct
  source 1..28: mol_type = other DNA
tccaagtggaaacggaaggtcttatggg

SEQ ID NO: 20945 - DNA, 28 bp, synthetic construct
  source 1..28: mol_type = other DNA
ttccaagtggaaacggaaggtcttatgg

SEQ ID NO: 20946 - DNA, 28 bp, synthetic construct
  source 1..28: mol_type = other DNA
gcagttacttccaagtggaaacggaagg

SEQ ID NO: 20947 - DNA, 28 bp, synthetic construct
  source 1..28: mol_type = other DNA
taaagcagttacttccaagtggaaacgg

SEQ ID NO: 20948 - DNA, 28 bp, synthetic construct
  source 1..28: mol_type = other DNA
agtctgtaaagcagttacttccaagtgg

SEQ ID NO: 20949 - DNA, 28 bp, synthetic construct
  source 1..28: mol_type = other DNA
actgctttacagactgagattgttgagg

SEQ ID NO: 20950 - DNA, 28 bp, synthetic construct
  source 1..28: mol_type = other DNA
tttacagactgagattgttgaggaatgg

SEQ ID NO: 20951 - DNA, 28 bp, synthetic construct
  source 1..28: mol_type = other DNA
actgagattgttgaggaatggaaactgg

SEQ ID NO: 20952 - DNA, 28 bp, synthetic construct
  source 1..28: mol_type = other DNA
gtcagtcaatgagactgggtctaggtgg

SEQ ID NO: 20953 - DNA, 28 bp, synthetic construct
  source 1..28: mol_type = other DNA
ttggtcagtcaatgagactgggtctagg

SEQ ID NO: 20954 - DNA, 28 bp, synthetic construct
  source 1..28: mol_type = other DNA
acagtgttggtcagtcaatgagactggg

SEQ ID NO: 20955 - DNA, 28 bp, synthetic construct
  source 1..28: mol_type = other DNA
tacagtgttggtcagtcaatgagactgg

SEQ ID NO: 20956 - DNA, 28 bp, synthetic construct
  source 1..28: mol_type = other DNA
cattgactgaccaacactgtaaccctgg

SEQ ID NO: 20957 - DNA, 28 bp, synthetic construct
  source 1..28: mol_type = other DNA
aatctgtaggccagggttacagtgttgg

SEQ ID NO: 20958 - DNA, 28 bp, synthetic construct
  source 1..28: mol_type = other DNA
actatggagtcaaatctgtaggccaggg

SEQ ID NO: 20959 - DNA, 28 bp, synthetic construct
  source 1..28: mol_type = other DNA
aactatggagtcaaatctgtaggccagg

SEQ ID NO: 20960 - DNA, 28 bp, synthetic construct
  source 1..28: mol_type = other DNA
agaacaactatggagtcaaatctgtagg

SEQ ID NO: 20961 - DNA, 28 bp, synthetic construct
  source 1..28: mol_type = other DNA
gtgttcatctgcagcagaacaactatgg

SEQ ID NO: 20962 - DNA, 28 bp, synthetic construct
  source 1..28: mol_type = other DNA
tagttgttctgctgcagatgaacactgg

SEQ ID NO: 20963 - DNA, 28 bp, synthetic construct
  source 1..28: mol_type = other DNA
tgttgactcctgtagaatttaagttagg

SEQ ID NO: 20964 - DNA, 28 bp, synthetic construct
  source 1..28: mol_type = other DNA
ctcctgtagaatttaagttaggctttgg

SEQ ID NO: 20965 - DNA, 28 bp, synthetic construct
  source 1..28: mol_type = other DNA
taccaaagcctaacttaaattctacagg

SEQ ID NO: 20966 - DNA, 28 bp, synthetic construct
  source 1..28: mol_type = other DNA
agagtcgattcaccatctgctgtgatgg

SEQ ID NO: 20967 - DNA, 28 bp, synthetic construct
  source 1..28: mol_type = other DNA
caccatctgctgtgatggtaaagaccgg

SEQ ID NO: 20968 - DNA, 28 bp, synthetic construct
  source 1..28: mol_type = other DNA
gtccggtctttaccatcacagcagatgg

SEQ ID NO: 20969 - DNA, 28 bp, synthetic construct
  source 1..28: mol_type = other DNA
taaagaccggacatttccagaagcaagg

SEQ ID NO: 20970 - DNA, 28 bp, synthetic construct
  source 1..28: mol_type = other DNA
aaagaccggacatttccagaagcaaggg

SEQ ID NO: 20971 - DNA, 28 bp, synthetic construct
  source 1..28: mol_type = other DNA
cggttcccttgcttctggaaatgtccgg

SEQ ID NO: 20972 - DNA, 28 bp, synthetic construct
  source 1..28: mol_type = other DNA
ttccagaagcaagggaaccgatccttgg

SEQ ID NO: 20973 - DNA, 28 bp, synthetic construct
  source 1..28: mol_type = other DNA
caccaaggatcggttcccttgcttctgg

SEQ ID NO: 20974 - DNA, 28 bp, synthetic construct
  source 1..28: mol_type = other DNA
cagaagcaagggaaccgatccttggtgg

SEQ ID NO: 20975 - DNA, 28 bp, synthetic construct
  source 1..28: mol_type = other DNA
agaagcaagggaaccgatccttggtggg

SEQ ID NO: 20976 - DNA, 28 bp, synthetic construct
  source 1..28: mol_type = other DNA
agagcatgggactcccaccaaggatcgg

SEQ ID NO: 20977 - DNA, 28 bp, synthetic construct
  source 1..28: mol_type = other DNA
caagaagagcatgggactcccaccaagg

SEQ ID NO: 20978 - DNA, 28 bp, synthetic construct
  source 1..28: mol_type = other DNA
ggagtcccatgctcttcttgtcttgagg

SEQ ID NO: 20979 - DNA, 28 bp, synthetic construct
  source 1..28: mol_type = other DNA
cccatgctcttcttgtcttgaggtttgg

SEQ ID NO: 20980 - DNA, 28 bp, synthetic construct
  source 1..28: mol_type = other DNA
ccatgctcttcttgtcttgaggtttggg

SEQ ID NO: 20981 - DNA, 28 bp, synthetic construct
  source 1..28: mol_type = other DNA
tgaggtttgggagcaattagcatcaagg

SEQ ID NO: 20982 - DNA, 28 bp, synthetic construct
  source 1..28: mol_type = other DNA
gaggtttgggagcaattagcatcaaggg

SEQ ID NO: 20983 - DNA, 28 bp, synthetic construct
  source 1..28: mol_type = other DNA
ttgggagcaattagcatcaagggtttgg

SEQ ID NO: 20984 - DNA, 28 bp, synthetic construct
  source 1..28: mol_type = other DNA
agcaattagcatcaagggtttggatcgg

SEQ ID NO: 20985 - DNA, 28 bp, synthetic construct
  source 1..28: mol_type = other DNA
gcaattagcatcaagggtttggatcggg

SEQ ID NO: 20986 - DNA, 28 bp, synthetic construct
  source 1..28: mol_type = other DNA
caattagcatcaagggtttggatcgggg

SEQ ID NO: 20987 - DNA, 28 bp, synthetic construct
  source 1..28: mol_type = other DNA
accactacatttgtgtgcccaatcatgg

SEQ ID NO: 20988 - DNA, 28 bp, synthetic construct
  source 1..28: mol_type = other DNA
gccatgattgggcacacaaatgtagtgg

SEQ ID NO: 20989 - DNA, 28 bp, synthetic construct
  source 1..28: mol_type = other DNA
aggctatcaggtcactgccatgattggg

SEQ ID NO: 20990 - DNA, 28 bp, synthetic construct
  source 1..28: mol_type = other DNA
taggctatcaggtcactgccatgattgg

SEQ ID NO: 20991 - DNA, 28 bp, synthetic construct
  source 1..28: mol_type = other DNA
agtgacctgatagcctatacgttcatgg

SEQ ID NO: 20992 - DNA, 28 bp, synthetic construct
  source 1..28: mol_type = other DNA
gaagaccatgaacgtataggctatcagg

SEQ ID NO: 20993 - DNA, 28 bp, synthetic construct
  source 1..28: mol_type = other DNA
atgtcatcgaagaccatgaacgtatagg

SEQ ID NO: 20994 - DNA, 28 bp, synthetic construct
  source 1..28: mol_type = other DNA
atgacatgctgtaccaaagcttcatagg

SEQ ID NO: 20995 - DNA, 28 bp, synthetic construct
  source 1..28: mol_type = other DNA
gctgtaccaaagcttcataggactttgg

SEQ ID NO: 20996 - DNA, 28 bp, synthetic construct
  source 1..28: mol_type = other DNA
ttcatgccaaagtcctatgaagctttgg

SEQ ID NO: 20997 - DNA, 28 bp, synthetic construct
  source 1..28: mol_type = other DNA
agcttcataggactttggcatgaaaagg

SEQ ID NO: 20998 - DNA, 28 bp, synthetic construct
  source 1..28: mol_type = other DNA
cttgcagtgaatactactctcttctcgg

SEQ ID NO: 20999 - DNA, 28 bp, synthetic construct
  source 1..28: mol_type = other DNA
ttgcagtgaatactactctcttctcggg

SEQ ID NO: 21000 - DNA, 28 bp, synthetic construct
  source 1..28: mol_type = other DNA
ctctcttctcgggcattcgagcctaagg

SEQ ID NO: 21001 - DNA, 28 bp, synthetic construct
  source 1..28: mol_type = other DNA
tctcttctcgggcattcgagcctaaggg

SEQ ID NO: 21002 - DNA, 28 bp, synthetic construct
  source 1..28: mol_type = other DNA
ctcttctcgggcattcgagcctaagggg

SEQ ID NO: 21003 - DNA, 28 bp, synthetic construct
  source 1..28: mol_type = other DNA
aatcactcaatggggcagtccccttagg

SEQ ID NO: 21004 - DNA, 28 bp, synthetic construct
  source 1..28: mol_type = other DNA
aaggcaggagaaaaatcactcaatgggg

SEQ ID NO: 21005 - DNA, 28 bp, synthetic construct
  source 1..28: mol_type = other DNA
aaaggcaggagaaaaatcactcaatggg

SEQ ID NO: 21006 - DNA, 28 bp, synthetic construct
  source 1..28: mol_type = other DNA
caaaggcaggagaaaaatcactcaatgg

SEQ ID NO: 21007 - DNA, 28 bp, synthetic construct
  source 1..28: mol_type = other DNA
atttttctcctgcctttgctatgtaagg

SEQ ID NO: 21008 - DNA, 28 bp, synthetic construct
  source 1..28: mol_type = other DNA
tggcagcaccttacatagcaaaggcagg

SEQ ID NO: 21009 - DNA, 28 bp, synthetic construct
  source 1..28: mol_type = other DNA
catgtggcagcaccttacatagcaaagg

SEQ ID NO: 21010 - DNA, 28 bp, synthetic construct
  source 1..28: mol_type = other DNA
atttacagggaacattttcagcatgtgg

SEQ ID NO: 21011 - DNA, 28 bp, synthetic construct
  source 1..28: mol_type = other DNA
gaaatagttaggaagcacatttacaggg

SEQ ID NO: 21012 - DNA, 28 bp, synthetic construct
  source 1..28: mol_type = other DNA
tgaaatagttaggaagcacatttacagg

SEQ ID NO: 21013 - DNA, 28 bp, synthetic construct
  source 1..28: mol_type = other DNA
tgtgcttcctaactatttcataaagagg

SEQ ID NO: 21014 - DNA, 28 bp, synthetic construct
  source 1..28: mol_type = other DNA
cctaactatttcataaagaggatctcgg

SEQ ID NO: 21015 - DNA, 28 bp, synthetic construct
  source 1..28: mol_type = other DNA
cttgctctacactgtcagcctgcttagg

SEQ ID NO: 21016 - DNA, 28 bp, synthetic construct
  source 1..28: mol_type = other DNA
tacactgtcagcctgcttaggtttaagg

SEQ ID NO: 21017 - DNA, 28 bp, synthetic construct
  source 1..28: mol_type = other DNA
aaaaatgatggccttaaacctaagcagg

SEQ ID NO: 21018 - DNA, 28 bp, synthetic construct
  source 1..28: mol_type = other DNA
ctttcaaagataaaaacaaaaatgatgg

SEQ ID NO: 21019 - DNA, 28 bp, synthetic construct
  source 1..28: mol_type = other DNA
tttgtttttatctttgaaagtgctgagg

SEQ ID NO: 21020 - DNA, 28 bp, synthetic construct
  source 1..28: mol_type = other DNA
ctttgaaagtgctgaggctgctacttgg

SEQ ID NO: 21021 - DNA, 28 bp, synthetic construct
  source 1..28: mol_type = other DNA
gtgctgaggctgctacttggtgcgctgg

SEQ ID NO: 21022 - DNA, 28 bp, synthetic construct
  source 1..28: mol_type = other DNA
ggctgctacttggtgcgctggcgttcgg

SEQ ID NO: 21023 - DNA, 28 bp, synthetic construct
  source 1..28: mol_type = other DNA
tccaaagtctttttgtctgcattgaagg

SEQ ID NO: 21024 - DNA, 28 bp, synthetic construct
  source 1..28: mol_type = other DNA
accttcaatgcagacaaaaagactttgg

SEQ ID NO: 21025 - DNA, 28 bp, synthetic construct
  source 1..28: mol_type = other DNA
tttttgtctgcattgaaggtacagtagg

SEQ ID NO: 21026 - DNA, 28 bp, synthetic construct
  source 1..28: mol_type = other DNA
ttttgtctgcattgaaggtacagtaggg

SEQ ID NO: 21027 - DNA, 28 bp, synthetic construct
  source 1..28: mol_type = other DNA
tttgtctgcattgaaggtacagtagggg

SEQ ID NO: 21028 - DNA, 28 bp, synthetic construct
  source 1..28: mol_type = other DNA
attgaaggtacagtaggggcaattaagg

SEQ ID NO: 21029 - DNA, 28 bp, synthetic construct
  source 1..28: mol_type = other DNA
aatcctattttcaaagtcttcactatgg

SEQ ID NO: 21030 - DNA, 28 bp, synthetic construct
  source 1..28: mol_type = other DNA
tgtccatagtgaagactttgaaaatagg

SEQ ID NO: 21031 - DNA, 28 bp, synthetic construct
  source 1..28: mol_type = other DNA
ttcaaagtcttcactatggacattgcgg

SEQ ID NO: 21032 - DNA, 28 bp, synthetic construct
  source 1..28: mol_type = other DNA
tggacattgcggaaatgacttttgtagg

SEQ ID NO: 21033 - DNA, 28 bp, synthetic construct
  source 1..28: mol_type = other DNA
cttttgtaggcagagaagaattttgagg

SEQ ID NO: 21034 - DNA, 28 bp, synthetic construct
  source 1..28: mol_type = other DNA
aggcagagaagaattttgaggaaaatgg

SEQ ID NO: 21035 - DNA, 28 bp, synthetic construct
  source 1..28: mol_type = other DNA
aaaatggacaagcgctgcagcagaaagg

SEQ ID NO: 21036 - DNA, 28 bp, synthetic construct
  source 1..28: mol_type = other DNA
gtttttgtgtttactttaggactatcgg

SEQ ID NO: 21037 - DNA, 28 bp, synthetic construct
  source 1..28: mol_type = other DNA
taattctagtttttgtgtttactttagg

SEQ ID NO: 21038 - DNA, 28 bp, synthetic construct
  source 1..28: mol_type = other DNA
gaggaagtctcctgtgccacttacctgg

SEQ ID NO: 21039 - DNA, 28 bp, synthetic construct
  source 1..28: mol_type = other DNA
ttacgaaaaaccaggtaagtggcacagg

SEQ ID NO: 21040 - DNA, 28 bp, synthetic construct
  source 1..28: mol_type = other DNA
catcacttacgaaaaaccaggtaagtgg

SEQ ID NO: 21041 - DNA, 28 bp, synthetic construct
  source 1..28: mol_type = other DNA
cacttacctggtttttcgtaagtgatgg

SEQ ID NO: 21042 - DNA, 28 bp, synthetic construct
  source 1..28: mol_type = other DNA
acttacctggtttttcgtaagtgatggg

SEQ ID NO: 21043 - DNA, 28 bp, synthetic construct
  source 1..28: mol_type = other DNA
tgggacccatcacttacgaaaaaccagg

SEQ ID NO: 21044 - DNA, 28 bp, synthetic construct
  source 1..28: mol_type = other DNA
actacatgggaggatgtaggactgtggg

SEQ ID NO: 21045 - DNA, 28 bp, synthetic construct
  source 1..28: mol_type = other DNA
cactacatgggaggatgtaggactgtgg

SEQ ID NO: 21046 - DNA, 28 bp, synthetic construct
  source 1..28: mol_type = other DNA
tgaaaaacactacatgggaggatgtagg

SEQ ID NO: 21047 - DNA, 28 bp, synthetic construct
  source 1..28: mol_type = other DNA
ttttatttgaaaaacactacatgggagg

SEQ ID NO: 21048 - DNA, 28 bp, synthetic construct
  source 1..28: mol_type = other DNA
gacttttatttgaaaaacactacatggg

SEQ ID NO: 21049 - DNA, 28 bp, synthetic construct
  source 1..28: mol_type = other DNA
tgacttttatttgaaaaacactacatgg

SEQ ID NO: 21050 - DNA, 28 bp, synthetic construct
  source 1..28: mol_type = other DNA
tagtgtttttcaaataaaagtcattagg

SEQ ID NO: 21051 - DNA, 28 bp, synthetic construct
  source 1..28: mol_type = other DNA
ttgtaaacttatttcactgttttctagg

SEQ ID NO: 21052 - DNA, 28 bp, synthetic construct
  source 1..28: mol_type = other DNA
aaaaaaatacttagtgacattgggttgg

SEQ ID NO: 21053 - DNA, 28 bp, synthetic construct
  source 1..28: mol_type = other DNA
tgtgaaaaaaatacttagtgacattggg

SEQ ID NO: 21054 - DNA, 28 bp, synthetic construct
  source 1..28: mol_type = other DNA
ctgtgaaaaaaatacttagtgacattgg

SEQ ID NO: 21055 - DNA, 28 bp, synthetic construct
  source 1..28: mol_type = other DNA
actaagtatttttttcacagttttccgg

SEQ ID NO: 21056 - DNA, 28 bp, synthetic construct
  source 1..28: mol_type = other DNA
ctaagtatttttttcacagttttccggg

SEQ ID NO: 21057 - DNA, 28 bp, synthetic construct
  source 1..28: mol_type = other DNA
caatcttggcagtttaagaaaagcccgg

SEQ ID NO: 21058 - DNA, 28 bp, synthetic construct
  source 1..28: mol_type = other DNA
ttcttaaactgccaagattgttgacagg

SEQ ID NO: 21059 - DNA, 28 bp, synthetic construct
  source 1..28: mol_type = other DNA
actgccaagattgttgacaggaagttgg

SEQ ID NO: 21060 - DNA, 28 bp, synthetic construct
  source 1..28: mol_type = other DNA
tgttccaacttcctgtcaacaatcttgg

SEQ ID NO: 21061 - DNA, 28 bp, synthetic construct
  source 1..28: mol_type = other DNA
caggaagttggaacatagtttctattgg

SEQ ID NO: 21062 - DNA, 28 bp, synthetic construct
  source 1..28: mol_type = other DNA
actcaaaactgtaatgatgatgaactgg

SEQ ID NO: 21063 - DNA, 28 bp, synthetic construct
  source 1..28: mol_type = other DNA
catcatcattacagttttgagtgccagg

SEQ ID NO: 21064 - DNA, 28 bp, synthetic construct
  source 1..28: mol_type = other DNA
atcatcattacagttttgagtgccaggg

SEQ ID NO: 21065 - DNA, 28 bp, synthetic construct
  source 1..28: mol_type = other DNA
tacagttttgagtgccagggtaaagagg

SEQ ID NO: 21066 - DNA, 28 bp, synthetic construct
  source 1..28: mol_type = other DNA
caattcaacaaaaacctctttaccctgg

SEQ ID NO: 21067 - DNA, 28 bp, synthetic construct
  source 1..28: mol_type = other DNA
cagggtaaagaggtttttgttgaattgg

SEQ ID NO: 21068 - DNA, 28 bp, synthetic construct
  source 1..28: mol_type = other DNA
attggaactgtcctgcctactgctacgg

SEQ ID NO: 21069 - DNA, 28 bp, synthetic construct
  source 1..28: mol_type = other DNA
tttaaagaataccgtagcagtaggcagg

SEQ ID NO: 21070 - DNA, 28 bp, synthetic construct
  source 1..28: mol_type = other DNA
ttgttttaaagaataccgtagcagtagg

SEQ ID NO: 21071 - DNA, 28 bp, synthetic construct
  source 1..28: mol_type = other DNA
tgaacaatatataggtttgttaaattgg

SEQ ID NO: 21072 - DNA, 28 bp, synthetic construct
  source 1..28: mol_type = other DNA
attgtctaacagatgaacaatatatagg

SEQ ID NO: 21073 - DNA, 28 bp, synthetic construct
  source 1..28: mol_type = other DNA
ttgcacttagccactcaactgtgctagg

SEQ ID NO: 21074 - DNA, 28 bp, synthetic construct
  source 1..28: mol_type = other DNA
tctctctattcctagcacagttgagtgg

SEQ ID NO: 21075 - DNA, 28 bp, synthetic construct
  source 1..28: mol_type = other DNA
taggaatagagagatgagtaagacatgg

SEQ ID NO: 21076 - DNA, 28 bp, synthetic construct
  source 1..28: mol_type = other DNA
agctggaagaaatggactgttgaagggg

SEQ ID NO: 21077 - DNA, 28 bp, synthetic construct
  source 1..28: mol_type = other DNA
aagctggaagaaatggactgttgaaggg

SEQ ID NO: 21078 - DNA, 28 bp, synthetic construct
  source 1..28: mol_type = other DNA
taagctggaagaaatggactgttgaagg

SEQ ID NO: 21079 - DNA, 28 bp, synthetic construct
  source 1..28: mol_type = other DNA
tatgtgtattctaagctggaagaaatgg

SEQ ID NO: 21080 - DNA, 28 bp, synthetic construct
  source 1..28: mol_type = other DNA
agggctggctatgtgtattctaagctgg

SEQ ID NO: 21081 - DNA, 28 bp, synthetic construct
  source 1..28: mol_type = other DNA
tacacatagccagccctcaatcagtagg

SEQ ID NO: 21082 - DNA, 28 bp, synthetic construct
  source 1..28: mol_type = other DNA
acacatagccagccctcaatcagtaggg

SEQ ID NO: 21083 - DNA, 28 bp, synthetic construct
  source 1..28: mol_type = other DNA
tgtctaaaccctactgattgagggctgg

SEQ ID NO: 21084 - DNA, 28 bp, synthetic construct
  source 1..28: mol_type = other DNA
caggtgtctaaaccctactgattgaggg

SEQ ID NO: 21085 - DNA, 28 bp, synthetic construct
  source 1..28: mol_type = other DNA
acaggtgtctaaaccctactgattgagg

SEQ ID NO: 21086 - DNA, 28 bp, synthetic construct
  source 1..28: mol_type = other DNA
aagaggaggctgggcaggcaaaaacagg

SEQ ID NO: 21087 - DNA, 28 bp, synthetic construct
  source 1..28: mol_type = other DNA
tgtttttgcctgcccagcctcctcttgg

SEQ ID NO: 21088 - DNA, 28 bp, synthetic construct
  source 1..28: mol_type = other DNA
aggcgtttccaagaggaggctgggcagg

SEQ ID NO: 21089 - DNA, 28 bp, synthetic construct
  source 1..28: mol_type = other DNA
gcagaggcgtttccaagaggaggctggg

SEQ ID NO: 21090 - DNA, 28 bp, synthetic construct
  source 1..28: mol_type = other DNA
ggcagaggcgtttccaagaggaggctgg

SEQ ID NO: 21091 - DNA, 28 bp, synthetic construct
  source 1..28: mol_type = other DNA
tcgtggcagaggcgtttccaagaggagg

SEQ ID NO: 21092 - DNA, 28 bp, synthetic construct
  source 1..28: mol_type = other DNA
caatcgtggcagaggcgtttccaagagg

SEQ ID NO: 21093 - DNA, 28 bp, synthetic construct
  source 1..28: mol_type = other DNA
ttggaaacgcctctgccacgattgatgg

SEQ ID NO: 21094 - DNA, 28 bp, synthetic construct
  source 1..28: mol_type = other DNA
ttctgtcttccatcaatcgtggcagagg

SEQ ID NO: 21095 - DNA, 28 bp, synthetic construct
  source 1..28: mol_type = other DNA
gtgactttctgtcttccatcaatcgtgg

SEQ ID NO: 21096 - DNA, 28 bp, synthetic construct
  source 1..28: mol_type = other DNA
ctgagtcatgtgtactctgctctgctgg

SEQ ID NO: 21097 - DNA, 28 bp, synthetic construct
  source 1..28: mol_type = other DNA
accttgttttgcaaacttgagcatgtgg

SEQ ID NO: 21098 - DNA, 28 bp, synthetic construct
  source 1..28: mol_type = other DNA
gccacatgctcaagtttgcaaaacaagg

SEQ ID NO: 21099 - DNA, 28 bp, synthetic construct
  source 1..28: mol_type = other DNA
aaggtaatttgaaattttaacacatggg

SEQ ID NO: 21100 - DNA, 28 bp, synthetic construct
  source 1..28: mol_type = other DNA
gaaggtaatttgaaattttaacacatgg

SEQ ID NO: 21101 - DNA, 28 bp, synthetic construct
  source 1..28: mol_type = other DNA
cttctacttttgtagcggaaactgaagg

SEQ ID NO: 21102 - DNA, 28 bp, synthetic construct
  source 1..28: mol_type = other DNA
tccgctacaaaagtagaagaacaagagg

SEQ ID NO: 21103 - DNA, 28 bp, synthetic construct
  source 1..28: mol_type = other DNA
tcctcttgttcttctacttttgtagcgg

SEQ ID NO: 21104 - DNA, 28 bp, synthetic construct
  source 1..28: mol_type = other DNA
tacaaaagtagaagaacaagaggagagg

SEQ ID NO: 21105 - DNA, 28 bp, synthetic construct
  source 1..28: mol_type = other DNA
agtagaagaacaagaggagaggtcctgg

SEQ ID NO: 21106 - DNA, 28 bp, synthetic construct
  source 1..28: mol_type = other DNA
gtagaagaacaagaggagaggtcctggg

SEQ ID NO: 21107 - DNA, 28 bp, synthetic construct
  source 1..28: mol_type = other DNA
aggagaggtcctgggaaaaatgaaatgg

SEQ ID NO: 21108 - DNA, 28 bp, synthetic construct
  source 1..28: mol_type = other DNA
aaaagctttccatttcatttttcccagg

SEQ ID NO: 21109 - DNA, 28 bp, synthetic construct
  source 1..28: mol_type = other DNA
aaaaatgaaatggaaagcttttgaaagg

SEQ ID NO: 21110 - DNA, 28 bp, synthetic construct
  source 1..28: mol_type = other DNA
tgaaaaatttaattttagcactttaagg

SEQ ID NO: 21111 - DNA, 28 bp, synthetic construct
  source 1..28: mol_type = other DNA
aaggaagttttgttttctctcatgctgg

SEQ ID NO: 21112 - DNA, 28 bp, synthetic construct
  source 1..28: mol_type = other DNA
catttatagcaaaccaacaatctaatgg

SEQ ID NO: 21113 - DNA, 28 bp, synthetic construct
  source 1..28: mol_type = other DNA
ggctgtttatttaccattagattgttgg

SEQ ID NO: 21114 - DNA, 28 bp, synthetic construct
  source 1..28: mol_type = other DNA
acaatctaatggtaaataaacagcctgg

SEQ ID NO: 21115 - DNA, 28 bp, synthetic construct
  source 1..28: mol_type = other DNA
taattggtaggtaatgtgatgaaccagg

SEQ ID NO: 21116 - DNA, 28 bp, synthetic construct
  source 1..28: mol_type = other DNA
tgattataatttttgtataattggtagg

SEQ ID NO: 21117 - DNA, 28 bp, synthetic construct
  source 1..28: mol_type = other DNA
agtgtgattataatttttgtataattgg

SEQ ID NO: 21118 - DNA, 28 bp, synthetic construct
  source 1..28: mol_type = other DNA
tttatttattttaaaagttcatcacagg

SEQ ID NO: 21119 - DNA, 28 bp, synthetic construct
  source 1..28: mol_type = other DNA
tatcacctgaaatagttaacagacacgg

SEQ ID NO: 21120 - DNA, 28 bp, synthetic construct
  source 1..28: mol_type = other DNA
acctgaaatagttaacagacacggctgg

SEQ ID NO: 21121 - DNA, 28 bp, synthetic construct
  source 1..28: mol_type = other DNA
gccagccgtgtctgttaactatttcagg

SEQ ID NO: 21122 - DNA, 28 bp, synthetic construct
  source 1..28: mol_type = other DNA
cgttcattttcctgacctcaattgatgg

SEQ ID NO: 21123 - DNA, 28 bp, synthetic construct
  source 1..28: mol_type = other DNA
tctgtttagtccatcaattgaggtcagg

SEQ ID NO: 21124 - DNA, 28 bp, synthetic construct
  source 1..28: mol_type = other DNA
agagttctgtttagtccatcaattgagg

SEQ ID NO: 21125 - DNA, 28 bp, synthetic construct
  source 1..28: mol_type = other DNA
aaacagaactcttaaaatatgcagcagg

SEQ ID NO: 21126 - DNA, 28 bp, synthetic construct
  source 1..28: mol_type = other DNA
aactcttaaaatatgcagcaggacaagg

SEQ ID NO: 21127 - DNA, 28 bp, synthetic construct
  source 1..28: mol_type = other DNA
actcttaaaatatgcagcaggacaaggg

SEQ ID NO: 21128 - DNA, 28 bp, synthetic construct
  source 1..28: mol_type = other DNA
cagcaggacaagggtgccatctcacagg

SEQ ID NO: 21129 - DNA, 28 bp, synthetic construct
  source 1..28: mol_type = other DNA
ggagctgtgagctacacctgtgagatgg

SEQ ID NO: 21130 - DNA, 28 bp, synthetic construct
  source 1..28: mol_type = other DNA
gtgtagctcacagctcccagcactttgg

SEQ ID NO: 21131 - DNA, 28 bp, synthetic construct
  source 1..28: mol_type = other DNA
agctcacagctcccagcactttggaagg

SEQ ID NO: 21132 - DNA, 28 bp, synthetic construct
  source 1..28: mol_type = other DNA
cagctcccagcactttggaaggctgagg

SEQ ID NO: 21133 - DNA, 28 bp, synthetic construct
  source 1..28: mol_type = other DNA
ctcccagcactttggaaggctgaggtgg

SEQ ID NO: 21134 - DNA, 28 bp, synthetic construct
  source 1..28: mol_type = other DNA
tcccagcactttggaaggctgaggtggg

SEQ ID NO: 21135 - DNA, 28 bp, synthetic construct
  source 1..28: mol_type = other DNA
tcccacctcagccttccaaagtgctggg

SEQ ID NO: 21136 - DNA, 28 bp, synthetic construct
  source 1..28: mol_type = other DNA
ctcccacctcagccttccaaagtgctgg

SEQ ID NO: 21137 - DNA, 28 bp, synthetic construct
  source 1..28: mol_type = other DNA
cagcactttggaaggctgaggtgggagg

SEQ ID NO: 21138 - DNA, 28 bp, synthetic construct
  source 1..28: mol_type = other DNA
tttttcaggctggtcttgaactcttggg

SEQ ID NO: 21139 - DNA, 28 bp, synthetic construct
  source 1..28: mol_type = other DNA
ttttttcaggctggtcttgaactcttgg

SEQ ID NO: 21140 - DNA, 28 bp, synthetic construct
  source 1..28: mol_type = other DNA
ggtgggtatattcattttggagggtggg

SEQ ID NO: 21141 - DNA, 28 bp, synthetic construct
  source 1..28: mol_type = other DNA
cggtgggtatattcattttggagggtgg

SEQ ID NO: 21142 - DNA, 28 bp, synthetic construct
  source 1..28: mol_type = other DNA
caccctccaaaatgaatatacccaccgg

SEQ ID NO: 21143 - DNA, 28 bp, synthetic construct
  source 1..28: mol_type = other DNA
caccggtgggtatattcattttggaggg

SEQ ID NO: 21144 - DNA, 28 bp, synthetic construct
  source 1..28: mol_type = other DNA
acaccggtgggtatattcattttggagg

SEQ ID NO: 21145 - DNA, 28 bp, synthetic construct
  source 1..28: mol_type = other DNA
ttcacaccggtgggtatattcattttgg

SEQ ID NO: 21146 - DNA, 28 bp, synthetic construct
  source 1..28: mol_type = other DNA
tacccaccggtgtgaattgacaatgtgg

SEQ ID NO: 21147 - DNA, 28 bp, synthetic construct
  source 1..28: mol_type = other DNA
gaccacattgtcaattcacaccggtggg

SEQ ID NO: 21148 - DNA, 28 bp, synthetic construct
  source 1..28: mol_type = other DNA
ggaccacattgtcaattcacaccggtgg

SEQ ID NO: 21149 - DNA, 28 bp, synthetic construct
  source 1..28: mol_type = other DNA
tttggaccacattgtcaattcacaccgg

SEQ ID NO: 21150 - DNA, 28 bp, synthetic construct
  source 1..28: mol_type = other DNA
aattgacaatgtggtccaaagagcaagg

SEQ ID NO: 21151 - DNA, 28 bp, synthetic construct
  source 1..28: mol_type = other DNA
gacaatgtggtccaaagagcaaggcagg

SEQ ID NO: 21152 - DNA, 28 bp, synthetic construct
  source 1..28: mol_type = other DNA
gtggtccaaagagcaaggcaggaaacgg

SEQ ID NO: 21153 - DNA, 28 bp, synthetic construct
  source 1..28: mol_type = other DNA
ggactccgtttcctgccttgctctttgg

SEQ ID NO: 21154 - DNA, 28 bp, synthetic construct
  source 1..28: mol_type = other DNA
ggaaacggagtccagatcctcaaaatgg

SEQ ID NO: 21155 - DNA, 28 bp, synthetic construct
  source 1..28: mol_type = other DNA
gtccagatcctcaaaatggtagtacagg

SEQ ID NO: 21156 - DNA, 28 bp, synthetic construct
  source 1..28: mol_type = other DNA
tccagatcctcaaaatggtagtacaggg

SEQ ID NO: 21157 - DNA, 28 bp, synthetic construct
  source 1..28: mol_type = other DNA
gccctgtactaccattttgaggatctgg

SEQ ID NO: 21158 - DNA, 28 bp, synthetic construct
  source 1..28: mol_type = other DNA
ggttatgccctgtactaccattttgagg

SEQ ID NO: 21159 - DNA, 28 bp, synthetic construct
  source 1..28: mol_type = other DNA
aatggtagtacagggcataaccactagg

SEQ ID NO: 21160 - DNA, 28 bp, synthetic construct
  source 1..28: mol_type = other DNA
tgtactgaactgataggtggcctagtgg

SEQ ID NO: 21161 - DNA, 28 bp, synthetic construct
  source 1..28: mol_type = other DNA
gtactttttgtactgaactgataggtgg

SEQ ID NO: 21162 - DNA, 28 bp, synthetic construct
  source 1..28: mol_type = other DNA
gttgtactttttgtactgaactgatagg

SEQ ID NO: 21163 - DNA, 28 bp, synthetic construct
  source 1..28: mol_type = other DNA
acaaaaagtacaaccctgcgcatcatgg

SEQ ID NO: 21164 - DNA, 28 bp, synthetic construct
  source 1..28: mol_type = other DNA
accctgcgcatcatggtgtaaaagctgg

SEQ ID NO: 21165 - DNA, 28 bp, synthetic construct
  source 1..28: mol_type = other DNA
ccctgcgcatcatggtgtaaaagctggg

SEQ ID NO: 21166 - DNA, 28 bp, synthetic construct
  source 1..28: mol_type = other DNA
cctgcgcatcatggtgtaaaagctgggg

SEQ ID NO: 21167 - DNA, 28 bp, synthetic construct
  source 1..28: mol_type = other DNA
catcatggtgtaaaagctggggcctagg

SEQ ID NO: 21168 - DNA, 28 bp, synthetic construct
  source 1..28: mol_type = other DNA
gtgtgagatgcacaatgcgaaacctagg

SEQ ID NO: 21169 - DNA, 28 bp, synthetic construct
  source 1..28: mol_type = other DNA
tttcgcattgtgcatctcacacctatgg

SEQ ID NO: 21170 - DNA, 28 bp, synthetic construct
  source 1..28: mol_type = other DNA
atctcacacctatggaaataacaagagg

SEQ ID NO: 21171 - DNA, 28 bp, synthetic construct
  source 1..28: mol_type = other DNA
attttactcctcttgttatttccatagg

SEQ ID NO: 21172 - DNA, 28 bp, synthetic construct
  source 1..28: mol_type = other DNA
gaaataacaagaggagtaaaatctatgg

SEQ ID NO: 21173 - DNA, 28 bp, synthetic construct
  source 1..28: mol_type = other DNA
ctatggaaatcaacacaccctaagaagg

SEQ ID NO: 21174 - DNA, 28 bp, synthetic construct
  source 1..28: mol_type = other DNA
tggaaatcaacacaccctaagaaggtgg

SEQ ID NO: 21175 - DNA, 28 bp, synthetic construct
  source 1..28: mol_type = other DNA
ggaaatcaacacaccctaagaaggtggg

SEQ ID NO: 21176 - DNA, 28 bp, synthetic construct
  source 1..28: mol_type = other DNA
tcttctgtgagcacccaccttcttaggg

SEQ ID NO: 21177 - DNA, 28 bp, synthetic construct
  source 1..28: mol_type = other DNA
gtcttctgtgagcacccaccttcttagg

SEQ ID NO: 21178 - DNA, 28 bp, synthetic construct
  source 1..28: mol_type = other DNA
aagaaggtgggtgctcacagaagactgg

SEQ ID NO: 21179 - DNA, 28 bp, synthetic construct
  source 1..28: mol_type = other DNA
aagactggtatcaacatttttgtaaagg

SEQ ID NO: 21180 - DNA, 28 bp, synthetic construct
  source 1..28: mol_type = other DNA
actggtatcaacatttttgtaaaggtgg

SEQ ID NO: 21181 - DNA, 28 bp, synthetic construct
  source 1..28: mol_type = other DNA
gtatcaacatttttgtaaaggtggttgg

SEQ ID NO: 21182 - DNA, 28 bp, synthetic construct
  source 1..28: mol_type = other DNA
ggtggttggctgctgagataatgaatgg

SEQ ID NO: 21183 - DNA, 28 bp, synthetic construct
  source 1..28: mol_type = other DNA
tgaatggcaattacaagtccaaatttgg

SEQ ID NO: 21184 - DNA, 28 bp, synthetic construct
  source 1..28: mol_type = other DNA
atggcaattacaagtccaaatttggagg

SEQ ID NO: 21185 - DNA, 28 bp, synthetic construct
  source 1..28: mol_type = other DNA
tggcaattacaagtccaaatttggaggg

SEQ ID NO: 21186 - DNA, 28 bp, synthetic construct
  source 1..28: mol_type = other DNA
taaaaatttcgtttccctccaaatttgg

SEQ ID NO: 21187 - DNA, 28 bp, synthetic construct
  source 1..28: mol_type = other DNA
gagttcgacaatgaagaacccaacatgg

SEQ ID NO: 21188 - DNA, 28 bp, synthetic construct
  source 1..28: mol_type = other DNA
agttcgacaatgaagaacccaacatggg

SEQ ID NO: 21189 - DNA, 28 bp, synthetic construct
  source 1..28: mol_type = other DNA
tgttggtaaacatcaagcccatgttggg

SEQ ID NO: 21190 - DNA, 28 bp, synthetic construct
  source 1..28: mol_type = other DNA
ttgttggtaaacatcaagcccatgttgg

SEQ ID NO: 21191 - DNA, 28 bp, synthetic construct
  source 1..28: mol_type = other DNA
aacatgggcttgatgtttaccaacaagg

SEQ ID NO: 21192 - DNA, 28 bp, synthetic construct
  source 1..28: mol_type = other DNA
ggtgtcatgatttgcaaagccttgttgg

SEQ ID NO: 21193 - DNA, 28 bp, synthetic construct
  source 1..28: mol_type = other DNA
gagatgttggattaagtgtgtagatggg

SEQ ID NO: 21194 - DNA, 28 bp, synthetic construct
  source 1..28: mol_type = other DNA
agagatgttggattaagtgtgtagatgg

SEQ ID NO: 21195 - DNA, 28 bp, synthetic construct
  source 1..28: mol_type = other DNA
gttaaaaatcattcttgagagatgttgg

SEQ ID NO: 21196 - DNA, 28 bp, synthetic construct
  source 1..28: mol_type = other DNA
gaatgatttttaactctcaaagaattgg

SEQ ID NO: 21197 - DNA, 28 bp, synthetic construct
  source 1..28: mol_type = other DNA
taactctcaaagaattggaaagatttgg

SEQ ID NO: 21198 - DNA, 28 bp, synthetic construct
  source 1..28: mol_type = other DNA
attggaaagatttggcctatgaagaagg

SEQ ID NO: 21199 - DNA, 28 bp, synthetic construct
  source 1..28: mol_type = other DNA
ttggaaagatttggcctatgaagaaggg

SEQ ID NO: 21200 - DNA, 28 bp, synthetic construct
  source 1..28: mol_type = other DNA
atagctggttaactcccttcttcatagg

SEQ ID NO: 21201 - DNA, 28 bp, synthetic construct
  source 1..28: mol_type = other DNA
aaagtaacaggtttgggggcatagctgg

SEQ ID NO: 21202 - DNA, 28 bp, synthetic construct
  source 1..28: mol_type = other DNA
gtttgaaacaaagtaacaggtttggggg

SEQ ID NO: 21203 - DNA, 28 bp, synthetic construct
  source 1..28: mol_type = other DNA
ggtttgaaacaaagtaacaggtttgggg

SEQ ID NO: 21204 - DNA, 28 bp, synthetic construct
  source 1..28: mol_type = other DNA
aggtttgaaacaaagtaacaggtttggg

SEQ ID NO: 21205 - DNA, 28 bp, synthetic construct
  source 1..28: mol_type = other DNA
aaggtttgaaacaaagtaacaggtttgg

SEQ ID NO: 21206 - DNA, 28 bp, synthetic construct
  source 1..28: mol_type = other DNA
aggagaaggtttgaaacaaagtaacagg

SEQ ID NO: 21207 - DNA, 28 bp, synthetic construct
  source 1..28: mol_type = other DNA
aaccttctcctttaccaccagacttagg

SEQ ID NO: 21208 - DNA, 28 bp, synthetic construct
  source 1..28: mol_type = other DNA
ttcctaagtctggtggtaaaggagaagg

SEQ ID NO: 21209 - DNA, 28 bp, synthetic construct
  source 1..28: mol_type = other DNA
atatctttcctaagtctggtggtaaagg

SEQ ID NO: 21210 - DNA, 28 bp, synthetic construct
  source 1..28: mol_type = other DNA
tttaccaccagacttaggaaagatatgg

SEQ ID NO: 21211 - DNA, 28 bp, synthetic construct
  source 1..28: mol_type = other DNA
gtcaccatatctttcctaagtctggtgg

SEQ ID NO: 21212 - DNA, 28 bp, synthetic construct
  source 1..28: mol_type = other DNA
tgtgtcaccatatctttcctaagtctgg

SEQ ID NO: 21213 - DNA, 28 bp, synthetic construct
  source 1..28: mol_type = other DNA
gatatggtgacacattcaaaacttgagg

SEQ ID NO: 21214 - DNA, 28 bp, synthetic construct
  source 1..28: mol_type = other DNA
atggtgacacattcaaaacttgaggtgg

SEQ ID NO: 21215 - DNA, 28 bp, synthetic construct
  source 1..28: mol_type = other DNA
aaaacttgaggtggaagaactccagagg

SEQ ID NO: 21216 - DNA, 28 bp, synthetic construct
  source 1..28: mol_type = other DNA
cttgaggtggaagaactccagaggaagg

SEQ ID NO: 21217 - DNA, 28 bp, synthetic construct
  source 1..28: mol_type = other DNA
ttgaggtggaagaactccagaggaaggg

SEQ ID NO: 21218 - DNA, 28 bp, synthetic construct
  source 1..28: mol_type = other DNA
ctccagaggaagggaatccgaaccaagg

SEQ ID NO: 21219 - DNA, 28 bp, synthetic construct
  source 1..28: mol_type = other DNA
atccttggttcggattcccttcctctgg

SEQ ID NO: 21220 - DNA, 28 bp, synthetic construct
  source 1..28: mol_type = other DNA
gggaatccgaaccaaggatgtgccaagg

SEQ ID NO: 21221 - DNA, 28 bp, synthetic construct
  source 1..28: mol_type = other DNA
gaatcaccttggcacatccttggttcgg

SEQ ID NO: 21222 - DNA, 28 bp, synthetic construct
  source 1..28: mol_type = other DNA
ttgacgaatcaccttggcacatccttgg

SEQ ID NO: 21223 - DNA, 28 bp, synthetic construct
  source 1..28: mol_type = other DNA
catatttgttcttgacgaatcaccttgg

SEQ ID NO: 21224 - DNA, 28 bp, synthetic construct
  source 1..28: mol_type = other DNA
caaggtgattcgtcaagaacaaatatgg

SEQ ID NO: 21225 - DNA, 28 bp, synthetic construct
  source 1..28: mol_type = other DNA
tgattcgtcaagaacaaatatggactgg

SEQ ID NO: 21226 - DNA, 28 bp, synthetic construct
  source 1..28: mol_type = other DNA
gattcgtcaagaacaaatatggactggg

SEQ ID NO: 21227 - DNA, 28 bp, synthetic construct
  source 1..28: mol_type = other DNA
attcgtcaagaacaaatatggactgggg

SEQ ID NO: 21228 - DNA, 28 bp, synthetic construct
  source 1..28: mol_type = other DNA
ttcgtcaagaacaaatatggactggggg

SEQ ID NO: 21229 - DNA, 28 bp, synthetic construct
  source 1..28: mol_type = other DNA
gggccaacagttttgaaaaagtaaaagg

SEQ ID NO: 21230 - DNA, 28 bp, synthetic construct
  source 1..28: mol_type = other DNA
tctccttttactttttcaaaactgttgg

SEQ ID NO: 21231 - DNA, 28 bp, synthetic construct
  source 1..28: mol_type = other DNA
taaaaggagaaaacttctaaaatgcagg

SEQ ID NO: 21232 - DNA, 28 bp, synthetic construct
  source 1..28: mol_type = other DNA
aaaaggagaaaacttctaaaatgcaggg

SEQ ID NO: 21233 - DNA, 28 bp, synthetic construct
  source 1..28: mol_type = other DNA
aggagaaaacttctaaaatgcagggtgg

SEQ ID NO: 21234 - DNA, 28 bp, synthetic construct
  source 1..28: mol_type = other DNA
ggagaaaacttctaaaatgcagggtggg

SEQ ID NO: 21235 - DNA, 28 bp, synthetic construct
  source 1..28: mol_type = other DNA
tggtgagctgacagcaacatggcgaagg

SEQ ID NO: 21236 - DNA, 28 bp, synthetic construct
  source 1..28: mol_type = other DNA
cttagttggtgagctgacagcaacatgg

SEQ ID NO: 21237 - DNA, 28 bp, synthetic construct
  source 1..28: mol_type = other DNA
agcaagacacactcgcactcttagttgg

SEQ ID NO: 21238 - DNA, 28 bp, synthetic construct
  source 1..28: mol_type = other DNA
aactaagagtgcgagtgtgtcttgctgg

SEQ ID NO: 21239 - DNA, 28 bp, synthetic construct
  source 1..28: mol_type = other DNA
actaagagtgcgagtgtgtcttgctggg

SEQ ID NO: 21240 - DNA, 28 bp, synthetic construct
  source 1..28: mol_type = other DNA
gtgtcttgctgggcccattttcccatgg

SEQ ID NO: 21241 - DNA, 28 bp, synthetic construct
  source 1..28: mol_type = other DNA
ggcccattttcccatggtctgtagaagg

SEQ ID NO: 21242 - DNA, 28 bp, synthetic construct
  source 1..28: mol_type = other DNA
cgccttctacagaccatgggaaaatggg

SEQ ID NO: 21243 - DNA, 28 bp, synthetic construct
  source 1..28: mol_type = other DNA
gcgccttctacagaccatgggaaaatgg

SEQ ID NO: 21244 - DNA, 28 bp, synthetic construct
  source 1..28: mol_type = other DNA
cttcacagcgccttctacagaccatggg

SEQ ID NO: 21245 - DNA, 28 bp, synthetic construct
  source 1..28: mol_type = other DNA
gcttcacagcgccttctacagaccatgg

SEQ ID NO: 21246 - DNA, 28 bp, synthetic construct
  source 1..28: mol_type = other DNA
ctgtgaagcacatcctgttctagctcgg

SEQ ID NO: 21247 - DNA, 28 bp, synthetic construct
  source 1..28: mol_type = other DNA
tgtgaagcacatcctgttctagctcggg

SEQ ID NO: 21248 - DNA, 28 bp, synthetic construct
  source 1..28: mol_type = other DNA
gtgaagcacatcctgttctagctcgggg

SEQ ID NO: 21249 - DNA, 28 bp, synthetic construct
  source 1..28: mol_type = other DNA
tgaagcacatcctgttctagctcggggg

SEQ ID NO: 21250 - DNA, 28 bp, synthetic construct
  source 1..28: mol_type = other DNA
gggggaagggcccccgagctagaacagg

SEQ ID NO: 21251 - DNA, 28 bp, synthetic construct
  source 1..28: mol_type = other DNA
ctgggtaaggctgcagaggggggaaggg

SEQ ID NO: 21252 - DNA, 28 bp, synthetic construct
  source 1..28: mol_type = other DNA
actgggtaaggctgcagaggggggaagg

SEQ ID NO: 21253 - DNA, 28 bp, synthetic construct
  source 1..28: mol_type = other DNA
ctgcactgggtaaggctgcagagggggg

SEQ ID NO: 21254 - DNA, 28 bp, synthetic construct
  source 1..28: mol_type = other DNA
tctgcactgggtaaggctgcagaggggg

SEQ ID NO: 21255 - DNA, 28 bp, synthetic construct
  source 1..28: mol_type = other DNA
ctctgcactgggtaaggctgcagagggg

SEQ ID NO: 21256 - DNA, 28 bp, synthetic construct
  source 1..28: mol_type = other DNA
tctctgcactgggtaaggctgcagaggg

SEQ ID NO: 21257 - DNA, 28 bp, synthetic construct
  source 1..28: mol_type = other DNA
ttctctgcactgggtaaggctgcagagg

SEQ ID NO: 21258 - DNA, 28 bp, synthetic construct
  source 1..28: mol_type = other DNA
gggggcgcattctctgcactgggtaagg

SEQ ID NO: 21259 - DNA, 28 bp, synthetic construct
  source 1..28: mol_type = other DNA
cagtagggggcgcattctctgcactggg

SEQ ID NO: 21260 - DNA, 28 bp, synthetic construct
  source 1..28: mol_type = other DNA
tcagtagggggcgcattctctgcactgg

SEQ ID NO: 21261 - DNA, 28 bp, synthetic construct
  source 1..28: mol_type = other DNA
ggcgatgagtgttggagtcagtaggggg

SEQ ID NO: 21262 - DNA, 28 bp, synthetic construct
  source 1..28: mol_type = other DNA
aggcgatgagtgttggagtcagtagggg

SEQ ID NO: 21263 - DNA, 28 bp, synthetic construct
  source 1..28: mol_type = other DNA
aaggcgatgagtgttggagtcagtaggg

SEQ ID NO: 21264 - DNA, 28 bp, synthetic construct
  source 1..28: mol_type = other DNA
aaaggcgatgagtgttggagtcagtagg

SEQ ID NO: 21265 - DNA, 28 bp, synthetic construct
  source 1..28: mol_type = other DNA
caagtcggctaaaggcgatgagtgttgg

SEQ ID NO: 21266 - DNA, 28 bp, synthetic construct
  source 1..28: mol_type = other DNA
caacactcatcgcctttagccgacttgg

SEQ ID NO: 21267 - DNA, 28 bp, synthetic construct
  source 1..28: mol_type = other DNA
tcatcgcctttagccgacttggctgcgg

SEQ ID NO: 21268 - DNA, 28 bp, synthetic construct
  source 1..28: mol_type = other DNA
aatgcaccgcagccaagtcggctaaagg

SEQ ID NO: 21269 - DNA, 28 bp, synthetic construct
  source 1..28: mol_type = other DNA
tagccgacttggctgcggtgcattttgg

SEQ ID NO: 21270 - DNA, 28 bp, synthetic construct
  source 1..28: mol_type = other DNA
agccgacttggctgcggtgcattttggg

SEQ ID NO: 21271 - DNA, 28 bp, synthetic construct
  source 1..28: mol_type = other DNA
cacccaaaatgcaccgcagccaagtcgg

SEQ ID NO: 21272 - DNA, 28 bp, synthetic construct
  source 1..28: mol_type = other DNA
cgacttggctgcggtgcattttgggtgg

SEQ ID NO: 21273 - DNA, 28 bp, synthetic construct
  source 1..28: mol_type = other DNA
gacttggctgcggtgcattttgggtggg

SEQ ID NO: 21274 - DNA, 28 bp, synthetic construct
  source 1..28: mol_type = other DNA
acttggctgcggtgcattttgggtgggg

SEQ ID NO: 21275 - DNA, 28 bp, synthetic construct
  source 1..28: mol_type = other DNA
cttggctgcggtgcattttgggtggggg

SEQ ID NO: 21276 - DNA, 28 bp, synthetic construct
  source 1..28: mol_type = other DNA
gctgcggtgcattttgggtgggggctgg

SEQ ID NO: 21277 - DNA, 28 bp, synthetic construct
  source 1..28: mol_type = other DNA
tgggtgggggctggtattttctccatgg

SEQ ID NO: 21278 - DNA, 28 bp, synthetic construct
  source 1..28: mol_type = other DNA
cattgttgcttctggtttatggccatgg

SEQ ID NO: 21279 - DNA, 28 bp, synthetic construct
  source 1..28: mol_type = other DNA
aatctgcattgttgcttctggtttatgg

SEQ ID NO: 21280 - DNA, 28 bp, synthetic construct
  source 1..28: mol_type = other DNA
ctttagaaatctgcattgttgcttctgg

SEQ ID NO: 21281 - DNA, 28 bp, synthetic construct
  source 1..28: mol_type = other DNA
cagaatgaaaaaaaaaaaaatctcttgg

SEQ ID NO: 21282 - DNA, 28 bp, synthetic construct
  source 1..28: mol_type = other DNA
gagatttttttttttttcattctgaagg

SEQ ID NO: 21283 - DNA, 28 bp, synthetic construct
  source 1..28: mol_type = other DNA
ttttcattctgaaggttcaagatacagg

SEQ ID NO: 21284 - DNA, 28 bp, synthetic construct
  source 1..28: mol_type = other DNA
tcaagatacaggcacaagaagcatcagg

SEQ ID NO: 21285 - DNA, 28 bp, synthetic construct
  source 1..28: mol_type = other DNA
caagatacaggcacaagaagcatcaggg

SEQ ID NO: 21286 - DNA, 28 bp, synthetic construct
  source 1..28: mol_type = other DNA
atacaggcacaagaagcatcagggatgg

SEQ ID NO: 21287 - DNA, 28 bp, synthetic construct
  source 1..28: mol_type = other DNA
tacaggcacaagaagcatcagggatggg

SEQ ID NO: 21288 - DNA, 28 bp, synthetic construct
  source 1..28: mol_type = other DNA
cacaagaagcatcagggatgggaactgg

SEQ ID NO: 21289 - DNA, 28 bp, synthetic construct
  source 1..28: mol_type = other DNA
acaagaagcatcagggatgggaactggg

SEQ ID NO: 21290 - DNA, 28 bp, synthetic construct
  source 1..28: mol_type = other DNA
gcatcagggatgggaactgggtgtgtgg

SEQ ID NO: 21291 - DNA, 28 bp, synthetic construct
  source 1..28: mol_type = other DNA
catcagggatgggaactgggtgtgtggg

SEQ ID NO: 21292 - DNA, 28 bp, synthetic construct
  source 1..28: mol_type = other DNA
atcagggatgggaactgggtgtgtgggg

SEQ ID NO: 21293 - DNA, 28 bp, synthetic construct
  source 1..28: mol_type = other DNA
gggatgggaactgggtgtgtggggatgg

SEQ ID NO: 21294 - DNA, 28 bp, synthetic construct
  source 1..28: mol_type = other DNA
taacatgacaaacacagaaacagtttgg

SEQ ID NO: 21295 - DNA, 28 bp, synthetic construct
  source 1..28: mol_type = other DNA
ccctcctaagcctttgtctgtgaaatgg

SEQ ID NO: 21296 - DNA, 28 bp, synthetic construct
  source 1..28: mol_type = other DNA
cctcctaagcctttgtctgtgaaatggg

SEQ ID NO: 21297 - DNA, 28 bp, synthetic construct
  source 1..28: mol_type = other DNA
ctcctaagcctttgtctgtgaaatgggg

SEQ ID NO: 21298 - DNA, 28 bp, synthetic construct
  source 1..28: mol_type = other DNA
aaccccatttcacagacaaaggcttagg

SEQ ID NO: 21299 - DNA, 28 bp, synthetic construct
  source 1..28: mol_type = other DNA
agcctttgtctgtgaaatggggttatgg

SEQ ID NO: 21300 - DNA, 28 bp, synthetic construct
  source 1..28: mol_type = other DNA
tgccataaccccatttcacagacaaagg

SEQ ID NO: 21301 - DNA, 28 bp, synthetic construct
  source 1..28: mol_type = other DNA
tatggcaagaagtgtccagagtaactgg

SEQ ID NO: 21302 - DNA, 28 bp, synthetic construct
  source 1..28: mol_type = other DNA
atcttcttgaatttaccagttactctgg

SEQ ID NO: 21303 - DNA, 28 bp, synthetic construct
  source 1..28: mol_type = other DNA
aagaagattaagaagacttcgtgtgtgg

SEQ ID NO: 21304 - DNA, 28 bp, synthetic construct
  source 1..28: mol_type = other DNA
agaagattaagaagacttcgtgtgtggg

SEQ ID NO: 21305 - DNA, 28 bp, synthetic construct
  source 1..28: mol_type = other DNA
gaagattaagaagacttcgtgtgtgggg

SEQ ID NO: 21306 - DNA, 28 bp, synthetic construct
  source 1..28: mol_type = other DNA
aagattaagaagacttcgtgtgtggggg

SEQ ID NO: 21307 - DNA, 28 bp, synthetic construct
  source 1..28: mol_type = other DNA
agattaagaagacttcgtgtgtgggggg

SEQ ID NO: 21308 - DNA, 28 bp, synthetic construct
  source 1..28: mol_type = other DNA
ttcgtgtgtggggggtgtgtgtgtgtgg

SEQ ID NO: 21309 - DNA, 28 bp, synthetic construct
  source 1..28: mol_type = other DNA
ggggggtgtgtgtgtgtggctaaaaagg

SEQ ID NO: 21310 - DNA, 28 bp, synthetic construct
  source 1..28: mol_type = other DNA
aaaaaggatatcagacctagagtcttgg

SEQ ID NO: 21311 - DNA, 28 bp, synthetic construct
  source 1..28: mol_type = other DNA
gatatcagacctagagtcttggtcttgg

SEQ ID NO: 21312 - DNA, 28 bp, synthetic construct
  source 1..28: mol_type = other DNA
atatcagacctagagtcttggtcttggg

SEQ ID NO: 21313 - DNA, 28 bp, synthetic construct
  source 1..28: mol_type = other DNA
ctcttctgcccaagaccaagactctagg

SEQ ID NO: 21314 - DNA, 28 bp, synthetic construct
  source 1..28: mol_type = other DNA
ctagagtcttggtcttgggcagaagagg

SEQ ID NO: 21315 - DNA, 28 bp, synthetic construct
  source 1..28: mol_type = other DNA
agcaatcgcgccttttccagcagacagg

SEQ ID NO: 21316 - DNA, 28 bp, synthetic construct
  source 1..28: mol_type = other DNA
gcaatcgcgccttttccagcagacaggg

SEQ ID NO: 21317 - DNA, 28 bp, synthetic construct
  source 1..28: mol_type = other DNA
cgccttttccagcagacagggatcaagg

SEQ ID NO: 21318 - DNA, 28 bp, synthetic construct
  source 1..28: mol_type = other DNA
aaccttgatccctgtctgctggaaaagg

SEQ ID NO: 21319 - DNA, 28 bp, synthetic construct
  source 1..28: mol_type = other DNA
ttttccagcagacagggatcaaggttgg

SEQ ID NO: 21320 - DNA, 28 bp, synthetic construct
  source 1..28: mol_type = other DNA
tttccagcagacagggatcaaggttggg

SEQ ID NO: 21321 - DNA, 28 bp, synthetic construct
  source 1..28: mol_type = other DNA
ttccagcagacagggatcaaggttgggg

SEQ ID NO: 21322 - DNA, 28 bp, synthetic construct
  source 1..28: mol_type = other DNA
tccagcagacagggatcaaggttggggg

SEQ ID NO: 21323 - DNA, 28 bp, synthetic construct
  source 1..28: mol_type = other DNA
ccagcagacagggatcaaggttgggggg

SEQ ID NO: 21324 - DNA, 28 bp, synthetic construct
  source 1..28: mol_type = other DNA
cagcagacagggatcaaggttggggggg

SEQ ID NO: 21325 - DNA, 28 bp, synthetic construct
  source 1..28: mol_type = other DNA
cagacagggatcaaggttgggggggagg

SEQ ID NO: 21326 - DNA, 28 bp, synthetic construct
  source 1..28: mol_type = other DNA
agacagggatcaaggttgggggggaggg

SEQ ID NO: 21327 - DNA, 28 bp, synthetic construct
  source 1..28: mol_type = other DNA
gacagggatcaaggttgggggggagggg

SEQ ID NO: 21328 - DNA, 28 bp, synthetic construct
  source 1..28: mol_type = other DNA
gggatcaaggttgggggggaggggaagg

SEQ ID NO: 21329 - DNA, 28 bp, synthetic construct
  source 1..28: mol_type = other DNA
tcaaggttgggggggaggggaaggcagg

SEQ ID NO: 21330 - DNA, 28 bp, synthetic construct
  source 1..28: mol_type = other DNA
ggttgggggggaggggaaggcaggcagg

SEQ ID NO: 21331 - DNA, 28 bp, synthetic construct
  source 1..28: mol_type = other DNA
aggggaaggcaggcaggcctcccagagg

SEQ ID NO: 21332 - DNA, 28 bp, synthetic construct
  source 1..28: mol_type = other DNA
aggcaggcctcccagaggaaagaagagg

SEQ ID NO: 21333 - DNA, 28 bp, synthetic construct
  source 1..28: mol_type = other DNA
gtattcacctcttctttcctctgggagg

SEQ ID NO: 21334 - DNA, 28 bp, synthetic construct
  source 1..28: mol_type = other DNA
ctcgtattcacctcttctttcctctggg

SEQ ID NO: 21335 - DNA, 28 bp, synthetic construct
  source 1..28: mol_type = other DNA
actcgtattcacctcttctttcctctgg

SEQ ID NO: 21336 - DNA, 28 bp, synthetic construct
  source 1..28: mol_type = other DNA
agatttttttttaatgtaatgaatgggg

SEQ ID NO: 21337 - DNA, 28 bp, synthetic construct
  source 1..28: mol_type = other DNA
aagatttttttttaatgtaatgaatggg

SEQ ID NO: 21338 - DNA, 28 bp, synthetic construct
  source 1..28: mol_type = other DNA
aaagatttttttttaatgtaatgaatgg

SEQ ID NO: 21339 - DNA, 28 bp, synthetic construct
  source 1..28: mol_type = other DNA
aaaaaaaaatctttttgcagctctctgg

SEQ ID NO: 21340 - DNA, 28 bp, synthetic construct
  source 1..28: mol_type = other DNA
aactttgcagtaaggtggtagaaaatgg

SEQ ID NO: 21341 - DNA, 28 bp, synthetic construct
  source 1..28: mol_type = other DNA
attttctaccaccttactgcaaagttgg

SEQ ID NO: 21342 - DNA, 28 bp, synthetic construct
  source 1..28: mol_type = other DNA
ttttctaccaccttactgcaaagttggg

SEQ ID NO: 21343 - DNA, 28 bp, synthetic construct
  source 1..28: mol_type = other DNA
tttctaccaccttactgcaaagttgggg

SEQ ID NO: 21344 - DNA, 28 bp, synthetic construct
  source 1..28: mol_type = other DNA
tctgagccccaactttgcagtaaggtgg

SEQ ID NO: 21345 - DNA, 28 bp, synthetic construct
  source 1..28: mol_type = other DNA
cattctgagccccaactttgcagtaagg

SEQ ID NO: 21346 - DNA, 28 bp, synthetic construct
  source 1..28: mol_type = other DNA
agttggggctcagaatgttcgaaagagg

SEQ ID NO: 21347 - DNA, 28 bp, synthetic construct
  source 1..28: mol_type = other DNA
agaatgttcgaaagaggtgctgaccagg

SEQ ID NO: 21348 - DNA, 28 bp, synthetic construct
  source 1..28: mol_type = other DNA
gaggtgctgaccaggcagctgagattgg

SEQ ID NO: 21349 - DNA, 28 bp, synthetic construct
  source 1..28: mol_type = other DNA
aggtgctgaccaggcagctgagattggg

SEQ ID NO: 21350 - DNA, 28 bp, synthetic construct
  source 1..28: mol_type = other DNA
ggtgctgaccaggcagctgagattgggg

SEQ ID NO: 21351 - DNA, 28 bp, synthetic construct
  source 1..28: mol_type = other DNA
gaccaggcagctgagattggggaaaagg

SEQ ID NO: 21352 - DNA, 28 bp, synthetic construct
  source 1..28: mol_type = other DNA
accaggcagctgagattggggaaaaggg

SEQ ID NO: 21353 - DNA, 28 bp, synthetic construct
  source 1..28: mol_type = other DNA
tcccttttccccaatctcagctgcctgg

SEQ ID NO: 21354 - DNA, 28 bp, synthetic construct
  source 1..28: mol_type = other DNA
ggcagctgagattggggaaaagggatgg

SEQ ID NO: 21355 - DNA, 28 bp, synthetic construct
  source 1..28: mol_type = other DNA
agctgagattggggaaaagggatggtgg

SEQ ID NO: 21356 - DNA, 28 bp, synthetic construct
  source 1..28: mol_type = other DNA
ggggaaaagggatggtggtgaactgtgg

SEQ ID NO: 21357 - DNA, 28 bp, synthetic construct
  source 1..28: mol_type = other DNA
aaagggatggtggtgaactgtggtcagg

SEQ ID NO: 21358 - DNA, 28 bp, synthetic construct
  source 1..28: mol_type = other DNA
ggtggtgaactgtggtcaggataagagg

SEQ ID NO: 21359 - DNA, 28 bp, synthetic construct
  source 1..28: mol_type = other DNA
actgtggtcaggataagaggaaagctgg

SEQ ID NO: 21360 - DNA, 28 bp, synthetic construct
  source 1..28: mol_type = other DNA
tggtcaggataagaggaaagctggcagg

SEQ ID NO: 21361 - DNA, 28 bp, synthetic construct
  source 1..28: mol_type = other DNA
caggataagaggaaagctggcaggttgg

SEQ ID NO: 21362 - DNA, 28 bp, synthetic construct
  source 1..28: mol_type = other DNA
aggataagaggaaagctggcaggttggg

SEQ ID NO: 21363 - DNA, 28 bp, synthetic construct
  source 1..28: mol_type = other DNA
ggataagaggaaagctggcaggttgggg

SEQ ID NO: 21364 - DNA, 28 bp, synthetic construct
  source 1..28: mol_type = other DNA
aggaaagctggcaggttggggaagaagg

SEQ ID NO: 21365 - DNA, 28 bp, synthetic construct
  source 1..28: mol_type = other DNA
gcaggttggggaagaaggattgcacagg

SEQ ID NO: 21366 - DNA, 28 bp, synthetic construct
  source 1..28: mol_type = other DNA
caggttggggaagaaggattgcacaggg

SEQ ID NO: 21367 - DNA, 28 bp, synthetic construct
  source 1..28: mol_type = other DNA
aggttggggaagaaggattgcacagggg

SEQ ID NO: 21368 - DNA, 28 bp, synthetic construct
  source 1..28: mol_type = other DNA
ttggggaagaaggattgcacaggggagg

SEQ ID NO: 21369 - DNA, 28 bp, synthetic construct
  source 1..28: mol_type = other DNA
gggggggcggggagcatgcatggcatgg

SEQ ID NO: 21370 - DNA, 28 bp, synthetic construct
  source 1..28: mol_type = other DNA
ggttggggggggcggggagcatgcatgg

SEQ ID NO: 21371 - DNA, 28 bp, synthetic construct
  source 1..28: mol_type = other DNA
aaggtaagcccggcgccgccgcgcgcgg

SEQ ID NO: 21372 - DNA, 28 bp, synthetic construct
  source 1..28: mol_type = other DNA
cggcggcgccgggcttaccttgactcgg

SEQ ID NO: 21373 - DNA, 28 bp, synthetic construct
  source 1..28: mol_type = other DNA
ccgggcttaccttgactcggcctcgagg

SEQ ID NO: 21374 - DNA, 28 bp, synthetic construct
  source 1..28: mol_type = other DNA
ccttgactcggcctcgaggcgcgcgcgg

SEQ ID NO: 21375 - DNA, 28 bp, synthetic construct
  source 1..28: mol_type = other DNA
cttgactcggcctcgaggcgcgcgcggg

SEQ ID NO: 21376 - DNA, 28 bp, synthetic construct
  source 1..28: mol_type = other DNA
ttgactcggcctcgaggcgcgcgcgggg

SEQ ID NO: 21377 - DNA, 28 bp, synthetic construct
  source 1..28: mol_type = other DNA
ctcggcctcgaggcgcgcgcggggccgg

SEQ ID NO: 21378 - DNA, 28 bp, synthetic construct
  source 1..28: mol_type = other DNA
gcacgccggccccgcgcgcgcctcgagg

SEQ ID NO: 21379 - DNA, 28 bp, synthetic construct
  source 1..28: mol_type = other DNA
gaggcgcgcgcggggccggcgtgctcgg

SEQ ID NO: 21380 - DNA, 28 bp, synthetic construct
  source 1..28: mol_type = other DNA
aggcgcgcgcggggccggcgtgctcggg

SEQ ID NO: 21381 - DNA, 28 bp, synthetic construct
  source 1..28: mol_type = other DNA
ggcgcgcgcggggccggcgtgctcgggg

SEQ ID NO: 21382 - DNA, 28 bp, synthetic construct
  source 1..28: mol_type = other DNA
gcgcgcgcggggccggcgtgctcggggg

SEQ ID NO: 21383 - DNA, 28 bp, synthetic construct
  source 1..28: mol_type = other DNA
gcgcggggccggcgtgctcgggggccgg

SEQ ID NO: 21384 - DNA, 28 bp, synthetic construct
  source 1..28: mol_type = other DNA
gccggcgtgctcgggggccggacagcgg

SEQ ID NO: 21385 - DNA, 28 bp, synthetic construct
  source 1..28: mol_type = other DNA
gccgctgtccggcccccgagcacgccgg

SEQ ID NO: 21386 - DNA, 28 bp, synthetic construct
  source 1..28: mol_type = other DNA
ggcgtgctcgggggccggacagcggcgg

SEQ ID NO: 21387 - DNA, 28 bp, synthetic construct
  source 1..28: mol_type = other DNA
gtgctcgggggccggacagcggcggcgg

SEQ ID NO: 21388 - DNA, 28 bp, synthetic construct
  source 1..28: mol_type = other DNA
ctcgggggccggacagcggcggcggcgg

SEQ ID NO: 21389 - DNA, 28 bp, synthetic construct
  source 1..28: mol_type = other DNA
gggggccggacagcggcggcggcggcgg

SEQ ID NO: 21390 - DNA, 28 bp, synthetic construct
  source 1..28: mol_type = other DNA
ggggccggacagcggcggcggcggcggg

SEQ ID NO: 21391 - DNA, 28 bp, synthetic construct
  source 1..28: mol_type = other DNA
gccggacagcggcggcggcggcgggcgg

SEQ ID NO: 21392 - DNA, 28 bp, synthetic construct
  source 1..28: mol_type = other DNA
tccgcccgccgccgccgccgctgtccgg

SEQ ID NO: 21393 - DNA, 28 bp, synthetic construct
  source 1..28: mol_type = other DNA
gacagcggcggcggcggcgggcggatgg

SEQ ID NO: 21394 - DNA, 28 bp, synthetic construct
  source 1..28: mol_type = other DNA
agcggcggcggcggcgggcggatggcgg

SEQ ID NO: 21395 - DNA, 28 bp, synthetic construct
  source 1..28: mol_type = other DNA
ggcggcggcggcgggcggatggcggcgg

SEQ ID NO: 21396 - DNA, 28 bp, synthetic construct
  source 1..28: mol_type = other DNA
cggcggcgggcggatggcggcggcacgg

SEQ ID NO: 21397 - DNA, 28 bp, synthetic construct
  source 1..28: mol_type = other DNA
cggcgggcggatggcggcggcacggcgg

SEQ ID NO: 21398 - DNA, 28 bp, synthetic construct
  source 1..28: mol_type = other DNA
cgggcggatggcggcggcacggcggtgg

SEQ ID NO: 21399 - DNA, 28 bp, synthetic construct
  source 1..28: mol_type = other DNA
gcggatggcggcggcacggcggtggcgg

SEQ ID NO: 21400 - DNA, 28 bp, synthetic construct
  source 1..28: mol_type = other DNA
ggcggcggcacggcggtggcggcagcgg

SEQ ID NO: 21401 - DNA, 28 bp, synthetic construct
  source 1..28: mol_type = other DNA
gcggcggcacggcggtggcggcagcggg

SEQ ID NO: 21402 - DNA, 28 bp, synthetic construct
  source 1..28: mol_type = other DNA
cggcggcacggcggtggcggcagcgggg

SEQ ID NO: 21403 - DNA, 28 bp, synthetic construct
  source 1..28: mol_type = other DNA
cggcacggcggtggcggcagcggggagg

SEQ ID NO: 21404 - DNA, 28 bp, synthetic construct
  source 1..28: mol_type = other DNA
ggcacggcggtggcggcagcggggaggg

SEQ ID NO: 21405 - DNA, 28 bp, synthetic construct
  source 1..28: mol_type = other DNA
gtggcggcagcggggagggcgcgcccgg

SEQ ID NO: 21406 - DNA, 28 bp, synthetic construct
  source 1..28: mol_type = other DNA
tggcggcagcggggagggcgcgcccggg

SEQ ID NO: 21407 - DNA, 28 bp, synthetic construct
  source 1..28: mol_type = other DNA
ggcggcagcggggagggcgcgcccgggg

SEQ ID NO: 21408 - DNA, 28 bp, synthetic construct
  source 1..28: mol_type = other DNA
gcgcgcccggggcctcgtcgcgctccgg

SEQ ID NO: 21409 - DNA, 28 bp, synthetic construct
  source 1..28: mol_type = other DNA
cccggggcctcgtcgcgctccggctcgg

SEQ ID NO: 21410 - DNA, 28 bp, synthetic construct
  source 1..28: mol_type = other DNA
gccgagccggagcgcgacgaggccccgg

SEQ ID NO: 21411 - DNA, 28 bp, synthetic construct
  source 1..28: mol_type = other DNA
ggggcctcgtcgcgctccggctcggcgg

SEQ ID NO: 21412 - DNA, 28 bp, synthetic construct
  source 1..28: mol_type = other DNA
gagtccgccgagccggagcgcgacgagg

SEQ ID NO: 21413 - DNA, 28 bp, synthetic construct
  source 1..28: mol_type = other DNA
cgtcgcgctccggctcggcggactccgg

SEQ ID NO: 21414 - DNA, 28 bp, synthetic construct
  source 1..28: mol_type = other DNA
cggcgcgagccggagtccgccgagccgg

SEQ ID NO: 21415 - DNA, 28 bp, synthetic construct
  source 1..28: mol_type = other DNA
gctcggcggactccggctcgcgccgcgg

SEQ ID NO: 21416 - DNA, 28 bp, synthetic construct
  source 1..28: mol_type = other DNA
cggactccggctcgcgccgcggccgcgg

SEQ ID NO: 21417 - DNA, 28 bp, synthetic construct
  source 1..28: mol_type = other DNA
ggactccggctcgcgccgcggccgcggg

SEQ ID NO: 21418 - DNA, 28 bp, synthetic construct
  source 1..28: mol_type = other DNA
cagcacccgcggccgcggcgcgagccgg

SEQ ID NO: 21419 - DNA, 28 bp, synthetic construct
  source 1..28: mol_type = other DNA
ctcgcgccgcggccgcgggtgctgccgg

SEQ ID NO: 21420 - DNA, 28 bp, synthetic construct
  source 1..28: mol_type = other DNA
tcgcgccgcggccgcgggtgctgccggg

SEQ ID NO: 21421 - DNA, 28 bp, synthetic construct
  source 1..28: mol_type = other DNA
cgcgccgcggccgcgggtgctgccgggg

SEQ ID NO: 21422 - DNA, 28 bp, synthetic construct
  source 1..28: mol_type = other DNA
gcgccgcggccgcgggtgctgccggggg

SEQ ID NO: 21423 - DNA, 28 bp, synthetic construct
  source 1..28: mol_type = other DNA
cgccgcggccgcgggtgctgccgggggg

SEQ ID NO: 21424 - DNA, 28 bp, synthetic construct
  source 1..28: mol_type = other DNA
cgccccccggcagcacccgcggccgcgg

SEQ ID NO: 21425 - DNA, 28 bp, synthetic construct
  source 1..28: mol_type = other DNA
cggccgcgggtgctgccggggggcgcgg

SEQ ID NO: 21426 - DNA, 28 bp, synthetic construct
  source 1..28: mol_type = other DNA
ccgcgggtgctgccggggggcgcggcgg

SEQ ID NO: 21427 - DNA, 28 bp, synthetic construct
  source 1..28: mol_type = other DNA
cgcgggtgctgccggggggcgcggcggg

SEQ ID NO: 21428 - DNA, 28 bp, synthetic construct
  source 1..28: mol_type = other DNA
gctctgctgcgcccgccgcgccccccgg

SEQ ID NO: 21429 - DNA, 28 bp, synthetic construct
  source 1..28: mol_type = other DNA
ggggggcgcggcgggcgcagcagagcgg

SEQ ID NO: 21430 - DNA, 28 bp, synthetic construct
  source 1..28: mol_type = other DNA
gggcgcggcgggcgcagcagagcggcgg

SEQ ID NO: 21431 - DNA, 28 bp, synthetic construct
  source 1..28: mol_type = other DNA
ggcgcggcgggcgcagcagagcggcggg

SEQ ID NO: 21432 - DNA, 28 bp, synthetic construct
  source 1..28: mol_type = other DNA
gcggcgggcgcagcagagcggcgggcgg

SEQ ID NO: 21433 - DNA, 28 bp, synthetic construct
  source 1..28: mol_type = other DNA
gcgggcgcagcagagcggcgggcggcgg

SEQ ID NO: 21434 - DNA, 28 bp, synthetic construct
  source 1..28: mol_type = other DNA
ggcgcagcagagcggcgggcggcggcgg

SEQ ID NO: 21435 - DNA, 28 bp, synthetic construct
  source 1..28: mol_type = other DNA
ggcgggcggcggcggcgtcgtcgagcgg

SEQ ID NO: 21436 - DNA, 28 bp, synthetic construct
  source 1..28: mol_type = other DNA
cggcgtcgtcgagcggtgcagacaaagg

SEQ ID NO: 21437 - DNA, 28 bp, synthetic construct
  source 1..28: mol_type = other DNA
cgtcgtcgagcggtgcagacaaaggagg

SEQ ID NO: 21438 - DNA, 28 bp, synthetic construct
  source 1..28: mol_type = other DNA
gtcgtcgagcggtgcagacaaaggaggg

SEQ ID NO: 21439 - DNA, 28 bp, synthetic construct
  source 1..28: mol_type = other DNA
tcgtcgagcggtgcagacaaaggagggg

SEQ ID NO: 21440 - DNA, 28 bp, synthetic construct
  source 1..28: mol_type = other DNA
tcgagcggtgcagacaaaggaggggcgg

SEQ ID NO: 21441 - DNA, 28 bp, synthetic construct
  source 1..28: mol_type = other DNA
agcggtgcagacaaaggaggggcggagg

SEQ ID NO: 21442 - DNA, 28 bp, synthetic construct
  source 1..28: mol_type = other DNA
gcggtgcagacaaaggaggggcggaggg

SEQ ID NO: 21443 - DNA, 28 bp, synthetic construct
  source 1..28: mol_type = other DNA
gtgcagacaaaggaggggcggagggagg

SEQ ID NO: 21444 - DNA, 28 bp, synthetic construct
  source 1..28: mol_type = other DNA
acaaaggaggggcggagggaggagacgg

SEQ ID NO: 21445 - DNA, 28 bp, synthetic construct
  source 1..28: mol_type = other DNA
aaggaggggcggagggaggagacggagg

SEQ ID NO: 21446 - DNA, 28 bp, synthetic construct
  source 1..28: mol_type = other DNA
aggaggggcggagggaggagacggaggg

SEQ ID NO: 21447 - DNA, 28 bp, synthetic construct
  source 1..28: mol_type = other DNA
gggcggagggaggagacggagggtgtgg

SEQ ID NO: 21448 - DNA, 28 bp, synthetic construct
  source 1..28: mol_type = other DNA
ggcggagggaggagacggagggtgtggg

SEQ ID NO: 21449 - DNA, 28 bp, synthetic construct
  source 1..28: mol_type = other DNA
agggaggagacggagggtgtgggagagg

SEQ ID NO: 21450 - DNA, 28 bp, synthetic construct
  source 1..28: mol_type = other DNA
gaggagacggagggtgtgggagaggcgg

SEQ ID NO: 21451 - DNA, 28 bp, synthetic construct
  source 1..28: mol_type = other DNA
gagggtgtgggagaggcggcttcaccgg

SEQ ID NO: 21452 - DNA, 28 bp, synthetic construct
  source 1..28: mol_type = other DNA
tgtgggagaggcggcttcaccggcgcgg

SEQ ID NO: 21453 - DNA, 28 bp, synthetic construct
  source 1..28: mol_type = other DNA
gtgggagaggcggcttcaccggcgcggg

SEQ ID NO: 21454 - DNA, 28 bp, synthetic construct
  source 1..28: mol_type = other DNA
ggagaggcggcttcaccggcgcgggcgg

SEQ ID NO: 21455 - DNA, 28 bp, synthetic construct
  source 1..28: mol_type = other DNA
gaggcggcttcaccggcgcgggcggcgg

SEQ ID NO: 21456 - DNA, 28 bp, synthetic construct
  source 1..28: mol_type = other DNA
gcggcttcaccggcgcgggcggcggcgg

SEQ ID NO: 21457 - DNA, 28 bp, synthetic construct
  source 1..28: mol_type = other DNA
ggagcgcggccgccgccgcccgcgccgg

SEQ ID NO: 21458 - DNA, 28 bp, synthetic construct
  source 1..28: mol_type = other DNA
ccgcgctcctctcgctcctcagcagcgg

SEQ ID NO: 21459 - DNA, 28 bp, synthetic construct
  source 1..28: mol_type = other DNA
cgcgctcctctcgctcctcagcagcggg

SEQ ID NO: 21460 - DNA, 28 bp, synthetic construct
  source 1..28: mol_type = other DNA
gcgctcctctcgctcctcagcagcgggg

SEQ ID NO: 21461 - DNA, 28 bp, synthetic construct
  source 1..28: mol_type = other DNA
tcggtccccgctgctgaggagcgagagg

SEQ ID NO: 21462 - DNA, 28 bp, synthetic construct
  source 1..28: mol_type = other DNA
gctcctcagcagcggggaccgagagagg

SEQ ID NO: 21463 - DNA, 28 bp, synthetic construct
  source 1..28: mol_type = other DNA
ctcctcagcagcggggaccgagagaggg

SEQ ID NO: 21464 - DNA, 28 bp, synthetic construct
  source 1..28: mol_type = other DNA
ctccctctctcggtccccgctgctgagg

SEQ ID NO: 21465 - DNA, 28 bp, synthetic construct
  source 1..28: mol_type = other DNA
tcttctcagacacagctccctctctcgg

SEQ ID NO: 21466 - DNA, 28 bp, synthetic construct
  source 1..28: mol_type = other DNA
ccaaaatcccccttagcgctgcctgcgg

SEQ ID NO: 21467 - DNA, 28 bp, synthetic construct
  source 1..28: mol_type = other DNA
caaaatcccccttagcgctgcctgcggg

SEQ ID NO: 21468 - DNA, 28 bp, synthetic construct
  source 1..28: mol_type = other DNA
aatcccccttagcgctgcctgcgggagg

SEQ ID NO: 21469 - DNA, 28 bp, synthetic construct
  source 1..28: mol_type = other DNA
atcccccttagcgctgcctgcgggaggg

SEQ ID NO: 21470 - DNA, 28 bp, synthetic construct
  source 1..28: mol_type = other DNA
tcccccttagcgctgcctgcgggagggg

SEQ ID NO: 21471 - DNA, 28 bp, synthetic construct
  source 1..28: mol_type = other DNA
cccccttagcgctgcctgcgggaggggg

SEQ ID NO: 21472 - DNA, 28 bp, synthetic construct
  source 1..28: mol_type = other DNA
tccccctcccgcaggcagcgctaagggg

SEQ ID NO: 21473 - DNA, 28 bp, synthetic construct
  source 1..28: mol_type = other DNA
ctccccctcccgcaggcagcgctaaggg

SEQ ID NO: 21474 - DNA, 28 bp, synthetic construct
  source 1..28: mol_type = other DNA
ccttagcgctgcctgcgggagggggagg

SEQ ID NO: 21475 - DNA, 28 bp, synthetic construct
  source 1..28: mol_type = other DNA
cttagcgctgcctgcgggagggggaggg

SEQ ID NO: 21476 - DNA, 28 bp, synthetic construct
  source 1..28: mol_type = other DNA
ttagcgctgcctgcgggagggggagggg

SEQ ID NO: 21477 - DNA, 28 bp, synthetic construct
  source 1..28: mol_type = other DNA
tagcgctgcctgcgggagggggaggggg

SEQ ID NO: 21478 - DNA, 28 bp, synthetic construct
  source 1..28: mol_type = other DNA
atcttgtgccccctccccctcccgcagg

SEQ ID NO: 21479 - DNA, 28 bp, synthetic construct
  source 1..28: mol_type = other DNA
tgcgggagggggagggggcacaagatgg

SEQ ID NO: 21480 - DNA, 28 bp, synthetic construct
  source 1..28: mol_type = other DNA
gggagggggagggggcacaagatggcgg

SEQ ID NO: 21481 - DNA, 28 bp, synthetic construct
  source 1..28: mol_type = other DNA
agggggagggggcacaagatggcggcgg

SEQ ID NO: 21482 - DNA, 28 bp, synthetic construct
  source 1..28: mol_type = other DNA
ggagggggcacaagatggcggcggccgg

SEQ ID NO: 21483 - DNA, 28 bp, synthetic construct
  source 1..28: mol_type = other DNA
gagggggcacaagatggcggcggccggg

SEQ ID NO: 21484 - DNA, 28 bp, synthetic construct
  source 1..28: mol_type = other DNA
agggggcacaagatggcggcggccgggg

SEQ ID NO: 21485 - DNA, 28 bp, synthetic construct
  source 1..28: mol_type = other DNA
gggggcacaagatggcggcggccggggg

SEQ ID NO: 21486 - DNA, 28 bp, synthetic construct
  source 1..28: mol_type = other DNA
ggggcacaagatggcggcggccgggggg

SEQ ID NO: 21487 - DNA, 28 bp, synthetic construct
  source 1..28: mol_type = other DNA
gggcacaagatggcggcggccggggggg

SEQ ID NO: 21488 - DNA, 28 bp, synthetic construct
  source 1..28: mol_type = other DNA
ggcacaagatggcggcggccgggggggg

SEQ ID NO: 21489 - DNA, 28 bp, synthetic construct
  source 1..28: mol_type = other DNA
gcacaagatggcggcggccggggggggg

SEQ ID NO: 21490 - DNA, 28 bp, synthetic construct
  source 1..28: mol_type = other DNA
cacaagatggcggcggccgggggggggg

SEQ ID NO: 21491 - DNA, 28 bp, synthetic construct
  source 1..28: mol_type = other DNA
acaagatggcggcggccggggggggggg

SEQ ID NO: 21492 - DNA, 28 bp, synthetic construct
  source 1..28: mol_type = other DNA
caagatggcggcggccgggggggggggg

SEQ ID NO: 21493 - DNA, 28 bp, synthetic construct
  source 1..28: mol_type = other DNA
aagatggcggcggccggggggggggggg

SEQ ID NO: 21494 - DNA, 28 bp, synthetic construct
  source 1..28: mol_type = other DNA
atggcggcggccgggggggggggggcgg

SEQ ID NO: 21495 - DNA, 28 bp, synthetic construct
  source 1..28: mol_type = other DNA
tggcggcggccgggggggggggggcggg

SEQ ID NO: 21496 - DNA, 28 bp, synthetic construct
  source 1..28: mol_type = other DNA
agctgaactcccgcccccccccccccgg

SEQ ID NO: 21497 - DNA, 28 bp, synthetic construct
  source 1..28: mol_type = other DNA
ggggggggggcgggagttcagctcatgg

SEQ ID NO: 21498 - DNA, 28 bp, synthetic construct
  source 1..28: mol_type = other DNA
gggcgggagttcagctcatggatcccgg

SEQ ID NO: 21499 - DNA, 28 bp, synthetic construct
  source 1..28: mol_type = other DNA
cgggagttcagctcatggatcccggcgg

SEQ ID NO: 21500 - DNA, 28 bp, synthetic construct
  source 1..28: mol_type = other DNA
gggagttcagctcatggatcccggcggg

SEQ ID NO: 21501 - DNA, 28 bp, synthetic construct
  source 1..28: mol_type = other DNA
agttcagctcatggatcccggcgggcgg

SEQ ID NO: 21502 - DNA, 28 bp, synthetic construct
  source 1..28: mol_type = other DNA
tcagctcatggatcccggcgggcggcgg

SEQ ID NO: 21503 - DNA, 28 bp, synthetic construct
  source 1..28: mol_type = other DNA
gctcatggatcccggcgggcggcggagg

SEQ ID NO: 21504 - DNA, 28 bp, synthetic construct
  source 1..28: mol_type = other DNA
ctcatggatcccggcgggcggcggaggg

SEQ ID NO: 21505 - DNA, 28 bp, synthetic construct
  source 1..28: mol_type = other DNA
tcatggatcccggcgggcggcggagggg

SEQ ID NO: 21506 - DNA, 28 bp, synthetic construct
  source 1..28: mol_type = other DNA
tcccggcgggcggcggaggggagaccgg

SEQ ID NO: 21507 - DNA, 28 bp, synthetic construct
  source 1..28: mol_type = other DNA
cccggcgggcggcggaggggagaccggg

SEQ ID NO: 21508 - DNA, 28 bp, synthetic construct
  source 1..28: mol_type = other DNA
gcccggtctcccctccgccgcccgccgg

SEQ ID NO: 21509 - DNA, 28 bp, synthetic construct
  source 1..28: mol_type = other DNA
gcgggcggcggaggggagaccgggccgg

SEQ ID NO: 21510 - DNA, 28 bp, synthetic construct
  source 1..28: mol_type = other DNA
ggcggcggaggggagaccgggccggcgg

SEQ ID NO: 21511 - DNA, 28 bp, synthetic construct
  source 1..28: mol_type = other DNA
ggcggaggggagaccgggccggcggagg

SEQ ID NO: 21512 - DNA, 28 bp, synthetic construct
  source 1..28: mol_type = other DNA
ggaggggagaccgggccggcggaggcgg

SEQ ID NO: 21513 - DNA, 28 bp, synthetic construct
  source 1..28: mol_type = other DNA
ggggagaccgggccggcggaggcggcgg

SEQ ID NO: 21514 - DNA, 28 bp, synthetic construct
  source 1..28: mol_type = other DNA
gagaccgggccggcggaggcggcggcgg

SEQ ID NO: 21515 - DNA, 28 bp, synthetic construct
  source 1..28: mol_type = other DNA
gttgccgccgccgcctccgccggcccgg

SEQ ID NO: 21516 - DNA, 28 bp, synthetic construct
  source 1..28: mol_type = other DNA
gggccggcggaggcggcggcggcaacgg

SEQ ID NO: 21517 - DNA, 28 bp, synthetic construct
  source 1..28: mol_type = other DNA
ggccggcggaggcggcggcggcaacggg

SEQ ID NO: 21518 - DNA, 28 bp, synthetic construct
  source 1..28: mol_type = other DNA
cgcccgttgccgccgccgcctccgccgg

SEQ ID NO: 21519 - DNA, 28 bp, synthetic construct
  source 1..28: mol_type = other DNA
cggcggaggcggcggcggcaacgggcgg

SEQ ID NO: 21520 - DNA, 28 bp, synthetic construct
  source 1..28: mol_type = other DNA
ggcggaggcggcggcggcaacgggcggg

SEQ ID NO: 21521 - DNA, 28 bp, synthetic construct
  source 1..28: mol_type = other DNA
gcggaggcggcggcggcaacgggcgggg

SEQ ID NO: 21522 - DNA, 28 bp, synthetic construct
  source 1..28: mol_type = other DNA
cggaggcggcggcggcaacgggcggggg

SEQ ID NO: 21523 - DNA, 28 bp, synthetic construct
  source 1..28: mol_type = other DNA
aggcggcggcggcaacgggcgggggagg

SEQ ID NO: 21524 - DNA, 28 bp, synthetic construct
  source 1..28: mol_type = other DNA
ggcggcggcggcaacgggcgggggaggg

SEQ ID NO: 21525 - DNA, 28 bp, synthetic construct
  source 1..28: mol_type = other DNA
gcggcggcggcaacgggcgggggagggg

SEQ ID NO: 21526 - DNA, 28 bp, synthetic construct
  source 1..28: mol_type = other DNA
cggcggcggcaacgggcgggggaggggg

SEQ ID NO: 21527 - DNA, 28 bp, synthetic construct
  source 1..28: mol_type = other DNA
tgtattgtctgctgaggggagacgcggg

SEQ ID NO: 21528 - DNA, 28 bp, synthetic construct
  source 1..28: mol_type = other DNA
ttgtattgtctgctgaggggagacgcgg

SEQ ID NO: 21529 - DNA, 28 bp, synthetic construct
  source 1..28: mol_type = other DNA
cgaggcgcttgtattgtctgctgagggg

SEQ ID NO: 21530 - DNA, 28 bp, synthetic construct
  source 1..28: mol_type = other DNA
ccctcagcagacaatacaagcgcctcgg

SEQ ID NO: 21531 - DNA, 28 bp, synthetic construct
  source 1..28: mol_type = other DNA
tccgaggcgcttgtattgtctgctgagg

SEQ ID NO: 21532 - DNA, 28 bp, synthetic construct
  source 1..28: mol_type = other DNA
agggcaggttcggggactcggtccgagg

SEQ ID NO: 21533 - DNA, 28 bp, synthetic construct
  source 1..28: mol_type = other DNA
tttggctagggcaggttcggggactcgg

SEQ ID NO: 21534 - DNA, 28 bp, synthetic construct
  source 1..28: mol_type = other DNA
gtccccgaacctgccctagccaaaatgg

SEQ ID NO: 21535 - DNA, 28 bp, synthetic construct
  source 1..28: mol_type = other DNA
cgccattttggctagggcaggttcgggg

SEQ ID NO: 21536 - DNA, 28 bp, synthetic construct
  source 1..28: mol_type = other DNA
cccgaacctgccctagccaaaatggcgg

SEQ ID NO: 21537 - DNA, 28 bp, synthetic construct
  source 1..28: mol_type = other DNA
gccgccattttggctagggcaggttcgg

SEQ ID NO: 21538 - DNA, 28 bp, synthetic construct
  source 1..28: mol_type = other DNA
tctcggccgccattttggctagggcagg

SEQ ID NO: 21539 - DNA, 28 bp, synthetic construct
  source 1..28: mol_type = other DNA
tctttctcggccgccattttggctaggg

SEQ ID NO: 21540 - DNA, 28 bp, synthetic construct
  source 1..28: mol_type = other DNA
ctctttctcggccgccattttggctagg

SEQ ID NO: 21541 - DNA, 28 bp, synthetic construct
  source 1..28: mol_type = other DNA
agccaaaatggcggccgagaaagagcgg

SEQ ID NO: 21542 - DNA, 28 bp, synthetic construct
  source 1..28: mol_type = other DNA
ttccgctctttctcggccgccattttgg

SEQ ID NO: 21543 - DNA, 28 bp, synthetic construct
  source 1..28: mol_type = other DNA
cacttacgtcacttccgctctttctcgg

SEQ ID NO: 21544 - DNA, 28 bp, synthetic construct
  source 1..28: mol_type = other DNA
gacgtaagtgcctcattagcataagagg

SEQ ID NO: 21545 - DNA, 28 bp, synthetic construct
  source 1..28: mol_type = other DNA
gacaatgagtcctcttatgctaatgagg

SEQ ID NO: 21546 - DNA, 28 bp, synthetic construct
  source 1..28: mol_type = other DNA
aagaggactcattgtccagctaaatagg

SEQ ID NO: 21547 - DNA, 28 bp, synthetic construct
  source 1..28: mol_type = other DNA
agaggactcattgtccagctaaataggg

SEQ ID NO: 21548 - DNA, 28 bp, synthetic construct
  source 1..28: mol_type = other DNA
gaggactcattgtccagctaaatagggg

SEQ ID NO: 21549 - DNA, 28 bp, synthetic construct
  source 1..28: mol_type = other DNA
aggactcattgtccagctaaataggggg

SEQ ID NO: 21550 - DNA, 28 bp, synthetic construct
  source 1..28: mol_type = other DNA
ggactcattgtccagctaaatagggggg

SEQ ID NO: 21551 - DNA, 28 bp, synthetic construct
  source 1..28: mol_type = other DNA
gactcattgtccagctaaataggggggg

SEQ ID NO: 21552 - DNA, 28 bp, synthetic construct
  source 1..28: mol_type = other DNA
actcattgtccagctaaatagggggggg

SEQ ID NO: 21553 - DNA, 28 bp, synthetic construct
  source 1..28: mol_type = other DNA
tgtccagctaaataggggggggcagtgg

SEQ ID NO: 21554 - DNA, 28 bp, synthetic construct
  source 1..28: mol_type = other DNA
gtccagctaaataggggggggcagtggg

SEQ ID NO: 21555 - DNA, 28 bp, synthetic construct
  source 1..28: mol_type = other DNA
tccagctaaataggggggggcagtgggg

SEQ ID NO: 21556 - DNA, 28 bp, synthetic construct
  source 1..28: mol_type = other DNA
tccccactgcccccccctatttagctgg

SEQ ID NO: 21557 - DNA, 28 bp, synthetic construct
  source 1..28: mol_type = other DNA
cagcacccctaacccccttttccccagg

SEQ ID NO: 21558 - DNA, 28 bp, synthetic construct
  source 1..28: mol_type = other DNA
agcacccctaacccccttttccccaggg

SEQ ID NO: 21559 - DNA, 28 bp, synthetic construct
  source 1..28: mol_type = other DNA
gcacccctaacccccttttccccagggg

SEQ ID NO: 21560 - DNA, 28 bp, synthetic construct
  source 1..28: mol_type = other DNA
cacccctaacccccttttccccaggggg

SEQ ID NO: 21561 - DNA, 28 bp, synthetic construct
  source 1..28: mol_type = other DNA
acccctaacccccttttccccagggggg

SEQ ID NO: 21562 - DNA, 28 bp, synthetic construct
  source 1..28: mol_type = other DNA
cccctaacccccttttccccaggggggg

SEQ ID NO: 21563 - DNA, 28 bp, synthetic construct
  source 1..28: mol_type = other DNA
accccccctggggaaaagggggttaggg

SEQ ID NO: 21564 - DNA, 28 bp, synthetic construct
  source 1..28: mol_type = other DNA
aaccccccctggggaaaagggggttagg

SEQ ID NO: 21565 - DNA, 28 bp, synthetic construct
  source 1..28: mol_type = other DNA
agaggaaccccccctggggaaaaggggg

SEQ ID NO: 21566 - DNA, 28 bp, synthetic construct
  source 1..28: mol_type = other DNA
aagaggaaccccccctggggaaaagggg

SEQ ID NO: 21567 - DNA, 28 bp, synthetic construct
  source 1..28: mol_type = other DNA
taagaggaaccccccctggggaaaaggg

SEQ ID NO: 21568 - DNA, 28 bp, synthetic construct
  source 1..28: mol_type = other DNA
gtaagaggaaccccccctggggaaaagg

SEQ ID NO: 21569 - DNA, 28 bp, synthetic construct
  source 1..28: mol_type = other DNA
gtgggagtaagaggaaccccccctgggg

SEQ ID NO: 21570 - DNA, 28 bp, synthetic construct
  source 1..28: mol_type = other DNA
ggtgggagtaagaggaaccccccctggg

SEQ ID NO: 21571 - DNA, 28 bp, synthetic construct
  source 1..28: mol_type = other DNA
gggtgggagtaagaggaaccccccctgg

SEQ ID NO: 21572 - DNA, 28 bp, synthetic construct
  source 1..28: mol_type = other DNA
aggtgcaagcaggggtgggagtaagagg

SEQ ID NO: 21573 - DNA, 28 bp, synthetic construct
  source 1..28: mol_type = other DNA
ggaaaagttaggtgcaagcaggggtggg

SEQ ID NO: 21574 - DNA, 28 bp, synthetic construct
  source 1..28: mol_type = other DNA
aggaaaagttaggtgcaagcaggggtgg

SEQ ID NO: 21575 - DNA, 28 bp, synthetic construct
  source 1..28: mol_type = other DNA
ctcaggaaaagttaggtgcaagcagggg

SEQ ID NO: 21576 - DNA, 28 bp, synthetic construct
  source 1..28: mol_type = other DNA
ccctgcttgcacctaacttttcctgagg

SEQ ID NO: 21577 - DNA, 28 bp, synthetic construct
  source 1..28: mol_type = other DNA
cctgcttgcacctaacttttcctgaggg

SEQ ID NO: 21578 - DNA, 28 bp, synthetic construct
  source 1..28: mol_type = other DNA
gcttgcacctaacttttcctgagggagg

SEQ ID NO: 21579 - DNA, 28 bp, synthetic construct
  source 1..28: mol_type = other DNA
cttgcacctaacttttcctgagggaggg

SEQ ID NO: 21580 - DNA, 28 bp, synthetic construct
  source 1..28: mol_type = other DNA
agagcaccctccctcaggaaaagttagg

SEQ ID NO: 21581 - DNA, 28 bp, synthetic construct
  source 1..28: mol_type = other DNA
gggggtgctgagagcaccctccctcagg

SEQ ID NO: 21582 - DNA, 28 bp, synthetic construct
  source 1..28: mol_type = other DNA
ctctcagcacccccacccccgcttgagg

SEQ ID NO: 21583 - DNA, 28 bp, synthetic construct
  source 1..28: mol_type = other DNA
tctcagcacccccacccccgcttgaggg

SEQ ID NO: 21584 - DNA, 28 bp, synthetic construct
  source 1..28: mol_type = other DNA
tataatttccctcaagcgggggtggggg

SEQ ID NO: 21585 - DNA, 28 bp, synthetic construct
  source 1..28: mol_type = other DNA
atataatttccctcaagcgggggtgggg

SEQ ID NO: 21586 - DNA, 28 bp, synthetic construct
  source 1..28: mol_type = other DNA
tatataatttccctcaagcgggggtggg

SEQ ID NO: 21587 - DNA, 28 bp, synthetic construct
  source 1..28: mol_type = other DNA
ttatataatttccctcaagcgggggtgg

SEQ ID NO: 21588 - DNA, 28 bp, synthetic construct
  source 1..28: mol_type = other DNA
ggattatataatttccctcaagcggggg

SEQ ID NO: 21589 - DNA, 28 bp, synthetic construct
  source 1..28: mol_type = other DNA
gggattatataatttccctcaagcgggg

SEQ ID NO: 21590 - DNA, 28 bp, synthetic construct
  source 1..28: mol_type = other DNA
ggggattatataatttccctcaagcggg

SEQ ID NO: 21591 - DNA, 28 bp, synthetic construct
  source 1..28: mol_type = other DNA
tggggattatataatttccctcaagcgg

SEQ ID NO: 21592 - DNA, 28 bp, synthetic construct
  source 1..28: mol_type = other DNA
gagggaaattatataatccccactgagg

SEQ ID NO: 21593 - DNA, 28 bp, synthetic construct
  source 1..28: mol_type = other DNA
agggaaattatataatccccactgaggg

SEQ ID NO: 21594 - DNA, 28 bp, synthetic construct
  source 1..28: mol_type = other DNA
gggaaattatataatccccactgagggg

SEQ ID NO: 21595 - DNA, 28 bp, synthetic construct
  source 1..28: mol_type = other DNA
ggaaattatataatccccactgaggggg

SEQ ID NO: 21596 - DNA, 28 bp, synthetic construct
  source 1..28: mol_type = other DNA
gaaattatataatccccactgagggggg

SEQ ID NO: 21597 - DNA, 28 bp, synthetic construct
  source 1..28: mol_type = other DNA
tctcgcgagagctcccccctcagtgggg

SEQ ID NO: 21598 - DNA, 28 bp, synthetic construct
  source 1..28: mol_type = other DNA
ttctcgcgagagctcccccctcagtggg

SEQ ID NO: 21599 - DNA, 28 bp, synthetic construct
  source 1..28: mol_type = other DNA
gttctcgcgagagctcccccctcagtgg

SEQ ID NO: 21600 - DNA, 28 bp, synthetic construct
  source 1..28: mol_type = other DNA
tgaggggggagctctcgcgagaaccagg

SEQ ID NO: 21601 - DNA, 28 bp, synthetic construct
  source 1..28: mol_type = other DNA
ggggggagctctcgcgagaaccaggcgg

SEQ ID NO: 21602 - DNA, 28 bp, synthetic construct
  source 1..28: mol_type = other DNA
ctagtgggtcaatggcaaatccgcctgg

SEQ ID NO: 21603 - DNA, 28 bp, synthetic construct
  source 1..28: mol_type = other DNA
caggcggatttgccattgacccactagg

SEQ ID NO: 21604 - DNA, 28 bp, synthetic construct
  source 1..28: mol_type = other DNA
gcggatttgccattgacccactaggagg

SEQ ID NO: 21605 - DNA, 28 bp, synthetic construct
  source 1..28: mol_type = other DNA
gccattgacccactaggaggcgccgcgg

SEQ ID NO: 21606 - DNA, 28 bp, synthetic construct
  source 1..28: mol_type = other DNA
tccgcggcgcctcctagtgggtcaatgg

SEQ ID NO: 21607 - DNA, 28 bp, synthetic construct
  source 1..28: mol_type = other DNA
acccactaggaggcgccgcggataatgg

SEQ ID NO: 21608 - DNA, 28 bp, synthetic construct
  source 1..28: mol_type = other DNA
gccattatccgcggcgcctcctagtggg

SEQ ID NO: 21609 - DNA, 28 bp, synthetic construct
  source 1..28: mol_type = other DNA
ggccattatccgcggcgcctcctagtgg

SEQ ID NO: 21610 - DNA, 28 bp, synthetic construct
  source 1..28: mol_type = other DNA
gggagcgcactgcggccattatccgcgg

SEQ ID NO: 21611 - DNA, 28 bp, synthetic construct
  source 1..28: mol_type = other DNA
gcggataatggccgcagtgcgctcccgg

SEQ ID NO: 21612 - DNA, 28 bp, synthetic construct
  source 1..28: mol_type = other DNA
cggataatggccgcagtgcgctcccggg

SEQ ID NO: 21613 - DNA, 28 bp, synthetic construct
  source 1..28: mol_type = other DNA
ggataatggccgcagtgcgctcccgggg

SEQ ID NO: 21614 - DNA, 28 bp, synthetic construct
  source 1..28: mol_type = other DNA
gcacacgggccccgggagcgcactgcgg

SEQ ID NO: 21615 - DNA, 28 bp, synthetic construct
  source 1..28: mol_type = other DNA
agtgcgctcccggggcccgtgtgctcgg

SEQ ID NO: 21616 - DNA, 28 bp, synthetic construct
  source 1..28: mol_type = other DNA
gcgctcccggggcccgtgtgctcggcgg

SEQ ID NO: 21617 - DNA, 28 bp, synthetic construct
  source 1..28: mol_type = other DNA
cgctcccggggcccgtgtgctcggcggg

SEQ ID NO: 21618 - DNA, 28 bp, synthetic construct
  source 1..28: mol_type = other DNA
ggcgcccgccgagcacacgggccccggg

SEQ ID NO: 21619 - DNA, 28 bp, synthetic construct
  source 1..28: mol_type = other DNA
aggcgcccgccgagcacacgggccccgg

SEQ ID NO: 21620 - DNA, 28 bp, synthetic construct
  source 1..28: mol_type = other DNA
agaggaaggcgcccgccgagcacacggg

SEQ ID NO: 21621 - DNA, 28 bp, synthetic construct
  source 1..28: mol_type = other DNA
cagaggaaggcgcccgccgagcacacgg

SEQ ID NO: 21622 - DNA, 28 bp, synthetic construct
  source 1..28: mol_type = other DNA
cgtgtgctcggcgggcgccttcctctgg

SEQ ID NO: 21623 - DNA, 28 bp, synthetic construct
  source 1..28: mol_type = other DNA
gggcgccttcctctggccgcagcgccgg

SEQ ID NO: 21624 - DNA, 28 bp, synthetic construct
  source 1..28: mol_type = other DNA
cgccttcctctggccgcagcgccggcgg

SEQ ID NO: 21625 - DNA, 28 bp, synthetic construct
  source 1..28: mol_type = other DNA
cgccgccggcgctgcggccagaggaagg

SEQ ID NO: 21626 - DNA, 28 bp, synthetic construct
  source 1..28: mol_type = other DNA
cttcctctggccgcagcgccggcggcgg

SEQ ID NO: 21627 - DNA, 28 bp, synthetic construct
  source 1..28: mol_type = other DNA
cctctggccgcagcgccggcggcggagg

SEQ ID NO: 21628 - DNA, 28 bp, synthetic construct
  source 1..28: mol_type = other DNA
gcttctgcctccgccgccggcgctgcgg

SEQ ID NO: 21629 - DNA, 28 bp, synthetic construct
  source 1..28: mol_type = other DNA
gcgccggcggcggaggcagaagcagcgg

SEQ ID NO: 21630 - DNA, 28 bp, synthetic construct
  source 1..28: mol_type = other DNA
cgccggcggcggaggcagaagcagcggg

SEQ ID NO: 21631 - DNA, 28 bp, synthetic construct
  source 1..28: mol_type = other DNA
ggcccgctgcttctgcctccgccgccgg

SEQ ID NO: 21632 - DNA, 28 bp, synthetic construct
  source 1..28: mol_type = other DNA
gccgcagcacgcccagcactcagtcagg

SEQ ID NO: 21633 - DNA, 28 bp, synthetic construct
  source 1..28: mol_type = other DNA
acctgactgagtgctgggcgtgctgcgg

SEQ ID NO: 21634 - DNA, 28 bp, synthetic construct
  source 1..28: mol_type = other DNA
gcagcacgcccagcactcagtcaggtgg

SEQ ID NO: 21635 - DNA, 28 bp, synthetic construct
  source 1..28: mol_type = other DNA
cagcacggccacctgactgagtgctggg

SEQ ID NO: 21636 - DNA, 28 bp, synthetic construct
  source 1..28: mol_type = other DNA
ccagcactcagtcaggtggccgtgctgg

SEQ ID NO: 21637 - DNA, 28 bp, synthetic construct
  source 1..28: mol_type = other DNA
cagcactcagtcaggtggccgtgctggg

SEQ ID NO: 21638 - DNA, 28 bp, synthetic construct
  source 1..28: mol_type = other DNA
agcactcagtcaggtggccgtgctgggg

SEQ ID NO: 21639 - DNA, 28 bp, synthetic construct
  source 1..28: mol_type = other DNA
ggtggccgtgctggggatccctgcgcgg

SEQ ID NO: 21640 - DNA, 28 bp, synthetic construct
  source 1..28: mol_type = other DNA
gtggccgtgctggggatccctgcgcggg

SEQ ID NO: 21641 - DNA, 28 bp, synthetic construct
  source 1..28: mol_type = other DNA
tgggcccgcgcagggatccccagcacgg

SEQ ID NO: 21642 - DNA, 28 bp, synthetic construct
  source 1..28: mol_type = other DNA
ctggggatccctgcgcgggcccagctgg

SEQ ID NO: 21643 - DNA, 28 bp, synthetic construct
  source 1..28: mol_type = other DNA
tggggatccctgcgcgggcccagctggg

SEQ ID NO: 21644 - DNA, 28 bp, synthetic construct
  source 1..28: mol_type = other DNA
atccctgcgcgggcccagctgggcctgg

SEQ ID NO: 21645 - DNA, 28 bp, synthetic construct
  source 1..28: mol_type = other DNA
gtccaggcccagctgggcccgcgcaggg

SEQ ID NO: 21646 - DNA, 28 bp, synthetic construct
  source 1..28: mol_type = other DNA
agtccaggcccagctgggcccgcgcagg

SEQ ID NO: 21647 - DNA, 28 bp, synthetic construct
  source 1..28: mol_type = other DNA
ggcccagctgggcctggactacatctgg

SEQ ID NO: 21648 - DNA, 28 bp, synthetic construct
  source 1..28: mol_type = other DNA
cgccagatgtagtccaggcccagctggg

SEQ ID NO: 21649 - DNA, 28 bp, synthetic construct
  source 1..28: mol_type = other DNA
ccagctgggcctggactacatctggcgg

SEQ ID NO: 21650 - DNA, 28 bp, synthetic construct
  source 1..28: mol_type = other DNA
cagctgggcctggactacatctggcggg

SEQ ID NO: 21651 - DNA, 28 bp, synthetic construct
  source 1..28: mol_type = other DNA
ctgggcctggactacatctggcgggagg

SEQ ID NO: 21652 - DNA, 28 bp, synthetic construct
  source 1..28: mol_type = other DNA
tgggcctggactacatctggcgggaggg

SEQ ID NO: 21653 - DNA, 28 bp, synthetic construct
  source 1..28: mol_type = other DNA
gggcctggactacatctggcgggagggg

SEQ ID NO: 21654 - DNA, 28 bp, synthetic construct
  source 1..28: mol_type = other DNA
acacccctcccgccagatgtagtccagg

SEQ ID NO: 21655 - DNA, 28 bp, synthetic construct
  source 1..28: mol_type = other DNA
gactacatctggcgggaggggtgtgcgg

SEQ ID NO: 21656 - DNA, 28 bp, synthetic construct
  source 1..28: mol_type = other DNA
actacatctggcgggaggggtgtgcggg

SEQ ID NO: 21657 - DNA, 28 bp, synthetic construct
  source 1..28: mol_type = other DNA
ctacatctggcgggaggggtgtgcgggg

SEQ ID NO: 21658 - DNA, 28 bp, synthetic construct
  source 1..28: mol_type = other DNA
catctggcgggaggggtgtgcggggcgg

SEQ ID NO: 21659 - DNA, 28 bp, synthetic construct
  source 1..28: mol_type = other DNA
ggcgggaggggtgtgcggggcggcctgg

SEQ ID NO: 21660 - DNA, 28 bp, synthetic construct
  source 1..28: mol_type = other DNA
gcgggaggggtgtgcggggcggcctggg

SEQ ID NO: 21661 - DNA, 28 bp, synthetic construct
  source 1..28: mol_type = other DNA
cgggaggggtgtgcggggcggcctgggg

SEQ ID NO: 21662 - DNA, 28 bp, synthetic construct
  source 1..28: mol_type = other DNA
gaggggtgtgcggggcggcctggggcgg

SEQ ID NO: 21663 - DNA, 28 bp, synthetic construct
  source 1..28: mol_type = other DNA
gcatctgagcacgtggagccgccccagg

SEQ ID NO: 21664 - DNA, 28 bp, synthetic construct
  source 1..28: mol_type = other DNA
gtggaagcgcgggcatctgagcacgtgg

SEQ ID NO: 21665 - DNA, 28 bp, synthetic construct
  source 1..28: mol_type = other DNA
acgtgctcagatgcccgcgcttccacgg

SEQ ID NO: 21666 - DNA, 28 bp, synthetic construct
  source 1..28: mol_type = other DNA
tgcccgcgcttccacggctgagaagcgg

SEQ ID NO: 21667 - DNA, 28 bp, synthetic construct
  source 1..28: mol_type = other DNA
cgccgcttctcagccgtggaagcgcggg

SEQ ID NO: 21668 - DNA, 28 bp, synthetic construct
  source 1..28: mol_type = other DNA
ccgcgcttccacggctgagaagcggcgg

SEQ ID NO: 21669 - DNA, 28 bp, synthetic construct
  source 1..28: mol_type = other DNA
cgcgcttccacggctgagaagcggcggg

SEQ ID NO: 21670 - DNA, 28 bp, synthetic construct
  source 1..28: mol_type = other DNA
cttccacggctgagaagcggcgggaagg

SEQ ID NO: 21671 - DNA, 28 bp, synthetic construct
  source 1..28: mol_type = other DNA
gcgccttcccgccgcttctcagccgtgg

SEQ ID NO: 21672 - DNA, 28 bp, synthetic construct
  source 1..28: mol_type = other DNA
cggctgagaagcggcgggaaggcgccgg

SEQ ID NO: 21673 - DNA, 28 bp, synthetic construct
  source 1..28: mol_type = other DNA
ggctgagaagcggcgggaaggcgccggg

SEQ ID NO: 21674 - DNA, 28 bp, synthetic construct
  source 1..28: mol_type = other DNA
agcggcgggaaggcgccgggacacctgg

SEQ ID NO: 21675 - DNA, 28 bp, synthetic construct
  source 1..28: mol_type = other DNA
gcgggaaggcgccgggacacctggccgg

SEQ ID NO: 21676 - DNA, 28 bp, synthetic construct
  source 1..28: mol_type = other DNA
gtcaggggcgaccggccaggtgtcccgg

SEQ ID NO: 21677 - DNA, 28 bp, synthetic construct
  source 1..28: mol_type = other DNA
caggaggcgtcaggggcgaccggccagg

SEQ ID NO: 21678 - DNA, 28 bp, synthetic construct
  source 1..28: mol_type = other DNA
taaggcaggaggcgtcaggggcgaccgg

SEQ ID NO: 21679 - DNA, 28 bp, synthetic construct
  source 1..28: mol_type = other DNA
cccctgacgcctcctgccttaaatgagg

SEQ ID NO: 21680 - DNA, 28 bp, synthetic construct
  source 1..28: mol_type = other DNA
acctcatttaaggcaggaggcgtcaggg

SEQ ID NO: 21681 - DNA, 28 bp, synthetic construct
  source 1..28: mol_type = other DNA
cacctcatttaaggcaggaggcgtcagg

SEQ ID NO: 21682 - DNA, 28 bp, synthetic construct
  source 1..28: mol_type = other DNA
cgcctcctgccttaaatgaggtgtgagg

SEQ ID NO: 21683 - DNA, 28 bp, synthetic construct
  source 1..28: mol_type = other DNA
gcctcctgccttaaatgaggtgtgaggg

SEQ ID NO: 21684 - DNA, 28 bp, synthetic construct
  source 1..28: mol_type = other DNA
gccctcacacctcatttaaggcaggagg

SEQ ID NO: 21685 - DNA, 28 bp, synthetic construct
  source 1..28: mol_type = other DNA
gaggccctcacacctcatttaaggcagg

SEQ ID NO: 21686 - DNA, 28 bp, synthetic construct
  source 1..28: mol_type = other DNA
gcacgaggccctcacacctcatttaagg

SEQ ID NO: 21687 - DNA, 28 bp, synthetic construct
  source 1..28: mol_type = other DNA
atctcaagtcgctgtgtgaagcacgagg

SEQ ID NO: 21688 - DNA, 28 bp, synthetic construct
  source 1..28: mol_type = other DNA
cgacttgagatgagacacaaccccatgg

SEQ ID NO: 21689 - DNA, 28 bp, synthetic construct
  source 1..28: mol_type = other DNA
accccatggatgccttagcccttcctgg

SEQ ID NO: 21690 - DNA, 28 bp, synthetic construct
  source 1..28: mol_type = other DNA
accaggaagggctaaggcatccatgggg

SEQ ID NO: 21691 - DNA, 28 bp, synthetic construct
  source 1..28: mol_type = other DNA
caccaggaagggctaaggcatccatggg

SEQ ID NO: 21692 - DNA, 28 bp, synthetic construct
  source 1..28: mol_type = other DNA
ccatggatgccttagcccttcctggtgg

SEQ ID NO: 21693 - DNA, 28 bp, synthetic construct
  source 1..28: mol_type = other DNA
catggatgccttagcccttcctggtggg

SEQ ID NO: 21694 - DNA, 28 bp, synthetic construct
  source 1..28: mol_type = other DNA
atggatgccttagcccttcctggtgggg

SEQ ID NO: 21695 - DNA, 28 bp, synthetic construct
  source 1..28: mol_type = other DNA
ccttagcccttcctggtggggtattcgg

SEQ ID NO: 21696 - DNA, 28 bp, synthetic construct
  source 1..28: mol_type = other DNA
tctgcaccgaataccccaccaggaaggg

SEQ ID NO: 21697 - DNA, 28 bp, synthetic construct
  source 1..28: mol_type = other DNA
ctctgcaccgaataccccaccaggaagg

SEQ ID NO: 21698 - DNA, 28 bp, synthetic construct
  source 1..28: mol_type = other DNA
cttcctggtggggtattcggtgcagagg

SEQ ID NO: 21699 - DNA, 28 bp, synthetic construct
  source 1..28: mol_type = other DNA
ttcctggtggggtattcggtgcagaggg

SEQ ID NO: 21700 - DNA, 28 bp, synthetic construct
  source 1..28: mol_type = other DNA
tcctggtggggtattcggtgcagagggg

SEQ ID NO: 21701 - DNA, 28 bp, synthetic construct
  source 1..28: mol_type = other DNA
gcccctctgcaccgaataccccaccagg

SEQ ID NO: 21702 - DNA, 28 bp, synthetic construct
  source 1..28: mol_type = other DNA
gtgcagaggggccgagattttattaagg

SEQ ID NO: 21703 - DNA, 28 bp, synthetic construct
  source 1..28: mol_type = other DNA
gtaacggcggaccttaataaaatctcgg

SEQ ID NO: 21704 - DNA, 28 bp, synthetic construct
  source 1..28: mol_type = other DNA
agaatgtcaagtcacagggtaacggcgg

SEQ ID NO: 21705 - DNA, 28 bp, synthetic construct
  source 1..28: mol_type = other DNA
ggaagaatgtcaagtcacagggtaacgg

SEQ ID NO: 21706 - DNA, 28 bp, synthetic construct
  source 1..28: mol_type = other DNA
tgactgggaagaatgtcaagtcacaggg

SEQ ID NO: 21707 - DNA, 28 bp, synthetic construct
  source 1..28: mol_type = other DNA
gtgactgggaagaatgtcaagtcacagg

SEQ ID NO: 21708 - DNA, 28 bp, synthetic construct
  source 1..28: mol_type = other DNA
ttgacattcttcccagtcacagtgatgg

SEQ ID NO: 21709 - DNA, 28 bp, synthetic construct
  source 1..28: mol_type = other DNA
cagagaagagtccatcactgtgactggg

SEQ ID NO: 21710 - DNA, 28 bp, synthetic construct
  source 1..28: mol_type = other DNA
tcagagaagagtccatcactgtgactgg

SEQ ID NO: 21711 - DNA, 28 bp, synthetic construct
  source 1..28: mol_type = other DNA
tctctgacctgaataaaaaaaaaaatgg

SEQ ID NO: 21712 - DNA, 28 bp, synthetic construct
  source 1..28: mol_type = other DNA
ctctgacctgaataaaaaaaaaaatggg

SEQ ID NO: 21713 - DNA, 28 bp, synthetic construct
  source 1..28: mol_type = other DNA
aggattcccatttttttttttattcagg

SEQ ID NO: 21714 - DNA, 28 bp, synthetic construct
  source 1..28: mol_type = other DNA
aaaaaatgggaatcctagtgccttgagg

SEQ ID NO: 21715 - DNA, 28 bp, synthetic construct
  source 1..28: mol_type = other DNA
tcctagtgccttgaggccacccaactgg

SEQ ID NO: 21716 - DNA, 28 bp, synthetic construct
  source 1..28: mol_type = other DNA
accagttgggtggcctcaaggcactagg

SEQ ID NO: 21717 - DNA, 28 bp, synthetic construct
  source 1..28: mol_type = other DNA
aagtttcaccagttgggtggcctcaagg

SEQ ID NO: 21718 - DNA, 28 bp, synthetic construct
  source 1..28: mol_type = other DNA
gaggccacccaactggtgaaacttaagg

SEQ ID NO: 21719 - DNA, 28 bp, synthetic construct
  source 1..28: mol_type = other DNA
tcatccttaagtttcaccagttgggtgg

SEQ ID NO: 21720 - DNA, 28 bp, synthetic construct
  source 1..28: mol_type = other DNA
ttctcatccttaagtttcaccagttggg

SEQ ID NO: 21721 - DNA, 28 bp, synthetic construct
  source 1..28: mol_type = other DNA
cttctcatccttaagtttcaccagttgg

SEQ ID NO: 21722 - DNA, 28 bp, synthetic construct
  source 1..28: mol_type = other DNA
aaggatgagaagtgatgttgccaatagg

SEQ ID NO: 21723 - DNA, 28 bp, synthetic construct
  source 1..28: mol_type = other DNA
aggatgagaagtgatgttgccaataggg

SEQ ID NO: 21724 - DNA, 28 bp, synthetic construct
  source 1..28: mol_type = other DNA
ggatgagaagtgatgttgccaatagggg

SEQ ID NO: 21725 - DNA, 28 bp, synthetic construct
  source 1..28: mol_type = other DNA
gaagtgatgttgccaataggggcattgg

SEQ ID NO: 21726 - DNA, 28 bp, synthetic construct
  source 1..28: mol_type = other DNA
tcttgcagagagccaatgcccctattgg

SEQ ID NO: 21727 - DNA, 28 bp, synthetic construct
  source 1..28: mol_type = other DNA
ctaggactacaaagtgtgttgtttaagg

SEQ ID NO: 21728 - DNA, 28 bp, synthetic construct
  source 1..28: mol_type = other DNA
cttaaacaacacactttgtagtcctagg

SEQ ID NO: 21729 - DNA, 28 bp, synthetic construct
  source 1..28: mol_type = other DNA
ttaaacaacacactttgtagtcctaggg

SEQ ID NO: 21730 - DNA, 28 bp, synthetic construct
  source 1..28: mol_type = other DNA
tttgtagtcctagggacatagcttttgg

SEQ ID NO: 21731 - DNA, 28 bp, synthetic construct
  source 1..28: mol_type = other DNA
tgggagcaccaaaagctatgtccctagg

SEQ ID NO: 21732 - DNA, 28 bp, synthetic construct
  source 1..28: mol_type = other DNA
catagcttttggtgctcccacaatctgg

SEQ ID NO: 21733 - DNA, 28 bp, synthetic construct
  source 1..28: mol_type = other DNA
atagcttttggtgctcccacaatctggg

SEQ ID NO: 21734 - DNA, 28 bp, synthetic construct
  source 1..28: mol_type = other DNA
tgctgtcttatgctacccagattgtggg

SEQ ID NO: 21735 - DNA, 28 bp, synthetic construct
  source 1..28: mol_type = other DNA
gtgctgtcttatgctacccagattgtgg

SEQ ID NO: 21736 - DNA, 28 bp, synthetic construct
  source 1..28: mol_type = other DNA
aatctgggtagcataagacagcacatgg

SEQ ID NO: 21737 - DNA, 28 bp, synthetic construct
  source 1..28: mol_type = other DNA
cagcacatggttgctttgtaaatttagg

SEQ ID NO: 21738 - DNA, 28 bp, synthetic construct
  source 1..28: mol_type = other DNA
atgttgaggagataatgtattggttggg

SEQ ID NO: 21739 - DNA, 28 bp, synthetic construct
  source 1..28: mol_type = other DNA
aatgttgaggagataatgtattggttgg

SEQ ID NO: 21740 - DNA, 28 bp, synthetic construct
  source 1..28: mol_type = other DNA
caaaaatgttgaggagataatgtattgg

SEQ ID NO: 21741 - DNA, 28 bp, synthetic construct
  source 1..28: mol_type = other DNA
ttaaaaggttggttcaaaaatgttgagg

SEQ ID NO: 21742 - DNA, 28 bp, synthetic construct
  source 1..28: mol_type = other DNA
catttttgaaccaaccttttaaagtagg

SEQ ID NO: 21743 - DNA, 28 bp, synthetic construct
  source 1..28: mol_type = other DNA
ctttgaacaacctactttaaaaggttgg

SEQ ID NO: 21744 - DNA, 28 bp, synthetic construct
  source 1..28: mol_type = other DNA
gttactttgaacaacctactttaaaagg

SEQ ID NO: 21745 - DNA, 28 bp, synthetic construct
  source 1..28: mol_type = other DNA
gtaacattatgatttaaagtatcattgg

SEQ ID NO: 21746 - DNA, 28 bp, synthetic construct
  source 1..28: mol_type = other DNA
cattatgatttaaagtatcattggttgg

SEQ ID NO: 21747 - DNA, 28 bp, synthetic construct
  source 1..28: mol_type = other DNA
tgacaagtaatagatgtcaatagtgagg

SEQ ID NO: 21748 - DNA, 28 bp, synthetic construct
  source 1..28: mol_type = other DNA
agatcacatattaaggaaacaggcttgg

SEQ ID NO: 21749 - DNA, 28 bp, synthetic construct
  source 1..28: mol_type = other DNA
cctgtttccttaatatgtgatctttagg

SEQ ID NO: 21750 - DNA, 28 bp, synthetic construct
  source 1..28: mol_type = other DNA
gtatttacctaaagatcacatattaagg

SEQ ID NO: 21751 - DNA, 28 bp, synthetic construct
  source 1..28: mol_type = other DNA
gaaatgtaaagaaacagcaaaagacagg

SEQ ID NO: 21752 - DNA, 28 bp, synthetic construct
  source 1..28: mol_type = other DNA
tcagattattttcggatgttaagtatgg

SEQ ID NO: 21753 - DNA, 28 bp, synthetic construct
  source 1..28: mol_type = other DNA
acttgcagcgaactcagattattttcgg

SEQ ID NO: 21754 - DNA, 28 bp, synthetic construct
  source 1..28: mol_type = other DNA
agttcgctgcaagtagtataaattgtgg

SEQ ID NO: 21755 - DNA, 28 bp, synthetic construct
  source 1..28: mol_type = other DNA
gtgttgtataaaagtttgttaaacaggg

SEQ ID NO: 21756 - DNA, 28 bp, synthetic construct
  source 1..28: mol_type = other DNA
tgtgttgtataaaagtttgttaaacagg

SEQ ID NO: 21757 - DNA, 28 bp, synthetic construct
  source 1..28: mol_type = other DNA
ctttaaaagccaagtcagtatttcaagg

SEQ ID NO: 21758 - DNA, 28 bp, synthetic construct
  source 1..28: mol_type = other DNA
tttaaaagccaagtcagtatttcaaggg

SEQ ID NO: 21759 - DNA, 28 bp, synthetic construct
  source 1..28: mol_type = other DNA
gctgttttcccttgaaatactgacttgg

SEQ ID NO: 21760 - DNA, 28 bp, synthetic construct
  source 1..28: mol_type = other DNA
aagggaaaacagctgaaaaaagtcgtgg

SEQ ID NO: 21761 - DNA, 28 bp, synthetic construct
  source 1..28: mol_type = other DNA
aacagctgaaaaaagtcgtggaaaaagg

SEQ ID NO: 21762 - DNA, 28 bp, synthetic construct
  source 1..28: mol_type = other DNA
acagctgaaaaaagtcgtggaaaaaggg

SEQ ID NO: 21763 - DNA, 28 bp, synthetic construct
  source 1..28: mol_type = other DNA
cagctgaaaaaagtcgtggaaaaagggg

SEQ ID NO: 21764 - DNA, 28 bp, synthetic construct
  source 1..28: mol_type = other DNA
tgaaaaaagtcgtggaaaaaggggttgg

SEQ ID NO: 21765 - DNA, 28 bp, synthetic construct
  source 1..28: mol_type = other DNA
gaaaaaagtcgtggaaaaaggggttggg

SEQ ID NO: 21766 - DNA, 28 bp, synthetic construct
  source 1..28: mol_type = other DNA
aaaaaagtcgtggaaaaaggggttgggg

SEQ ID NO: 21767 - RNA, 20 nt, synthetic construct
  source 1..20: mol_type = other RNA
tgtattgttggtaattattt

SEQ ID NO: 21768 - RNA, 20 nt, synthetic construct
  source 1..20: mol_type = other RNA
tggtgtacataatgtattgt

SEQ ID NO: 21769 - RNA, 20 nt, synthetic construct
  source 1..20: mol_type = other RNA
acattatgtacaccatttac

SEQ ID NO: 21770 - RNA, 20 nt, synthetic construct
  source 1..20: mol_type = other RNA
ttatgtacaccatttacagg

SEQ ID NO: 21771 - RNA, 20 nt, synthetic construct
  source 1..20: mol_type = other RNA
tatgtacaccatttacagga

SEQ ID NO: 21772 - RNA, 20 nt, synthetic construct
  source 1..20: mol_type = other RNA
ttgtgttaccctcctgtaaa

SEQ ID NO: 21773 - RNA, 20 nt, synthetic construct
  source 1..20: mol_type = other RNA
agggtaacacaaaccttgac

SEQ ID NO: 21774 - RNA, 20 nt, synthetic construct
  source 1..20: mol_type = other RNA
tgaaaagttactacctgtca

SEQ ID NO: 21775 - RNA, 20 nt, synthetic construct
  source 1..20: mol_type = other RNA
gttaagcgttcagtgatgtg

SEQ ID NO: 21776 - RNA, 20 nt, synthetic construct
  source 1..20: mol_type = other RNA
tgttaagcgttcagtgatgt

SEQ ID NO: 21777 - RNA, 20 nt, synthetic construct
  source 1..20: mol_type = other RNA
gtgttaagcgttcagtgatg

SEQ ID NO: 21778 - RNA, 20 nt, synthetic construct
  source 1..20: mol_type = other RNA
cactgaacgcttaacactcc

SEQ ID NO: 21779 - RNA, 20 nt, synthetic construct
  source 1..20: mol_type = other RNA
tcctggctgttacatgtcac

SEQ ID NO: 21780 - RNA, 20 nt, synthetic construct
  source 1..20: mol_type = other RNA
tcctgtgacatgtaacagcc

SEQ ID NO: 21781 - RNA, 20 nt, synthetic construct
  source 1..20: mol_type = other RNA
tacatgtcacaggataccac

SEQ ID NO: 21782 - RNA, 20 nt, synthetic construct
  source 1..20: mol_type = other RNA
acatgtcacaggataccact

SEQ ID NO: 21783 - RNA, 20 nt, synthetic construct
  source 1..20: mol_type = other RNA
catgtcacaggataccactg

SEQ ID NO: 21784 - RNA, 20 nt, synthetic construct
  source 1..20: mol_type = other RNA
cttcgagtgactgaccccag

SEQ ID NO: 21785 - RNA, 20 nt, synthetic construct
  source 1..20: mol_type = other RNA
agcacaataaatataaaatg

SEQ ID NO: 21786 - RNA, 20 nt, synthetic construct
  source 1..20: mol_type = other RNA
gttatcaaaaatttcatgga

SEQ ID NO: 21787 - RNA, 20 nt, synthetic construct
  source 1..20: mol_type = other RNA
gaaggttatcaaaaatttca

SEQ ID NO: 21788 - RNA, 20 nt, synthetic construct
  source 1..20: mol_type = other RNA
cttctccaaaaaccccacaa

SEQ ID NO: 21789 - RNA, 20 nt, synthetic construct
  source 1..20: mol_type = other RNA
ctttgtggggtttttggaga

SEQ ID NO: 21790 - RNA, 20 nt, synthetic construct
  source 1..20: mol_type = other RNA
ccaaaaaccccacaaaggtg

SEQ ID NO: 21791 - RNA, 20 nt, synthetic construct
  source 1..20: mol_type = other RNA
cctcacctttgtggggtttt

SEQ ID NO: 21792 - RNA, 20 nt, synthetic construct
  source 1..20: mol_type = other RNA
ttttaaacctcacctttgtg

SEQ ID NO: 21793 - RNA, 20 nt, synthetic construct
  source 1..20: mol_type = other RNA
cttttaaacctcacctttgt

SEQ ID NO: 21794 - RNA, 20 nt, synthetic construct
  source 1..20: mol_type = other RNA
tcttttaaacctcacctttg

SEQ ID NO: 21795 - RNA, 20 nt, synthetic construct
  source 1..20: mol_type = other RNA
cttttgtgaactttttgtag

SEQ ID NO: 21796 - RNA, 20 nt, synthetic construct
  source 1..20: mol_type = other RNA
gcttttgtgaactttttgta

SEQ ID NO: 21797 - RNA, 20 nt, synthetic construct
  source 1..20: mol_type = other RNA
tgcttttgtgaactttttgt

SEQ ID NO: 21798 - RNA, 20 nt, synthetic construct
  source 1..20: mol_type = other RNA
ttcacaaaagcaacaaaatg

SEQ ID NO: 21799 - RNA, 20 nt, synthetic construct
  source 1..20: mol_type = other RNA
tcacaaaagcaacaaaatga

SEQ ID NO: 21800 - RNA, 20 nt, synthetic construct
  source 1..20: mol_type = other RNA
cctaccacaataagacgttt

SEQ ID NO: 21801 - RNA, 20 nt, synthetic construct
  source 1..20: mol_type = other RNA
ctaccacaataagacgtttt

SEQ ID NO: 21802 - RNA, 20 nt, synthetic construct
  source 1..20: mol_type = other RNA
ccaaaacgtcttattgtggt

SEQ ID NO: 21803 - RNA, 20 nt, synthetic construct
  source 1..20: mol_type = other RNA
acaataagacgttttgggcc

SEQ ID NO: 21804 - RNA, 20 nt, synthetic construct
  source 1..20: mol_type = other RNA
tggcccaaaacgtcttattg

SEQ ID NO: 21805 - RNA, 20 nt, synthetic construct
  source 1..20: mol_type = other RNA
gggccaggcagtgtgcagtg

SEQ ID NO: 21806 - RNA, 20 nt, synthetic construct
  source 1..20: mol_type = other RNA
tatccacactgcacactgcc

SEQ ID NO: 21807 - RNA, 20 nt, synthetic construct
  source 1..20: mol_type = other RNA
aaaagaagaaaaaatttaaa

SEQ ID NO: 21808 - RNA, 20 nt, synthetic construct
  source 1..20: mol_type = other RNA
aaaaagaagaaaaaatttaa

SEQ ID NO: 21809 - RNA, 20 nt, synthetic construct
  source 1..20: mol_type = other RNA
gcaaaggggctgaaagaaca

SEQ ID NO: 21810 - RNA, 20 nt, synthetic construct
  source 1..20: mol_type = other RNA
ctgacgttatgagcgcaaag

SEQ ID NO: 21811 - RNA, 20 nt, synthetic construct
  source 1..20: mol_type = other RNA
tctgacgttatgagcgcaaa

SEQ ID NO: 21812 - RNA, 20 nt, synthetic construct
  source 1..20: mol_type = other RNA
gcgctcataacgtcagacgc

SEQ ID NO: 21813 - RNA, 20 nt, synthetic construct
  source 1..20: mol_type = other RNA
tccaaacacacagtcatcat

SEQ ID NO: 21814 - RNA, 20 nt, synthetic construct
  source 1..20: mol_type = other RNA
ccaaacacacagtcatcata

SEQ ID NO: 21815 - RNA, 20 nt, synthetic construct
  source 1..20: mol_type = other RNA
tatgatgactgtgtgtttgg

SEQ ID NO: 21816 - RNA, 20 nt, synthetic construct
  source 1..20: mol_type = other RNA
ccctatgatgactgtgtgtt

SEQ ID NO: 21817 - RNA, 20 nt, synthetic construct
  source 1..20: mol_type = other RNA
tcatagggcagctgaaaaca

SEQ ID NO: 21818 - RNA, 20 nt, synthetic construct
  source 1..20: mol_type = other RNA
catagggcagctgaaaacaa

SEQ ID NO: 21819 - RNA, 20 nt, synthetic construct
  source 1..20: mol_type = other RNA
atagggcagctgaaaacaag

SEQ ID NO: 21820 - RNA, 20 nt, synthetic construct
  source 1..20: mol_type = other RNA
ggtgagtctgtgaactcctt

SEQ ID NO: 21821 - RNA, 20 nt, synthetic construct
  source 1..20: mol_type = other RNA
cacggagttcacagaggacg

SEQ ID NO: 21822 - RNA, 20 nt, synthetic construct
  source 1..20: mol_type = other RNA
agagttcacggagttcacag

SEQ ID NO: 21823 - RNA, 20 nt, synthetic construct
  source 1..20: mol_type = other RNA
tgacacagagtcagagttca

SEQ ID NO: 21824 - RNA, 20 nt, synthetic construct
  source 1..20: mol_type = other RNA
ctctcctcatcctcactctc

SEQ ID NO: 21825 - RNA, 20 nt, synthetic construct
  source 1..20: mol_type = other RNA
gctgccagagagtgaggatg

SEQ ID NO: 21826 - RNA, 20 nt, synthetic construct
  source 1..20: mol_type = other RNA
cactctctggcagcatctga

SEQ ID NO: 21827 - RNA, 20 nt, synthetic construct
  source 1..20: mol_type = other RNA
tcagatgctgccagagagtg

SEQ ID NO: 21828 - RNA, 20 nt, synthetic construct
  source 1..20: mol_type = other RNA
gaaggttttctagtgtcagc

SEQ ID NO: 21829 - RNA, 20 nt, synthetic construct
  source 1..20: mol_type = other RNA
ggcccagctgctgctgtatc

SEQ ID NO: 21830 - RNA, 20 nt, synthetic construct
  source 1..20: mol_type = other RNA
gcccagctgctgctgtatcc

SEQ ID NO: 21831 - RNA, 20 nt, synthetic construct
  source 1..20: mol_type = other RNA
acccggatacagcagcagct

SEQ ID NO: 21832 - RNA, 20 nt, synthetic construct
  source 1..20: mol_type = other RNA
tgctgctgtatccgggtgct

SEQ ID NO: 21833 - RNA, 20 nt, synthetic construct
  source 1..20: mol_type = other RNA
gctgctgtatccgggtgctt

SEQ ID NO: 21834 - RNA, 20 nt, synthetic construct
  source 1..20: mol_type = other RNA
gctgtatccgggtgcttggg

SEQ ID NO: 21835 - RNA, 20 nt, synthetic construct
  source 1..20: mol_type = other RNA
ccgggtgcttgggcggcccc

SEQ ID NO: 21836 - RNA, 20 nt, synthetic construct
  source 1..20: mol_type = other RNA
cctggggccgcccaagcacc

SEQ ID NO: 21837 - RNA, 20 nt, synthetic construct
  source 1..20: mol_type = other RNA
ttgggcggccccaggtgagc

SEQ ID NO: 21838 - RNA, 20 nt, synthetic construct
  source 1..20: mol_type = other RNA
gcggccccaggtgagctggt

SEQ ID NO: 21839 - RNA, 20 nt, synthetic construct
  source 1..20: mol_type = other RNA
cggccccaggtgagctggta

SEQ ID NO: 21840 - RNA, 20 nt, synthetic construct
  source 1..20: mol_type = other RNA
tctccctaccagctcacctg

SEQ ID NO: 21841 - RNA, 20 nt, synthetic construct
  source 1..20: mol_type = other RNA
ttctccctaccagctcacct

SEQ ID NO: 21842 - RNA, 20 nt, synthetic construct
  source 1..20: mol_type = other RNA
attctccctaccagctcacc

SEQ ID NO: 21843 - RNA, 20 nt, synthetic construct
  source 1..20: mol_type = other RNA
gctggtagggagaatagccc

SEQ ID NO: 21844 - RNA, 20 nt, synthetic construct
  source 1..20: mol_type = other RNA
gtagggagaatagccctggt

SEQ ID NO: 21845 - RNA, 20 nt, synthetic construct
  source 1..20: mol_type = other RNA
gtcaacagagttacctacca

SEQ ID NO: 21846 - RNA, 20 nt, synthetic construct
  source 1..20: mol_type = other RNA
tgtcaacagagttacctacc

SEQ ID NO: 21847 - RNA, 20 nt, synthetic construct
  source 1..20: mol_type = other RNA
catcagccccacacttcaac

SEQ ID NO: 21848 - RNA, 20 nt, synthetic construct
  source 1..20: mol_type = other RNA
gtcactcctgttgaagtgtg

SEQ ID NO: 21849 - RNA, 20 nt, synthetic construct
  source 1..20: mol_type = other RNA
acttcaacaggagtgacacc

SEQ ID NO: 21850 - RNA, 20 nt, synthetic construct
  source 1..20: mol_type = other RNA
gtgtcactcctgttgaagtg

SEQ ID NO: 21851 - RNA, 20 nt, synthetic construct
  source 1..20: mol_type = other RNA
aacaggagtgacaccaggtc

SEQ ID NO: 21852 - RNA, 20 nt, synthetic construct
  source 1..20: mol_type = other RNA
acaccaggtcaggattttgc

SEQ ID NO: 21853 - RNA, 20 nt, synthetic construct
  source 1..20: mol_type = other RNA
ggacctgcaaaatcctgacc

SEQ ID NO: 21854 - RNA, 20 nt, synthetic construct
  source 1..20: mol_type = other RNA
gattttgcaggtccactgcg

SEQ ID NO: 21855 - RNA, 20 nt, synthetic construct
  source 1..20: mol_type = other RNA
gcaggtccactgcgaggtga

SEQ ID NO: 21856 - RNA, 20 nt, synthetic construct
  source 1..20: mol_type = other RNA
caggtccactgcgaggtgaa

SEQ ID NO: 21857 - RNA, 20 nt, synthetic construct
  source 1..20: mol_type = other RNA
ctgcgaggtgaagggcagtc

SEQ ID NO: 21858 - RNA, 20 nt, synthetic construct
  source 1..20: mol_type = other RNA
gactgcccttcacctcgcag

SEQ ID NO: 21859 - RNA, 20 nt, synthetic construct
  source 1..20: mol_type = other RNA
aagggcagtccggccattac

SEQ ID NO: 21860 - RNA, 20 nt, synthetic construct
  source 1..20: mol_type = other RNA
agggcagtccggccattaca

SEQ ID NO: 21861 - RNA, 20 nt, synthetic construct
  source 1..20: mol_type = other RNA
ttcaggagccctgtaatggc

SEQ ID NO: 21862 - RNA, 20 nt, synthetic construct
  source 1..20: mol_type = other RNA
acagggctcctgaaaccaaa

SEQ ID NO: 21863 - RNA, 20 nt, synthetic construct
  source 1..20: mol_type = other RNA
ctcaaattccttttggtttc

SEQ ID NO: 21864 - RNA, 20 nt, synthetic construct
  source 1..20: mol_type = other RNA
gctgatgtcaatgctcaggt

SEQ ID NO: 21865 - RNA, 20 nt, synthetic construct
  source 1..20: mol_type = other RNA
agcattgacatcagcaccca

SEQ ID NO: 21866 - RNA, 20 nt, synthetic construct
  source 1..20: mol_type = other RNA
gggtgctgatgtcaatgctc

SEQ ID NO: 21867 - RNA, 20 nt, synthetic construct
  source 1..20: mol_type = other RNA
gtggagcttttggtgtcctt

SEQ ID NO: 21868 - RNA, 20 nt, synthetic construct
  source 1..20: mol_type = other RNA
cgtggagcttttggtgtcct

SEQ ID NO: 21869 - RNA, 20 nt, synthetic construct
  source 1..20: mol_type = other RNA
ccaaaagctccacgatgccc

SEQ ID NO: 21870 - RNA, 20 nt, synthetic construct
  source 1..20: mol_type = other RNA
cctgggcatcgtggagcttt

SEQ ID NO: 21871 - RNA, 20 nt, synthetic construct
  source 1..20: mol_type = other RNA
ccacgatgcccaggtagcca

SEQ ID NO: 21872 - RNA, 20 nt, synthetic construct
  source 1..20: mol_type = other RNA
ccatggctacctgggcatcg

SEQ ID NO: 21873 - RNA, 20 nt, synthetic construct
  source 1..20: mol_type = other RNA
gcccaggtagccatggatag

SEQ ID NO: 21874 - RNA, 20 nt, synthetic construct
  source 1..20: mol_type = other RNA
gcctctatccatggctacct

SEQ ID NO: 21875 - RNA, 20 nt, synthetic construct
  source 1..20: mol_type = other RNA
agcctctatccatggctacc

SEQ ID NO: 21876 - RNA, 20 nt, synthetic construct
  source 1..20: mol_type = other RNA
ctacacttagcctctatcca

SEQ ID NO: 21877 - RNA, 20 nt, synthetic construct
  source 1..20: mol_type = other RNA
aggctaagtgtagacacgtg

SEQ ID NO: 21878 - RNA, 20 nt, synthetic construct
  source 1..20: mol_type = other RNA
aagtgtagacacgtgtggcc

SEQ ID NO: 21879 - RNA, 20 nt, synthetic construct
  source 1..20: mol_type = other RNA
gtgtggcctggaagaacaaa

SEQ ID NO: 21880 - RNA, 20 nt, synthetic construct
  source 1..20: mol_type = other RNA
ttttttccttttgttcttcc

SEQ ID NO: 21881 - RNA, 20 nt, synthetic construct
  source 1..20: mol_type = other RNA
ggcagacataccattgtagt

SEQ ID NO: 21882 - RNA, 20 nt, synthetic construct
  source 1..20: mol_type = other RNA
cattgtagttggtagccttc

SEQ ID NO: 21883 - RNA, 20 nt, synthetic construct
  source 1..20: mol_type = other RNA
gtagttggtagccttcagga

SEQ ID NO: 21884 - RNA, 20 nt, synthetic construct
  source 1..20: mol_type = other RNA
tggtagccttcaggatggag

SEQ ID NO: 21885 - RNA, 20 nt, synthetic construct
  source 1..20: mol_type = other RNA
tagccttcaggatggagtgg

SEQ ID NO: 21886 - RNA, 20 nt, synthetic construct
  source 1..20: mol_type = other RNA
ttcaggatggagtggaggtg

SEQ ID NO: 21887 - RNA, 20 nt, synthetic construct
  source 1..20: mol_type = other RNA
tcaggatggagtggaggtgc

SEQ ID NO: 21888 - RNA, 20 nt, synthetic construct
  source 1..20: mol_type = other RNA
caggatggagtggaggtgcg

SEQ ID NO: 21889 - RNA, 20 nt, synthetic construct
  source 1..20: mol_type = other RNA
gcacctccactccatcctga

SEQ ID NO: 21890 - RNA, 20 nt, synthetic construct
  source 1..20: mol_type = other RNA
gatggagtggaggtgcgggg

SEQ ID NO: 21891 - RNA, 20 nt, synthetic construct
  source 1..20: mol_type = other RNA
gtggaggtgcggggtggtgc

SEQ ID NO: 21892 - RNA, 20 nt, synthetic construct
  source 1..20: mol_type = other RNA
gggtggtgcaggactgagtc

SEQ ID NO: 21893 - RNA, 20 nt, synthetic construct
  source 1..20: mol_type = other RNA
ctgagtcaggactcccacgc

SEQ ID NO: 21894 - RNA, 20 nt, synthetic construct
  source 1..20: mol_type = other RNA
tcaggactcccacgctggcc

SEQ ID NO: 21895 - RNA, 20 nt, synthetic construct
  source 1..20: mol_type = other RNA
cagggctgcctggccagcgt

SEQ ID NO: 21896 - RNA, 20 nt, synthetic construct
  source 1..20: mol_type = other RNA
gcagggctgcctggccagcg

SEQ ID NO: 21897 - RNA, 20 nt, synthetic construct
  source 1..20: mol_type = other RNA
ggccaggcagccctgctcac

SEQ ID NO: 21898 - RNA, 20 nt, synthetic construct
  source 1..20: mol_type = other RNA
ggcagccctgctcacaggca

SEQ ID NO: 21899 - RNA, 20 nt, synthetic construct
  source 1..20: mol_type = other RNA
tgcctgtgagcagggctgcc

SEQ ID NO: 21900 - RNA, 20 nt, synthetic construct
  source 1..20: mol_type = other RNA
cctgctcacaggcaaggtgt

SEQ ID NO: 21901 - RNA, 20 nt, synthetic construct
  source 1..20: mol_type = other RNA
ctgctcacaggcaaggtgta

SEQ ID NO: 21902 - RNA, 20 nt, synthetic construct
  source 1..20: mol_type = other RNA
tgctcacaggcaaggtgtag

SEQ ID NO: 21903 - RNA, 20 nt, synthetic construct
  source 1..20: mol_type = other RNA
gctcacaggcaaggtgtagg

SEQ ID NO: 21904 - RNA, 20 nt, synthetic construct
  source 1..20: mol_type = other RNA
ctcacaggcaaggtgtaggg

SEQ ID NO: 21905 - RNA, 20 nt, synthetic construct
  source 1..20: mol_type = other RNA
cctacaccttgcctgtgagc

SEQ ID NO: 21906 - RNA, 20 nt, synthetic construct
  source 1..20: mol_type = other RNA
gggtatttcctcgaaagtct

SEQ ID NO: 21907 - RNA, 20 nt, synthetic construct
  source 1..20: mol_type = other RNA
cctcgaaagtctcggagctc

SEQ ID NO: 21908 - RNA, 20 nt, synthetic construct
  source 1..20: mol_type = other RNA
cctgagctccgagactttcg

SEQ ID NO: 21909 - RNA, 20 nt, synthetic construct
  source 1..20: mol_type = other RNA
gctgaggcacttctgggagc

SEQ ID NO: 21910 - RNA, 20 nt, synthetic construct
  source 1..20: mol_type = other RNA
agaagtgcctcagcaatttc

SEQ ID NO: 21911 - RNA, 20 nt, synthetic construct
  source 1..20: mol_type = other RNA
gaaattgctgaggcacttct

SEQ ID NO: 21912 - RNA, 20 nt, synthetic construct
  source 1..20: mol_type = other RNA
agaaattgctgaggcacttc

SEQ ID NO: 21913 - RNA, 20 nt, synthetic construct
  source 1..20: mol_type = other RNA
gtgcctcagcaatttctggc

SEQ ID NO: 21914 - RNA, 20 nt, synthetic construct
  source 1..20: mol_type = other RNA
ctcagcaatttctggctggt

SEQ ID NO: 21915 - RNA, 20 nt, synthetic construct
  source 1..20: mol_type = other RNA
caaccagccagaaattgctg

SEQ ID NO: 21916 - RNA, 20 nt, synthetic construct
  source 1..20: mol_type = other RNA
ggttggtgatcacagccaag

SEQ ID NO: 21917 - RNA, 20 nt, synthetic construct
  source 1..20: mol_type = other RNA
gtgatcacagccaagtggag

SEQ ID NO: 21918 - RNA, 20 nt, synthetic construct
  source 1..20: mol_type = other RNA
ttcgtagactccactccact

SEQ ID NO: 21919 - RNA, 20 nt, synthetic construct
  source 1..20: mol_type = other RNA
gtgcgccgcttgcctggccc

SEQ ID NO: 21920 - RNA, 20 nt, synthetic construct
  source 1..20: mol_type = other RNA
ggtgcgccgcttgcctggcc

SEQ ID NO: 21921 - RNA, 20 nt, synthetic construct
  source 1..20: mol_type = other RNA
gcaagcggcgcacctgctgc

SEQ ID NO: 21922 - RNA, 20 nt, synthetic construct
  source 1..20: mol_type = other RNA
cagcaggtgcgccgcttgcc

SEQ ID NO: 21923 - RNA, 20 nt, synthetic construct
  source 1..20: mol_type = other RNA
gcacctgctgcaggttgttc

SEQ ID NO: 21924 - RNA, 20 nt, synthetic construct
  source 1..20: mol_type = other RNA
cttccagaacaacctgcagc

SEQ ID NO: 21925 - RNA, 20 nt, synthetic construct
  source 1..20: mol_type = other RNA
gcaggttgttctggaagttg

SEQ ID NO: 21926 - RNA, 20 nt, synthetic construct
  source 1..20: mol_type = other RNA
gttgttctggaagttgagga

SEQ ID NO: 21927 - RNA, 20 nt, synthetic construct
  source 1..20: mol_type = other RNA
tctggaagttgaggaaggcc

SEQ ID NO: 21928 - RNA, 20 nt, synthetic construct
  source 1..20: mol_type = other RNA
aggccaggtctcccttcacc

SEQ ID NO: 21929 - RNA, 20 nt, synthetic construct
  source 1..20: mol_type = other RNA
ccaggtctcccttcacctgg

SEQ ID NO: 21930 - RNA, 20 nt, synthetic construct
  source 1..20: mol_type = other RNA
ccgccaggtgaagggagacc

SEQ ID NO: 21931 - RNA, 20 nt, synthetic construct
  source 1..20: mol_type = other RNA
cacctggcggatcacttcca

SEQ ID NO: 21932 - RNA, 20 nt, synthetic construct
  source 1..20: mol_type = other RNA
ggaagtgatccgccaggtga

SEQ ID NO: 21933 - RNA, 20 nt, synthetic construct
  source 1..20: mol_type = other RNA
gaccatggaagtgatccgcc

SEQ ID NO: 21934 - RNA, 20 nt, synthetic construct
  source 1..20: mol_type = other RNA
tggtcagtgccttttcttca

SEQ ID NO: 21935 - RNA, 20 nt, synthetic construct
  source 1..20: mol_type = other RNA
tgaagaaaaggcactgacca

SEQ ID NO: 21936 - RNA, 20 nt, synthetic construct
  source 1..20: mol_type = other RNA
tgccttttcttcatggatga

SEQ ID NO: 21937 - RNA, 20 nt, synthetic construct
  source 1..20: mol_type = other RNA
ggccatcatccatgaagaaa

SEQ ID NO: 21938 - RNA, 20 nt, synthetic construct
  source 1..20: mol_type = other RNA
catggatgatggccaagtgc

SEQ ID NO: 21939 - RNA, 20 nt, synthetic construct
  source 1..20: mol_type = other RNA
tggccaagtgcaggaacctg

SEQ ID NO: 21940 - RNA, 20 nt, synthetic construct
  source 1..20: mol_type = other RNA
ggccaagtgcaggaacctgt

SEQ ID NO: 21941 - RNA, 20 nt, synthetic construct
  source 1..20: mol_type = other RNA
gccaagtgcaggaacctgtg

SEQ ID NO: 21942 - RNA, 20 nt, synthetic construct
  source 1..20: mol_type = other RNA
tccccacaggttcctgcact

SEQ ID NO: 21943 - RNA, 20 nt, synthetic construct
  source 1..20: mol_type = other RNA
caggaacctgtggggaagag

SEQ ID NO: 21944 - RNA, 20 nt, synthetic construct
  source 1..20: mol_type = other RNA
aggaacctgtggggaagaga

SEQ ID NO: 21945 - RNA, 20 nt, synthetic construct
  source 1..20: mol_type = other RNA
tttttccctctcttccccac

SEQ ID NO: 21946 - RNA, 20 nt, synthetic construct
  source 1..20: mol_type = other RNA
gtggcggaggcccggggctg

SEQ ID NO: 21947 - RNA, 20 nt, synthetic construct
  source 1..20: mol_type = other RNA
agtggcggaggcccggggct

SEQ ID NO: 21948 - RNA, 20 nt, synthetic construct
  source 1..20: mol_type = other RNA
aagtggcggaggcccggggc

SEQ ID NO: 21949 - RNA, 20 nt, synthetic construct
  source 1..20: mol_type = other RNA
tcgtaagtggcggaggcccg

SEQ ID NO: 21950 - RNA, 20 nt, synthetic construct
  source 1..20: mol_type = other RNA
ctcgtaagtggcggaggccc

SEQ ID NO: 21951 - RNA, 20 nt, synthetic construct
  source 1..20: mol_type = other RNA
actcgtaagtggcggaggcc

SEQ ID NO: 21952 - RNA, 20 nt, synthetic construct
  source 1..20: mol_type = other RNA
cggggactcgtaagtggcgg

SEQ ID NO: 21953 - RNA, 20 nt, synthetic construct
  source 1..20: mol_type = other RNA
cacttacgagtccccgtcct

SEQ ID NO: 21954 - RNA, 20 nt, synthetic construct
  source 1..20: mol_type = other RNA
ggacggggactcgtaagtgg

SEQ ID NO: 21955 - RNA, 20 nt, synthetic construct
  source 1..20: mol_type = other RNA
cgaggacggggactcgtaag

SEQ ID NO: 21956 - RNA, 20 nt, synthetic construct
  source 1..20: mol_type = other RNA
gcagcagctcaccgaggacg

SEQ ID NO: 21957 - RNA, 20 nt, synthetic construct
  source 1..20: mol_type = other RNA
agcagcagctcaccgaggac

SEQ ID NO: 21958 - RNA, 20 nt, synthetic construct
  source 1..20: mol_type = other RNA
ctcggtgagctgctgcttcc

SEQ ID NO: 21959 - RNA, 20 nt, synthetic construct
  source 1..20: mol_type = other RNA
tcggtgagctgctgcttcca

SEQ ID NO: 21960 - RNA, 20 nt, synthetic construct
  source 1..20: mol_type = other RNA
ctggaagcagcagctcaccg

SEQ ID NO: 21961 - RNA, 20 nt, synthetic construct
  source 1..20: mol_type = other RNA
ttccagggctccgagccgcg

SEQ ID NO: 21962 - RNA, 20 nt, synthetic construct
  source 1..20: mol_type = other RNA
tgccgcgcggctcggagccc

SEQ ID NO: 21963 - RNA, 20 nt, synthetic construct
  source 1..20: mol_type = other RNA
gagccgcgcggcacctcctg

SEQ ID NO: 21964 - RNA, 20 nt, synthetic construct
  source 1..20: mol_type = other RNA
gcaggaggtgccgcgcggct

SEQ ID NO: 21965 - RNA, 20 nt, synthetic construct
  source 1..20: mol_type = other RNA
gcggcacctcctgcggctcg

SEQ ID NO: 21966 - RNA, 20 nt, synthetic construct
  source 1..20: mol_type = other RNA
gagccgcaggaggtgccgcg

SEQ ID NO: 21967 - RNA, 20 nt, synthetic construct
  source 1..20: mol_type = other RNA
gcacctcctgcggctcgagg

SEQ ID NO: 21968 - RNA, 20 nt, synthetic construct
  source 1..20: mol_type = other RNA
gatccgcctcgagccgcagg

SEQ ID NO: 21969 - RNA, 20 nt, synthetic construct
  source 1..20: mol_type = other RNA
ggagatccgcctcgagccgc

SEQ ID NO: 21970 - RNA, 20 nt, synthetic construct
  source 1..20: mol_type = other RNA
gcagatggtcaaggagctgc

SEQ ID NO: 21971 - RNA, 20 nt, synthetic construct
  source 1..20: mol_type = other RNA
ggagtacgagcagatggtca

SEQ ID NO: 21972 - RNA, 20 nt, synthetic construct
  source 1..20: mol_type = other RNA
agacgaggagtacgagcaga

SEQ ID NO: 21973 - RNA, 20 nt, synthetic construct
  source 1..20: mol_type = other RNA
ctcgtactcctcgtctttca

SEQ ID NO: 21974 - RNA, 20 nt, synthetic construct
  source 1..20: mol_type = other RNA
cctcgtctttcatggagtcc

SEQ ID NO: 21975 - RNA, 20 nt, synthetic construct
  source 1..20: mol_type = other RNA
cctggactccatgaaagacg

SEQ ID NO: 21976 - RNA, 20 nt, synthetic construct
  source 1..20: mol_type = other RNA
tggagtccaggccgctgtcg

SEQ ID NO: 21977 - RNA, 20 nt, synthetic construct
  source 1..20: mol_type = other RNA
agtccaggccgctgtcgtgg

SEQ ID NO: 21978 - RNA, 20 nt, synthetic construct
  source 1..20: mol_type = other RNA
cgaccgccacgacagcggcc

SEQ ID NO: 21979 - RNA, 20 nt, synthetic construct
  source 1..20: mol_type = other RNA
ctggacgaccgccacgacag

SEQ ID NO: 21980 - RNA, 20 nt, synthetic construct
  source 1..20: mol_type = other RNA
gctgaagaaggagcggctac

SEQ ID NO: 21981 - RNA, 20 nt, synthetic construct
  source 1..20: mol_type = other RNA
gctccttcttcagcccgtcg

SEQ ID NO: 21982 - RNA, 20 nt, synthetic construct
  source 1..20: mol_type = other RNA
ctccttcttcagcccgtcgc

SEQ ID NO: 21983 - RNA, 20 nt, synthetic construct
  source 1..20: mol_type = other RNA
tccttcttcagcccgtcgcg

SEQ ID NO: 21984 - RNA, 20 nt, synthetic construct
  source 1..20: mol_type = other RNA
ccttcttcagcccgtcgcgg

SEQ ID NO: 21985 - RNA, 20 nt, synthetic construct
  source 1..20: mol_type = other RNA
cccccgcgacgggctgaaga

SEQ ID NO: 21986 - RNA, 20 nt, synthetic construct
  source 1..20: mol_type = other RNA
cccgtcgcgggggccctcca

SEQ ID NO: 21987 - RNA, 20 nt, synthetic construct
  source 1..20: mol_type = other RNA
ccatggagggcccccgcgac

SEQ ID NO: 21988 - RNA, 20 nt, synthetic construct
  source 1..20: mol_type = other RNA
gccatggagggcccccgcga

SEQ ID NO: 21989 - RNA, 20 nt, synthetic construct
  source 1..20: mol_type = other RNA
ggccctccatggcccactcc

SEQ ID NO: 21990 - RNA, 20 nt, synthetic construct
  source 1..20: mol_type = other RNA
gccctccatggcccactcct

SEQ ID NO: 21991 - RNA, 20 nt, synthetic construct
  source 1..20: mol_type = other RNA
ccctccatggcccactcctg

SEQ ID NO: 21992 - RNA, 20 nt, synthetic construct
  source 1..20: mol_type = other RNA
cctccatggcccactcctgg

SEQ ID NO: 21993 - RNA, 20 nt, synthetic construct
  source 1..20: mol_type = other RNA
ccccaggagtgggccatgga

SEQ ID NO: 21994 - RNA, 20 nt, synthetic construct
  source 1..20: mol_type = other RNA
cccccaggagtgggccatgg

SEQ ID NO: 21995 - RNA, 20 nt, synthetic construct
  source 1..20: mol_type = other RNA
ggcccactcctgggggcgct

SEQ ID NO: 21996 - RNA, 20 nt, synthetic construct
  source 1..20: mol_type = other RNA
gcgcccccaggagtgggcca

SEQ ID NO: 21997 - RNA, 20 nt, synthetic construct
  source 1..20: mol_type = other RNA
ggccgagcgcccccaggagt

SEQ ID NO: 21998 - RNA, 20 nt, synthetic construct
  source 1..20: mol_type = other RNA
cctgggggcgctcggccgcc

SEQ ID NO: 21999 - RNA, 20 nt, synthetic construct
  source 1..20: mol_type = other RNA
ccaggcggccgagcgccccc

SEQ ID NO: 22000 - RNA, 20 nt, synthetic construct
  source 1..20: mol_type = other RNA
gcgctcggccgcctggaaca

SEQ ID NO: 22001 - RNA, 20 nt, synthetic construct
  source 1..20: mol_type = other RNA
cggccgcctggaacatggcg

SEQ ID NO: 22002 - RNA, 20 nt, synthetic construct
  source 1..20: mol_type = other RNA
cgtccgcgccatgttccagg

SEQ ID NO: 22003 - RNA, 20 nt, synthetic construct
  source 1..20: mol_type = other RNA
aacatggcgcggacgagctg

SEQ ID NO: 22004 - RNA, 20 nt, synthetic construct
  source 1..20: mol_type = other RNA
acatggcgcggacgagctgc

SEQ ID NO: 22005 - RNA, 20 nt, synthetic construct
  source 1..20: mol_type = other RNA
acgagctgcgggcgctgctg

SEQ ID NO: 22006 - RNA, 20 nt, synthetic construct
  source 1..20: mol_type = other RNA
cgagctgcgggcgctgctgc

SEQ ID NO: 22007 - RNA, 20 nt, synthetic construct
  source 1..20: mol_type = other RNA
gggcgctgctgcgggtgcgc

SEQ ID NO: 22008 - RNA, 20 nt, synthetic construct
  source 1..20: mol_type = other RNA
ggcgctgctgcgggtgcgct

SEQ ID NO: 22009 - RNA, 20 nt, synthetic construct
  source 1..20: mol_type = other RNA
gctgcgggtgcgctgggccg

SEQ ID NO: 22010 - RNA, 20 nt, synthetic construct
  source 1..20: mol_type = other RNA
ctgcgggtgcgctgggccgc

SEQ ID NO: 22011 - RNA, 20 nt, synthetic construct
  source 1..20: mol_type = other RNA
aggaagcagcgcgcagcccg

SEQ ID NO: 22012 - RNA, 20 nt, synthetic construct
  source 1..20: mol_type = other RNA
gctgcgcgctgcttcctcgc

SEQ ID NO: 22013 - RNA, 20 nt, synthetic construct
  source 1..20: mol_type = other RNA
ctgcgcgctgcttcctcgct

SEQ ID NO: 22014 - RNA, 20 nt, synthetic construct
  source 1..20: mol_type = other RNA
tgcgcgctgcttcctcgctg

SEQ ID NO: 22015 - RNA, 20 nt, synthetic construct
  source 1..20: mol_type = other RNA
ctgcttcctcgctggggcgc

SEQ ID NO: 22016 - RNA, 20 nt, synthetic construct
  source 1..20: mol_type = other RNA
cttcctcgctggggcgctgg

SEQ ID NO: 22017 - RNA, 20 nt, synthetic construct
  source 1..20: mol_type = other RNA
ttcctcgctggggcgctggc

SEQ ID NO: 22018 - RNA, 20 nt, synthetic construct
  source 1..20: mol_type = other RNA
ctcgctggggcgctggcggg

SEQ ID NO: 22019 - RNA, 20 nt, synthetic construct
  source 1..20: mol_type = other RNA
tcgctggggcgctggcgggc

SEQ ID NO: 22020 - RNA, 20 nt, synthetic construct
  source 1..20: mol_type = other RNA
cgcccgccagcgccccagcg

SEQ ID NO: 22021 - RNA, 20 nt, synthetic construct
  source 1..20: mol_type = other RNA
tggggcgctggcgggcggga

SEQ ID NO: 22022 - RNA, 20 nt, synthetic construct
  source 1..20: mol_type = other RNA
ggcgctggcgggcgggacgg

SEQ ID NO: 22023 - RNA, 20 nt, synthetic construct
  source 1..20: mol_type = other RNA
tggcgggcgggacggcggca

SEQ ID NO: 22024 - RNA, 20 nt, synthetic construct
  source 1..20: mol_type = other RNA
gacggcggcacggactgctg

SEQ ID NO: 22025 - RNA, 20 nt, synthetic construct
  source 1..20: mol_type = other RNA
acggcggcacggactgctgt

SEQ ID NO: 22026 - RNA, 20 nt, synthetic construct
  source 1..20: mol_type = other RNA
tgggctctgcagcgccgccg

SEQ ID NO: 22027 - RNA, 20 nt, synthetic construct
  source 1..20: mol_type = other RNA
ccgcggcgccctataaacgc

SEQ ID NO: 22028 - RNA, 20 nt, synthetic construct
  source 1..20: mol_type = other RNA
gcgtttatagggcgccgcgg

SEQ ID NO: 22029 - RNA, 20 nt, synthetic construct
  source 1..20: mol_type = other RNA
ggcgccctataaacgctggc

SEQ ID NO: 22030 - RNA, 20 nt, synthetic construct
  source 1..20: mol_type = other RNA
gcgccctataaacgctggct

SEQ ID NO: 22031 - RNA, 20 nt, synthetic construct
  source 1..20: mol_type = other RNA
cgccctataaacgctggctg

SEQ ID NO: 22032 - RNA, 20 nt, synthetic construct
  source 1..20: mol_type = other RNA
atccccagccagcgtttata

SEQ ID NO: 22033 - RNA, 20 nt, synthetic construct
  source 1..20: mol_type = other RNA
aatccccagccagcgtttat

SEQ ID NO: 22034 - RNA, 20 nt, synthetic construct
  source 1..20: mol_type = other RNA
acgctggctggggatttctc

SEQ ID NO: 22035 - RNA, 20 nt, synthetic construct
  source 1..20: mol_type = other RNA
cgctggctggggatttctct

SEQ ID NO: 22036 - RNA, 20 nt, synthetic construct
  source 1..20: mol_type = other RNA
gctggctggggatttctctg

SEQ ID NO: 22037 - RNA, 20 nt, synthetic construct
  source 1..20: mol_type = other RNA
ggctggggatttctctgggg

SEQ ID NO: 22038 - RNA, 20 nt, synthetic construct
  source 1..20: mol_type = other RNA
gctggggatttctctggggc

SEQ ID NO: 22039 - RNA, 20 nt, synthetic construct
  source 1..20: mol_type = other RNA
ctggggatttctctggggcg

SEQ ID NO: 22040 - RNA, 20 nt, synthetic construct
  source 1..20: mol_type = other RNA
gatttctctggggcggggtc

SEQ ID NO: 22041 - RNA, 20 nt, synthetic construct
  source 1..20: mol_type = other RNA
ctctggggcggggtcaggct

SEQ ID NO: 22042 - RNA, 20 nt, synthetic construct
  source 1..20: mol_type = other RNA
tctggggcggggtcaggctc

SEQ ID NO: 22043 - RNA, 20 nt, synthetic construct
  source 1..20: mol_type = other RNA
ctggggcggggtcaggctcg

SEQ ID NO: 22044 - RNA, 20 nt, synthetic construct
  source 1..20: mol_type = other RNA
tttttctggtctgactggct

SEQ ID NO: 22045 - RNA, 20 nt, synthetic construct
  source 1..20: mol_type = other RNA
tcagaccagaaaaagagaac

SEQ ID NO: 22046 - RNA, 20 nt, synthetic construct
  source 1..20: mol_type = other RNA
ttctctttttctggtctgac

SEQ ID NO: 22047 - RNA, 20 nt, synthetic construct
  source 1..20: mol_type = other RNA
cgaagccagttctctttttc

SEQ ID NO: 22048 - RNA, 20 nt, synthetic construct
  source 1..20: mol_type = other RNA
aactggcttcgtcctctgct

SEQ ID NO: 22049 - RNA, 20 nt, synthetic construct
  source 1..20: mol_type = other RNA
actggcttcgtcctctgcta

SEQ ID NO: 22050 - RNA, 20 nt, synthetic construct
  source 1..20: mol_type = other RNA
ctggcttcgtcctctgctag

SEQ ID NO: 22051 - RNA, 20 nt, synthetic construct
  source 1..20: mol_type = other RNA
tggcttcgtcctctgctagg

SEQ ID NO: 22052 - RNA, 20 nt, synthetic construct
  source 1..20: mol_type = other RNA
cttctttttccccctagcag

SEQ ID NO: 22053 - RNA, 20 nt, synthetic construct
  source 1..20: mol_type = other RNA
aagaagcctaaaccctgagc

SEQ ID NO: 22054 - RNA, 20 nt, synthetic construct
  source 1..20: mol_type = other RNA
agaagcctaaaccctgagct

SEQ ID NO: 22055 - RNA, 20 nt, synthetic construct
  source 1..20: mol_type = other RNA
gaagcctaaaccctgagctg

SEQ ID NO: 22056 - RNA, 20 nt, synthetic construct
  source 1..20: mol_type = other RNA
aaccctgagctggggttcat

SEQ ID NO: 22057 - RNA, 20 nt, synthetic construct
  source 1..20: mol_type = other RNA
tgaaccccagctcagggttt

SEQ ID NO: 22058 - RNA, 20 nt, synthetic construct
  source 1..20: mol_type = other RNA
ctccgatgaaccccagctca

SEQ ID NO: 22059 - RNA, 20 nt, synthetic construct
  source 1..20: mol_type = other RNA
tctccgatgaaccccagctc

SEQ ID NO: 22060 - RNA, 20 nt, synthetic construct
  source 1..20: mol_type = other RNA
actccctgcgatgagccact

SEQ ID NO: 22061 - RNA, 20 nt, synthetic construct
  source 1..20: mol_type = other RNA
ctccctgcgatgagccacta

SEQ ID NO: 22062 - RNA, 20 nt, synthetic construct
  source 1..20: mol_type = other RNA
gcgatgagccactagggtca

SEQ ID NO: 22063 - RNA, 20 nt, synthetic construct
  source 1..20: mol_type = other RNA
gaccctagtggctcatcgca

SEQ ID NO: 22064 - RNA, 20 nt, synthetic construct
  source 1..20: mol_type = other RNA
tgaccctagtggctcatcgc

SEQ ID NO: 22065 - RNA, 20 nt, synthetic construct
  source 1..20: mol_type = other RNA
gagccactagggtcacggac

SEQ ID NO: 22066 - RNA, 20 nt, synthetic construct
  source 1..20: mol_type = other RNA
agccactagggtcacggaca

SEQ ID NO: 22067 - RNA, 20 nt, synthetic construct
  source 1..20: mol_type = other RNA
ttccctgtccgtgaccctag

SEQ ID NO: 22068 - RNA, 20 nt, synthetic construct
  source 1..20: mol_type = other RNA
actttttgatgagcgccgag

SEQ ID NO: 22069 - RNA, 20 nt, synthetic construct
  source 1..20: mol_type = other RNA
tttgatgagcgccgagtggc

SEQ ID NO: 22070 - RNA, 20 nt, synthetic construct
  source 1..20: mol_type = other RNA
ggaaggactttccagccact

SEQ ID NO: 22071 - RNA, 20 nt, synthetic construct
  source 1..20: mol_type = other RNA
gctggaaagtccttccgacc

SEQ ID NO: 22072 - RNA, 20 nt, synthetic construct
  source 1..20: mol_type = other RNA
ccgaccaggccccctccccc

SEQ ID NO: 22073 - RNA, 20 nt, synthetic construct
  source 1..20: mol_type = other RNA
ggggagggggcctggtcgga

SEQ ID NO: 22074 - RNA, 20 nt, synthetic construct
  source 1..20: mol_type = other RNA
ccggggggagggggcctggt

SEQ ID NO: 22075 - RNA, 20 nt, synthetic construct
  source 1..20: mol_type = other RNA
agtaccggggggagggggcc

SEQ ID NO: 22076 - RNA, 20 nt, synthetic construct
  source 1..20: mol_type = other RNA
agggaagtaccggggggagg

SEQ ID NO: 22077 - RNA, 20 nt, synthetic construct
  source 1..20: mol_type = other RNA
cagggaagtaccggggggag

SEQ ID NO: 22078 - RNA, 20 nt, synthetic construct
  source 1..20: mol_type = other RNA
gcagggaagtaccgggggga

SEQ ID NO: 22079 - RNA, 20 nt, synthetic construct
  source 1..20: mol_type = other RNA
tgcagggaagtaccgggggg

SEQ ID NO: 22080 - RNA, 20 nt, synthetic construct
  source 1..20: mol_type = other RNA
ggctgcagggaagtaccggg

SEQ ID NO: 22081 - RNA, 20 nt, synthetic construct
  source 1..20: mol_type = other RNA
aggctgcagggaagtaccgg

SEQ ID NO: 22082 - RNA, 20 nt, synthetic construct
  source 1..20: mol_type = other RNA
caggctgcagggaagtaccg

SEQ ID NO: 22083 - RNA, 20 nt, synthetic construct
  source 1..20: mol_type = other RNA
gcaggctgcagggaagtacc

SEQ ID NO: 22084 - RNA, 20 nt, synthetic construct
  source 1..20: mol_type = other RNA
tgcaggctgcagggaagtac

SEQ ID NO: 22085 - RNA, 20 nt, synthetic construct
  source 1..20: mol_type = other RNA
attacagggtgcaggctgca

SEQ ID NO: 22086 - RNA, 20 nt, synthetic construct
  source 1..20: mol_type = other RNA
gattacagggtgcaggctgc

SEQ ID NO: 22087 - RNA, 20 nt, synthetic construct
  source 1..20: mol_type = other RNA
gggacaggattacagggtgc

SEQ ID NO: 22088 - RNA, 20 nt, synthetic construct
  source 1..20: mol_type = other RNA
tgcagagggacaggattaca

SEQ ID NO: 22089 - RNA, 20 nt, synthetic construct
  source 1..20: mol_type = other RNA
ttgcagagggacaggattac

SEQ ID NO: 22090 - RNA, 20 nt, synthetic construct
  source 1..20: mol_type = other RNA
aggctcacttgcagagggac

SEQ ID NO: 22091 - RNA, 20 nt, synthetic construct
  source 1..20: mol_type = other RNA
aaagaaggctcacttgcaga

SEQ ID NO: 22092 - RNA, 20 nt, synthetic construct
  source 1..20: mol_type = other RNA
gcaagtgagccttctttccc

SEQ ID NO: 22093 - RNA, 20 nt, synthetic construct
  source 1..20: mol_type = other RNA
caagtgagccttctttccct

SEQ ID NO: 22094 - RNA, 20 nt, synthetic construct
  source 1..20: mol_type = other RNA
aagtgagccttctttccctg

SEQ ID NO: 22095 - RNA, 20 nt, synthetic construct
  source 1..20: mol_type = other RNA
tgggaaaccccagggaaaga

SEQ ID NO: 22096 - RNA, 20 nt, synthetic construct
  source 1..20: mol_type = other RNA
atcgatcgtgggaaacccca

SEQ ID NO: 22097 - RNA, 20 nt, synthetic construct
  source 1..20: mol_type = other RNA
aatcgatcgtgggaaacccc

SEQ ID NO: 22098 - RNA, 20 nt, synthetic construct
  source 1..20: mol_type = other RNA
ttcccacgatcgatttgaat

SEQ ID NO: 22099 - RNA, 20 nt, synthetic construct
  source 1..20: mol_type = other RNA
tcccacgatcgatttgaatt

SEQ ID NO: 22100 - RNA, 20 nt, synthetic construct
  source 1..20: mol_type = other RNA
cccacgatcgatttgaattg

SEQ ID NO: 22101 - RNA, 20 nt, synthetic construct
  source 1..20: mol_type = other RNA
ccccaattcaaatcgatcgt

SEQ ID NO: 22102 - RNA, 20 nt, synthetic construct
  source 1..20: mol_type = other RNA
accccaattcaaatcgatcg

SEQ ID NO: 22103 - RNA, 20 nt, synthetic construct
  source 1..20: mol_type = other RNA
tcgatttgaattggggtcgt

SEQ ID NO: 22104 - RNA, 20 nt, synthetic construct
  source 1..20: mol_type = other RNA
cgtcggctgctgagatccca

SEQ ID NO: 22105 - RNA, 20 nt, synthetic construct
  source 1..20: mol_type = other RNA
tcccaaggacgccgacctga

SEQ ID NO: 22106 - RNA, 20 nt, synthetic construct
  source 1..20: mol_type = other RNA
cccaaggacgccgacctgat

SEQ ID NO: 22107 - RNA, 20 nt, synthetic construct
  source 1..20: mol_type = other RNA
aaggacgccgacctgatggg

SEQ ID NO: 22108 - RNA, 20 nt, synthetic construct
  source 1..20: mol_type = other RNA
cccatcaggtcggcgtcctt

SEQ ID NO: 22109 - RNA, 20 nt, synthetic construct
  source 1..20: mol_type = other RNA
gcccatcaggtcggcgtcct

SEQ ID NO: 22110 - RNA, 20 nt, synthetic construct
  source 1..20: mol_type = other RNA
cctgatgggcggtccctctt

SEQ ID NO: 22111 - RNA, 20 nt, synthetic construct
  source 1..20: mol_type = other RNA
ctgatgggcggtccctcttt

SEQ ID NO: 22112 - RNA, 20 nt, synthetic construct
  source 1..20: mol_type = other RNA
tgatgggcggtccctctttg

SEQ ID NO: 22113 - RNA, 20 nt, synthetic construct
  source 1..20: mol_type = other RNA
ccaaagagggaccgcccatc

SEQ ID NO: 22114 - RNA, 20 nt, synthetic construct
  source 1..20: mol_type = other RNA
tttggggtttgccaacctgc

SEQ ID NO: 22115 - RNA, 20 nt, synthetic construct
  source 1..20: mol_type = other RNA
caggttggcaaaccccaaag

SEQ ID NO: 22116 - RNA, 20 nt, synthetic construct
  source 1..20: mol_type = other RNA
aacggaaaggaccggcaggt

SEQ ID NO: 22117 - RNA, 20 nt, synthetic construct
  source 1..20: mol_type = other RNA
aaaaaacggaaaggaccggc

SEQ ID NO: 22118 - RNA, 20 nt, synthetic construct
  source 1..20: mol_type = other RNA
gatcaaaaaacggaaaggac

SEQ ID NO: 22119 - RNA, 20 nt, synthetic construct
  source 1..20: mol_type = other RNA
caaaagatcaaaaaacggaa

SEQ ID NO: 22120 - RNA, 20 nt, synthetic construct
  source 1..20: mol_type = other RNA
gttttcaaaagatcaaaaaa

SEQ ID NO: 22121 - RNA, 20 nt, synthetic construct
  source 1..20: mol_type = other RNA
atcttttgaaaacgcaagag

SEQ ID NO: 22122 - RNA, 20 nt, synthetic construct
  source 1..20: mol_type = other RNA
aaacgcaagagtggaaatga

SEQ ID NO: 22123 - RNA, 20 nt, synthetic construct
  source 1..20: mol_type = other RNA
gcaagagtggaaatgatggc

SEQ ID NO: 22124 - RNA, 20 nt, synthetic construct
  source 1..20: mol_type = other RNA
caagagtggaaatgatggct

SEQ ID NO: 22125 - RNA, 20 nt, synthetic construct
  source 1..20: mol_type = other RNA
tggaaatgatggctgggcgt

SEQ ID NO: 22126 - RNA, 20 nt, synthetic construct
  source 1..20: mol_type = other RNA
ggaaatgatggctgggcgta

SEQ ID NO: 22127 - RNA, 20 nt, synthetic construct
  source 1..20: mol_type = other RNA
ttgctttccccagacttcta

SEQ ID NO: 22128 - RNA, 20 nt, synthetic construct
  source 1..20: mol_type = other RNA
tgctttccccagacttctaa

SEQ ID NO: 22129 - RNA, 20 nt, synthetic construct
  source 1..20: mol_type = other RNA
gctttccccagacttctaag

SEQ ID NO: 22130 - RNA, 20 nt, synthetic construct
  source 1..20: mol_type = other RNA
tccccagacttctaagggga

SEQ ID NO: 22131 - RNA, 20 nt, synthetic construct
  source 1..20: mol_type = other RNA
tccttccccttagaagtctg

SEQ ID NO: 22132 - RNA, 20 nt, synthetic construct
  source 1..20: mol_type = other RNA
gtccttccccttagaagtct

SEQ ID NO: 22133 - RNA, 20 nt, synthetic construct
  source 1..20: mol_type = other RNA
cgtccttccccttagaagtc

SEQ ID NO: 22134 - RNA, 20 nt, synthetic construct
  source 1..20: mol_type = other RNA
ctaaggggaaggacgcactg

SEQ ID NO: 22135 - RNA, 20 nt, synthetic construct
  source 1..20: mol_type = other RNA
gggaaggacgcactgtggtt

SEQ ID NO: 22136 - RNA, 20 nt, synthetic construct
  source 1..20: mol_type = other RNA
ggaaggacgcactgtggtta

SEQ ID NO: 22137 - RNA, 20 nt, synthetic construct
  source 1..20: mol_type = other RNA
gaaggacgcactgtggttag

SEQ ID NO: 22138 - RNA, 20 nt, synthetic construct
  source 1..20: mol_type = other RNA
aaggacgcactgtggttagg

SEQ ID NO: 22139 - RNA, 20 nt, synthetic construct
  source 1..20: mol_type = other RNA
cactgtggttagggggctgc

SEQ ID NO: 22140 - RNA, 20 nt, synthetic construct
  source 1..20: mol_type = other RNA
tagggggctgcaggccgcgc

SEQ ID NO: 22141 - RNA, 20 nt, synthetic construct
  source 1..20: mol_type = other RNA
ccggtgtttctgcctatacc

SEQ ID NO: 22142 - RNA, 20 nt, synthetic construct
  source 1..20: mol_type = other RNA
cctggtataggcagaaacac

SEQ ID NO: 22143 - RNA, 20 nt, synthetic construct
  source 1..20: mol_type = other RNA
taccaggctctttgcagcaa

SEQ ID NO: 22144 - RNA, 20 nt, synthetic construct
  source 1..20: mol_type = other RNA
tgctgcaaagagcctggtat

SEQ ID NO: 22145 - RNA, 20 nt, synthetic construct
  source 1..20: mol_type = other RNA
ttcctttgctgcaaagagcc

SEQ ID NO: 22146 - RNA, 20 nt, synthetic construct
  source 1..20: mol_type = other RNA
gggggtgcgtgggggggtgg

SEQ ID NO: 22147 - RNA, 20 nt, synthetic construct
  source 1..20: mol_type = other RNA
cccccccacgcacccccgcc

SEQ ID NO: 22148 - RNA, 20 nt, synthetic construct
  source 1..20: mol_type = other RNA
gcgggggtgcgtgggggggt

SEQ ID NO: 22149 - RNA, 20 nt, synthetic construct
  source 1..20: mol_type = other RNA
ggcgggggtgcgtggggggg

SEQ ID NO: 22150 - RNA, 20 nt, synthetic construct
  source 1..20: mol_type = other RNA
cctggcgggggtgcgtgggg

SEQ ID NO: 22151 - RNA, 20 nt, synthetic construct
  source 1..20: mol_type = other RNA
acctggcgggggtgcgtggg

SEQ ID NO: 22152 - RNA, 20 nt, synthetic construct
  source 1..20: mol_type = other RNA
tacctggcgggggtgcgtgg

SEQ ID NO: 22153 - RNA, 20 nt, synthetic construct
  source 1..20: mol_type = other RNA
ctacctggcgggggtgcgtg

SEQ ID NO: 22154 - RNA, 20 nt, synthetic construct
  source 1..20: mol_type = other RNA
tctacctggcgggggtgcgt

SEQ ID NO: 22155 - RNA, 20 nt, synthetic construct
  source 1..20: mol_type = other RNA
ttctacctggcgggggtgcg

SEQ ID NO: 22156 - RNA, 20 nt, synthetic construct
  source 1..20: mol_type = other RNA
tcacaacttctacctggcgg

SEQ ID NO: 22157 - RNA, 20 nt, synthetic construct
  source 1..20: mol_type = other RNA
ttcacaacttctacctggcg

SEQ ID NO: 22158 - RNA, 20 nt, synthetic construct
  source 1..20: mol_type = other RNA
tttcacaacttctacctggc

SEQ ID NO: 22159 - RNA, 20 nt, synthetic construct
  source 1..20: mol_type = other RNA
ctttcacaacttctacctgg

SEQ ID NO: 22160 - RNA, 20 nt, synthetic construct
  source 1..20: mol_type = other RNA
ggtagaagttgtgaaagctt

SEQ ID NO: 22161 - RNA, 20 nt, synthetic construct
  source 1..20: mol_type = other RNA
aagctttcacaacttctacc

SEQ ID NO: 22162 - RNA, 20 nt, synthetic construct
  source 1..20: mol_type = other RNA
agaagttgtgaaagctttgg

SEQ ID NO: 22163 - RNA, 20 nt, synthetic construct
  source 1..20: mol_type = other RNA
gagtgaaaagcctaaatcct

SEQ ID NO: 22164 - RNA, 20 nt, synthetic construct
  source 1..20: mol_type = other RNA
tgagagttctccaaggattt

SEQ ID NO: 22165 - RNA, 20 nt, synthetic construct
  source 1..20: mol_type = other RNA
agtgatttgagagttctcca

SEQ ID NO: 22166 - RNA, 20 nt, synthetic construct
  source 1..20: mol_type = other RNA
gaactctcaaatcacttcct

SEQ ID NO: 22167 - RNA, 20 nt, synthetic construct
  source 1..20: mol_type = other RNA
aactctcaaatcacttccta

SEQ ID NO: 22168 - RNA, 20 nt, synthetic construct
  source 1..20: mol_type = other RNA
ggatgaacagccctgttgac

SEQ ID NO: 22169 - RNA, 20 nt, synthetic construct
  source 1..20: mol_type = other RNA
gatgaacagccctgttgact

SEQ ID NO: 22170 - RNA, 20 nt, synthetic construct
  source 1..20: mol_type = other RNA
atgaacagccctgttgactg

SEQ ID NO: 22171 - RNA, 20 nt, synthetic construct
  source 1..20: mol_type = other RNA
tgaacagccctgttgactgg

SEQ ID NO: 22172 - RNA, 20 nt, synthetic construct
  source 1..20: mol_type = other RNA
acagccctgttgactggggg

SEQ ID NO: 22173 - RNA, 20 nt, synthetic construct
  source 1..20: mol_type = other RNA
cagccctgttgactggggga

SEQ ID NO: 22174 - RNA, 20 nt, synthetic construct
  source 1..20: mol_type = other RNA
agccctgttgactgggggag

SEQ ID NO: 22175 - RNA, 20 nt, synthetic construct
  source 1..20: mol_type = other RNA
tgcccctcccccagtcaaca

SEQ ID NO: 22176 - RNA, 20 nt, synthetic construct
  source 1..20: mol_type = other RNA
ttgcccctcccccagtcaac

SEQ ID NO: 22177 - RNA, 20 nt, synthetic construct
  source 1..20: mol_type = other RNA
aggggcaaacgctccctgta

SEQ ID NO: 22178 - RNA, 20 nt, synthetic construct
  source 1..20: mol_type = other RNA
ggggcaaacgctccctgtat

SEQ ID NO: 22179 - RNA, 20 nt, synthetic construct
  source 1..20: mol_type = other RNA
gggcaaacgctccctgtatg

SEQ ID NO: 22180 - RNA, 20 nt, synthetic construct
  source 1..20: mol_type = other RNA
gtatggggaaactgctgaat

SEQ ID NO: 22181 - RNA, 20 nt, synthetic construct
  source 1..20: mol_type = other RNA
ttcagcagtttccccataca

SEQ ID NO: 22182 - RNA, 20 nt, synthetic construct
  source 1..20: mol_type = other RNA
attcagcagtttccccatac

SEQ ID NO: 22183 - RNA, 20 nt, synthetic construct
  source 1..20: mol_type = other RNA
ttgggaaacaaaaaaaatca

SEQ ID NO: 22184 - RNA, 20 nt, synthetic construct
  source 1..20: mol_type = other RNA
tttgtttcccaagtaaagca

SEQ ID NO: 22185 - RNA, 20 nt, synthetic construct
  source 1..20: mol_type = other RNA
attaacaccttgctttactt

SEQ ID NO: 22186 - RNA, 20 nt, synthetic construct
  source 1..20: mol_type = other RNA
cattaacaccttgctttact

SEQ ID NO: 22187 - RNA, 20 nt, synthetic construct
  source 1..20: mol_type = other RNA
caaggtgttaatgtttgtag

SEQ ID NO: 22188 - RNA, 20 nt, synthetic construct
  source 1..20: mol_type = other RNA
ggtgttaatgtttgtagtgg

SEQ ID NO: 22189 - RNA, 20 nt, synthetic construct
  source 1..20: mol_type = other RNA
aatgtttgtagtggtggttg

SEQ ID NO: 22190 - RNA, 20 nt, synthetic construct
  source 1..20: mol_type = other RNA
atagctactctgctattgca

SEQ ID NO: 22191 - RNA, 20 nt, synthetic construct
  source 1..20: mol_type = other RNA
cattgtgctcccgcagaaaa

SEQ ID NO: 22192 - RNA, 20 nt, synthetic construct
  source 1..20: mol_type = other RNA
tttctgcgggagcacaatgt

SEQ ID NO: 22193 - RNA, 20 nt, synthetic construct
  source 1..20: mol_type = other RNA
gctcacgatcctttttctgc

SEQ ID NO: 22194 - RNA, 20 nt, synthetic construct
  source 1..20: mol_type = other RNA
ggctcacgatcctttttctg

SEQ ID NO: 22195 - RNA, 20 nt, synthetic construct
  source 1..20: mol_type = other RNA
aaggatcgtgagcctacttc

SEQ ID NO: 22196 - RNA, 20 nt, synthetic construct
  source 1..20: mol_type = other RNA
aggatcgtgagcctacttct

SEQ ID NO: 22197 - RNA, 20 nt, synthetic construct
  source 1..20: mol_type = other RNA
cttctgggcacccaaattcg

SEQ ID NO: 22198 - RNA, 20 nt, synthetic construct
  source 1..20: mol_type = other RNA
gaatttgggtgcccagaagt

SEQ ID NO: 22199 - RNA, 20 nt, synthetic construct
  source 1..20: mol_type = other RNA
attcgaggagaacttagaga

SEQ ID NO: 22200 - RNA, 20 nt, synthetic construct
  source 1..20: mol_type = other RNA
ctctaagttctcctcgaatt

SEQ ID NO: 22201 - RNA, 20 nt, synthetic construct
  source 1..20: mol_type = other RNA
cgaggagaacttagagaagg

SEQ ID NO: 22202 - RNA, 20 nt, synthetic construct
  source 1..20: mol_type = other RNA
gttagtgccttaaccgcgat

SEQ ID NO: 22203 - RNA, 20 nt, synthetic construct
  source 1..20: mol_type = other RNA
ttaaccgcgattggacctta

SEQ ID NO: 22204 - RNA, 20 nt, synthetic construct
  source 1..20: mol_type = other RNA
ttaaggtccaatcgcggtta

SEQ ID NO: 22205 - RNA, 20 nt, synthetic construct
  source 1..20: mol_type = other RNA
tggtccttaaggtccaatcg

SEQ ID NO: 22206 - RNA, 20 nt, synthetic construct
  source 1..20: mol_type = other RNA
tactttcttagtggtcctta

SEQ ID NO: 22207 - RNA, 20 nt, synthetic construct
  source 1..20: mol_type = other RNA
ccactaagaaagtagttgcc

SEQ ID NO: 22208 - RNA, 20 nt, synthetic construct
  source 1..20: mol_type = other RNA
cctggcaactactttcttag

SEQ ID NO: 22209 - RNA, 20 nt, synthetic construct
  source 1..20: mol_type = other RNA
agtagttgccaggcatcctg

SEQ ID NO: 22210 - RNA, 20 nt, synthetic construct
  source 1..20: mol_type = other RNA
gtagttgccaggcatcctgc

SEQ ID NO: 22211 - RNA, 20 nt, synthetic construct
  source 1..20: mol_type = other RNA
gttgccaggcatcctgcggg

SEQ ID NO: 22212 - RNA, 20 nt, synthetic construct
  source 1..20: mol_type = other RNA
ggcatcctgcgggaggctca

SEQ ID NO: 22213 - RNA, 20 nt, synthetic construct
  source 1..20: mol_type = other RNA
tgagcctcccgcaggatgcc

SEQ ID NO: 22214 - RNA, 20 nt, synthetic construct
  source 1..20: mol_type = other RNA
gactaccttgagcctcccgc

SEQ ID NO: 22215 - RNA, 20 nt, synthetic construct
  source 1..20: mol_type = other RNA
caaggaggggcgggcaggat

SEQ ID NO: 22216 - RNA, 20 nt, synthetic construct
  source 1..20: mol_type = other RNA
gcaaggaggggcgggcagga

SEQ ID NO: 22217 - RNA, 20 nt, synthetic construct
  source 1..20: mol_type = other RNA
gagagcaaggaggggcgggc

SEQ ID NO: 22218 - RNA, 20 nt, synthetic construct
  source 1..20: mol_type = other RNA
ccctccttgctctcttgtcc

SEQ ID NO: 22219 - RNA, 20 nt, synthetic construct
  source 1..20: mol_type = other RNA
cctccttgctctcttgtcct

SEQ ID NO: 22220 - RNA, 20 nt, synthetic construct
  source 1..20: mol_type = other RNA
ctccttgctctcttgtcctg

SEQ ID NO: 22221 - RNA, 20 nt, synthetic construct
  source 1..20: mol_type = other RNA
tccttgctctcttgtcctgg

SEQ ID NO: 22222 - RNA, 20 nt, synthetic construct
  source 1..20: mol_type = other RNA
caggacaagagagcaaggag

SEQ ID NO: 22223 - RNA, 20 nt, synthetic construct
  source 1..20: mol_type = other RNA
ccaggacaagagagcaagga

SEQ ID NO: 22224 - RNA, 20 nt, synthetic construct
  source 1..20: mol_type = other RNA
cccaggacaagagagcaagg

SEQ ID NO: 22225 - RNA, 20 nt, synthetic construct
  source 1..20: mol_type = other RNA
tcccccaggacaagagagca

SEQ ID NO: 22226 - RNA, 20 nt, synthetic construct
  source 1..20: mol_type = other RNA
tcctgggggacagtagcagt

SEQ ID NO: 22227 - RNA, 20 nt, synthetic construct
  source 1..20: mol_type = other RNA
tccaactgctactgtccccc

SEQ ID NO: 22228 - RNA, 20 nt, synthetic construct
  source 1..20: mol_type = other RNA
ttggacccattcacgccacc

SEQ ID NO: 22229 - RNA, 20 nt, synthetic construct
  source 1..20: mol_type = other RNA
tggacccattcacgccacct

SEQ ID NO: 22230 - RNA, 20 nt, synthetic construct
  source 1..20: mol_type = other RNA
ttcacgccacctgggtagaa

SEQ ID NO: 22231 - RNA, 20 nt, synthetic construct
  source 1..20: mol_type = other RNA
tcacgccacctgggtagaaa

SEQ ID NO: 22232 - RNA, 20 nt, synthetic construct
  source 1..20: mol_type = other RNA
cacgccacctgggtagaaag

SEQ ID NO: 22233 - RNA, 20 nt, synthetic construct
  source 1..20: mol_type = other RNA
acctgggtagaaaggggttt

SEQ ID NO: 22234 - RNA, 20 nt, synthetic construct
  source 1..20: mol_type = other RNA
gaaacccctttctacccagg

SEQ ID NO: 22235 - RNA, 20 nt, synthetic construct
  source 1..20: mol_type = other RNA
gccgaaacccctttctaccc

SEQ ID NO: 22236 - RNA, 20 nt, synthetic construct
  source 1..20: mol_type = other RNA
ggtttcggctcactatgctc

SEQ ID NO: 22237 - RNA, 20 nt, synthetic construct
  source 1..20: mol_type = other RNA
agcataaattatatttctgc

SEQ ID NO: 22238 - RNA, 20 nt, synthetic construct
  source 1..20: mol_type = other RNA
gcttggaggtggaggtggag

SEQ ID NO: 22239 - RNA, 20 nt, synthetic construct
  source 1..20: mol_type = other RNA
tgcaggcttggaggtggagg

SEQ ID NO: 22240 - RNA, 20 nt, synthetic construct
  source 1..20: mol_type = other RNA
acctccaagcctgcaagcca

SEQ ID NO: 22241 - RNA, 20 nt, synthetic construct
  source 1..20: mol_type = other RNA
atggcttgcaggcttggagg

SEQ ID NO: 22242 - RNA, 20 nt, synthetic construct
  source 1..20: mol_type = other RNA
tccatggcttgcaggcttgg

SEQ ID NO: 22243 - RNA, 20 nt, synthetic construct
  source 1..20: mol_type = other RNA
cagtccatggcttgcaggct

SEQ ID NO: 22244 - RNA, 20 nt, synthetic construct
  source 1..20: mol_type = other RNA
gaattcagtccatggcttgc

SEQ ID NO: 22245 - RNA, 20 nt, synthetic construct
  source 1..20: mol_type = other RNA
atggactgaattcatctact

SEQ ID NO: 22246 - RNA, 20 nt, synthetic construct
  source 1..20: mol_type = other RNA
aagtagatgaattcagtcca

SEQ ID NO: 22247 - RNA, 20 nt, synthetic construct
  source 1..20: mol_type = other RNA
attcatctacttggtagaat

SEQ ID NO: 22248 - RNA, 20 nt, synthetic construct
  source 1..20: mol_type = other RNA
ctacttggtagaattggtac

SEQ ID NO: 22249 - RNA, 20 nt, synthetic construct
  source 1..20: mol_type = other RNA
aggcaaaataaagcaaactt

SEQ ID NO: 22250 - RNA, 20 nt, synthetic construct
  source 1..20: mol_type = other RNA
agctcttcagaattagtccc

SEQ ID NO: 22251 - RNA, 20 nt, synthetic construct
  source 1..20: mol_type = other RNA
tcttcagaattagtcccagg

SEQ ID NO: 22252 - RNA, 20 nt, synthetic construct
  source 1..20: mol_type = other RNA
cagaactacagaggcctcct

SEQ ID NO: 22253 - RNA, 20 nt, synthetic construct
  source 1..20: mol_type = other RNA
gcagaactacagaggcctcc

SEQ ID NO: 22254 - RNA, 20 nt, synthetic construct
  source 1..20: mol_type = other RNA
tgtagttctgcagagatttc

SEQ ID NO: 22255 - RNA, 20 nt, synthetic construct
  source 1..20: mol_type = other RNA
aaatctctgcagaactacag

SEQ ID NO: 22256 - RNA, 20 nt, synthetic construct
  source 1..20: mol_type = other RNA
gcaatcatctttaccttgac

SEQ ID NO: 22257 - RNA, 20 nt, synthetic construct
  source 1..20: mol_type = other RNA
ggttagtacaaggccagtca

SEQ ID NO: 22258 - RNA, 20 nt, synthetic construct
  source 1..20: mol_type = other RNA
gggaaggattggttagtaca

SEQ ID NO: 22259 - RNA, 20 nt, synthetic construct
  source 1..20: mol_type = other RNA
tacgaagagaggggaaggat

SEQ ID NO: 22260 - RNA, 20 nt, synthetic construct
  source 1..20: mol_type = other RNA
ggagatacgaagagagggga

SEQ ID NO: 22261 - RNA, 20 nt, synthetic construct
  source 1..20: mol_type = other RNA
gggtggagatacgaagagag

SEQ ID NO: 22262 - RNA, 20 nt, synthetic construct
  source 1..20: mol_type = other RNA
ggggtggagatacgaagaga

SEQ ID NO: 22263 - RNA, 20 nt, synthetic construct
  source 1..20: mol_type = other RNA
aggggtggagatacgaagag

SEQ ID NO: 22264 - RNA, 20 nt, synthetic construct
  source 1..20: mol_type = other RNA
ttctaatattaggggagggg

SEQ ID NO: 22265 - RNA, 20 nt, synthetic construct
  source 1..20: mol_type = other RNA
tcattctaatattaggggag

SEQ ID NO: 22266 - RNA, 20 nt, synthetic construct
  source 1..20: mol_type = other RNA
ttcattctaatattagggga

SEQ ID NO: 22267 - RNA, 20 nt, synthetic construct
  source 1..20: mol_type = other RNA
tttcattctaatattagggg

SEQ ID NO: 22268 - RNA, 20 nt, synthetic construct
  source 1..20: mol_type = other RNA
ttctttcattctaatattag

SEQ ID NO: 22269 - RNA, 20 nt, synthetic construct
  source 1..20: mol_type = other RNA
tttctttcattctaatatta

SEQ ID NO: 22270 - RNA, 20 nt, synthetic construct
  source 1..20: mol_type = other RNA
atttctttcattctaatatt

SEQ ID NO: 22271 - RNA, 20 nt, synthetic construct
  source 1..20: mol_type = other RNA
tagagagagaccaagtatga

SEQ ID NO: 22272 - RNA, 20 nt, synthetic construct
  source 1..20: mol_type = other RNA
agagagagaccaagtatgaa

SEQ ID NO: 22273 - RNA, 20 nt, synthetic construct
  source 1..20: mol_type = other RNA
aatttttttcccttcatact

SEQ ID NO: 22274 - DNA, 28 bp, synthetic construct
  source 1..28: mol_type = other DNA
cataatgtattgttggtaattattttgg

SEQ ID NO: 22275 - DNA, 28 bp, synthetic construct
  source 1..28: mol_type = other DNA
gtaaatggtgtacataatgtattgttgg

SEQ ID NO: 22276 - DNA, 28 bp, synthetic construct
  source 1..28: mol_type = other DNA
acaatacattatgtacaccatttacagg

SEQ ID NO: 22277 - DNA, 28 bp, synthetic construct
  source 1..28: mol_type = other DNA
atacattatgtacaccatttacaggagg

SEQ ID NO: 22278 - DNA, 28 bp, synthetic construct
  source 1..28: mol_type = other DNA
tacattatgtacaccatttacaggaggg

SEQ ID NO: 22279 - DNA, 28 bp, synthetic construct
  source 1..28: mol_type = other DNA
aaggtttgtgttaccctcctgtaaatgg

SEQ ID NO: 22280 - DNA, 28 bp, synthetic construct
  source 1..28: mol_type = other DNA
acaggagggtaacacaaaccttgacagg

SEQ ID NO: 22281 - DNA, 28 bp, synthetic construct
  source 1..28: mol_type = other DNA
tggggtgaaaagttactacctgtcaagg

SEQ ID NO: 22282 - DNA, 28 bp, synthetic construct
  source 1..28: mol_type = other DNA
ggagtgttaagcgttcagtgatgtgggg

SEQ ID NO: 22283 - DNA, 28 bp, synthetic construct
  source 1..28: mol_type = other DNA
aggagtgttaagcgttcagtgatgtggg

SEQ ID NO: 22284 - DNA, 28 bp, synthetic construct
  source 1..28: mol_type = other DNA
caggagtgttaagcgttcagtgatgtgg

SEQ ID NO: 22285 - DNA, 28 bp, synthetic construct
  source 1..28: mol_type = other DNA
cacatcactgaacgcttaacactcctgg

SEQ ID NO: 22286 - DNA, 28 bp, synthetic construct
  source 1..28: mol_type = other DNA
aacactcctggctgttacatgtcacagg

SEQ ID NO: 22287 - DNA, 28 bp, synthetic construct
  source 1..28: mol_type = other DNA
tggtatcctgtgacatgtaacagccagg

SEQ ID NO: 22288 - DNA, 28 bp, synthetic construct
  source 1..28: mol_type = other DNA
gctgttacatgtcacaggataccactgg

SEQ ID NO: 22289 - DNA, 28 bp, synthetic construct
  source 1..28: mol_type = other DNA
ctgttacatgtcacaggataccactggg

SEQ ID NO: 22290 - DNA, 28 bp, synthetic construct
  source 1..28: mol_type = other DNA
tgttacatgtcacaggataccactgggg

SEQ ID NO: 22291 - DNA, 28 bp, synthetic construct
  source 1..28: mol_type = other DNA
ttgtgcttcgagtgactgaccccagtgg

SEQ ID NO: 22292 - DNA, 28 bp, synthetic construct
  source 1..28: mol_type = other DNA
ctcgaagcacaataaatataaaatgtgg

SEQ ID NO: 22293 - DNA, 28 bp, synthetic construct
  source 1..28: mol_type = other DNA
agaaggttatcaaaaatttcatggaagg

SEQ ID NO: 22294 - DNA, 28 bp, synthetic construct
  source 1..28: mol_type = other DNA
ttggagaaggttatcaaaaatttcatgg

SEQ ID NO: 22295 - DNA, 28 bp, synthetic construct
  source 1..28: mol_type = other DNA
ataaccttctccaaaaaccccacaaagg

SEQ ID NO: 22296 - DNA, 28 bp, synthetic construct
  source 1..28: mol_type = other DNA
ctcacctttgtggggtttttggagaagg

SEQ ID NO: 22297 - DNA, 28 bp, synthetic construct
  source 1..28: mol_type = other DNA
cttctccaaaaaccccacaaaggtgagg

SEQ ID NO: 22298 - DNA, 28 bp, synthetic construct
  source 1..28: mol_type = other DNA
ttaaacctcacctttgtggggtttttgg

SEQ ID NO: 22299 - DNA, 28 bp, synthetic construct
  source 1..28: mol_type = other DNA
acttcttttaaacctcacctttgtgggg

SEQ ID NO: 22300 - DNA, 28 bp, synthetic construct
  source 1..28: mol_type = other DNA
aacttcttttaaacctcacctttgtggg

SEQ ID NO: 22301 - DNA, 28 bp, synthetic construct
  source 1..28: mol_type = other DNA
aaacttcttttaaacctcacctttgtgg

SEQ ID NO: 22302 - DNA, 28 bp, synthetic construct
  source 1..28: mol_type = other DNA
tgttgcttttgtgaactttttgtagggg

SEQ ID NO: 22303 - DNA, 28 bp, synthetic construct
  source 1..28: mol_type = other DNA
ttgttgcttttgtgaactttttgtaggg

SEQ ID NO: 22304 - DNA, 28 bp, synthetic construct
  source 1..28: mol_type = other DNA
tttgttgcttttgtgaactttttgtagg

SEQ ID NO: 22305 - DNA, 28 bp, synthetic construct
  source 1..28: mol_type = other DNA
aaaagttcacaaaagcaacaaaatgagg

SEQ ID NO: 22306 - DNA, 28 bp, synthetic construct
  source 1..28: mol_type = other DNA
aaagttcacaaaagcaacaaaatgaggg

SEQ ID NO: 22307 - DNA, 28 bp, synthetic construct
  source 1..28: mol_type = other DNA
ctgatcctaccacaataagacgttttgg

SEQ ID NO: 22308 - DNA, 28 bp, synthetic construct
  source 1..28: mol_type = other DNA
tgatcctaccacaataagacgttttggg

SEQ ID NO: 22309 - DNA, 28 bp, synthetic construct
  source 1..28: mol_type = other DNA
ctggcccaaaacgtcttattgtggtagg

SEQ ID NO: 22310 - DNA, 28 bp, synthetic construct
  source 1..28: mol_type = other DNA
ctaccacaataagacgttttgggccagg

SEQ ID NO: 22311 - DNA, 28 bp, synthetic construct
  source 1..28: mol_type = other DNA
ctgcctggcccaaaacgtcttattgtgg

SEQ ID NO: 22312 - DNA, 28 bp, synthetic construct
  source 1..28: mol_type = other DNA
gttttgggccaggcagtgtgcagtgtgg

SEQ ID NO: 22313 - DNA, 28 bp, synthetic construct
  source 1..28: mol_type = other DNA
acttatatccacactgcacactgcctgg

SEQ ID NO: 22314 - DNA, 28 bp, synthetic construct
  source 1..28: mol_type = other DNA
aagaaaaaagaagaaaaaatttaaaggg

SEQ ID NO: 22315 - DNA, 28 bp, synthetic construct
  source 1..28: mol_type = other DNA
aaagaaaaaagaagaaaaaatttaaagg

SEQ ID NO: 22316 - DNA, 28 bp, synthetic construct
  source 1..28: mol_type = other DNA
tgagcgcaaaggggctgaaagaacatgg

SEQ ID NO: 22317 - DNA, 28 bp, synthetic construct
  source 1..28: mol_type = other DNA
agcgtctgacgttatgagcgcaaagggg

SEQ ID NO: 22318 - DNA, 28 bp, synthetic construct
  source 1..28: mol_type = other DNA
cagcgtctgacgttatgagcgcaaaggg

SEQ ID NO: 22319 - DNA, 28 bp, synthetic construct
  source 1..28: mol_type = other DNA
cctttgcgctcataacgtcagacgctgg

SEQ ID NO: 22320 - DNA, 28 bp, synthetic construct
  source 1..28: mol_type = other DNA
tggcctccaaacacacagtcatcatagg

SEQ ID NO: 22321 - DNA, 28 bp, synthetic construct
  source 1..28: mol_type = other DNA
ggcctccaaacacacagtcatcataggg

SEQ ID NO: 22322 - DNA, 28 bp, synthetic construct
  source 1..28: mol_type = other DNA
tgccctatgatgactgtgtgtttggagg

SEQ ID NO: 22323 - DNA, 28 bp, synthetic construct
  source 1..28: mol_type = other DNA
agctgccctatgatgactgtgtgtttgg

SEQ ID NO: 22324 - DNA, 28 bp, synthetic construct
  source 1..28: mol_type = other DNA
agtcatcatagggcagctgaaaacaagg

SEQ ID NO: 22325 - DNA, 28 bp, synthetic construct
  source 1..28: mol_type = other DNA
gtcatcatagggcagctgaaaacaaggg

SEQ ID NO: 22326 - DNA, 28 bp, synthetic construct
  source 1..28: mol_type = other DNA
tcatcatagggcagctgaaaacaagggg

SEQ ID NO: 22327 - DNA, 28 bp, synthetic construct
  source 1..28: mol_type = other DNA
gacgaggtgagtctgtgaactccttcgg

SEQ ID NO: 22328 - DNA, 28 bp, synthetic construct
  source 1..28: mol_type = other DNA
gagttcacggagttcacagaggacgagg

SEQ ID NO: 22329 - DNA, 28 bp, synthetic construct
  source 1..28: mol_type = other DNA
gagtcagagttcacggagttcacagagg

SEQ ID NO: 22330 - DNA, 28 bp, synthetic construct
  source 1..28: mol_type = other DNA
agctatgacacagagtcagagttcacgg

SEQ ID NO: 22331 - DNA, 28 bp, synthetic construct
  source 1..28: mol_type = other DNA
catagctctcctcatcctcactctctgg

SEQ ID NO: 22332 - DNA, 28 bp, synthetic construct
  source 1..28: mol_type = other DNA
cagatgctgccagagagtgaggatgagg

SEQ ID NO: 22333 - DNA, 28 bp, synthetic construct
  source 1..28: mol_type = other DNA
atcctcactctctggcagcatctgaagg

SEQ ID NO: 22334 - DNA, 28 bp, synthetic construct
  source 1..28: mol_type = other DNA
aaccttcagatgctgccagagagtgagg

SEQ ID NO: 22335 - DNA, 28 bp, synthetic construct
  source 1..28: mol_type = other DNA
catctgaaggttttctagtgtcagctgg

SEQ ID NO: 22336 - DNA, 28 bp, synthetic construct
  source 1..28: mol_type = other DNA
cagctggcccagctgctgctgtatccgg

SEQ ID NO: 22337 - DNA, 28 bp, synthetic construct
  source 1..28: mol_type = other DNA
agctggcccagctgctgctgtatccggg

SEQ ID NO: 22338 - DNA, 28 bp, synthetic construct
  source 1..28: mol_type = other DNA
caagcacccggatacagcagcagctggg

SEQ ID NO: 22339 - DNA, 28 bp, synthetic construct
  source 1..28: mol_type = other DNA
ccagctgctgctgtatccgggtgcttgg

SEQ ID NO: 22340 - DNA, 28 bp, synthetic construct
  source 1..28: mol_type = other DNA
cagctgctgctgtatccgggtgcttggg

SEQ ID NO: 22341 - DNA, 28 bp, synthetic construct
  source 1..28: mol_type = other DNA
ctgctgctgtatccgggtgcttgggcgg

SEQ ID NO: 22342 - DNA, 28 bp, synthetic construct
  source 1..28: mol_type = other DNA
tgtatccgggtgcttgggcggccccagg

SEQ ID NO: 22343 - DNA, 28 bp, synthetic construct
  source 1..28: mol_type = other DNA
gctcacctggggccgcccaagcacccgg

SEQ ID NO: 22344 - DNA, 28 bp, synthetic construct
  source 1..28: mol_type = other DNA
ggtgcttgggcggccccaggtgagctgg

SEQ ID NO: 22345 - DNA, 28 bp, synthetic construct
  source 1..28: mol_type = other DNA
cttgggcggccccaggtgagctggtagg

SEQ ID NO: 22346 - DNA, 28 bp, synthetic construct
  source 1..28: mol_type = other DNA
ttgggcggccccaggtgagctggtaggg

SEQ ID NO: 22347 - DNA, 28 bp, synthetic construct
  source 1..28: mol_type = other DNA
gctattctccctaccagctcacctgggg

SEQ ID NO: 22348 - DNA, 28 bp, synthetic construct
  source 1..28: mol_type = other DNA
ggctattctccctaccagctcacctggg

SEQ ID NO: 22349 - DNA, 28 bp, synthetic construct
  source 1..28: mol_type = other DNA
gggctattctccctaccagctcacctgg

SEQ ID NO: 22350 - DNA, 28 bp, synthetic construct
  source 1..28: mol_type = other DNA
ggtgagctggtagggagaatagccctgg

SEQ ID NO: 22351 - DNA, 28 bp, synthetic construct
  source 1..28: mol_type = other DNA
agctggtagggagaatagccctggtagg

SEQ ID NO: 22352 - DNA, 28 bp, synthetic construct
  source 1..28: mol_type = other DNA
ctgatgtcaacagagttacctaccaggg

SEQ ID NO: 22353 - DNA, 28 bp, synthetic construct
  source 1..28: mol_type = other DNA
gctgatgtcaacagagttacctaccagg

SEQ ID NO: 22354 - DNA, 28 bp, synthetic construct
  source 1..28: mol_type = other DNA
gttgacatcagccccacacttcaacagg

SEQ ID NO: 22355 - DNA, 28 bp, synthetic construct
  source 1..28: mol_type = other DNA
ctggtgtcactcctgttgaagtgtgggg

SEQ ID NO: 22356 - DNA, 28 bp, synthetic construct
  source 1..28: mol_type = other DNA
cccacacttcaacaggagtgacaccagg

SEQ ID NO: 22357 - DNA, 28 bp, synthetic construct
  source 1..28: mol_type = other DNA
acctggtgtcactcctgttgaagtgtgg

SEQ ID NO: 22358 - DNA, 28 bp, synthetic construct
  source 1..28: mol_type = other DNA
acttcaacaggagtgacaccaggtcagg

SEQ ID NO: 22359 - DNA, 28 bp, synthetic construct
  source 1..28: mol_type = other DNA
gagtgacaccaggtcaggattttgcagg

SEQ ID NO: 22360 - DNA, 28 bp, synthetic construct
  source 1..28: mol_type = other DNA
gcagtggacctgcaaaatcctgacctgg

SEQ ID NO: 22361 - DNA, 28 bp, synthetic construct
  source 1..28: mol_type = other DNA
gtcaggattttgcaggtccactgcgagg

SEQ ID NO: 22362 - DNA, 28 bp, synthetic construct
  source 1..28: mol_type = other DNA
attttgcaggtccactgcgaggtgaagg

SEQ ID NO: 22363 - DNA, 28 bp, synthetic construct
  source 1..28: mol_type = other DNA
ttttgcaggtccactgcgaggtgaaggg

SEQ ID NO: 22364 - DNA, 28 bp, synthetic construct
  source 1..28: mol_type = other DNA
gtccactgcgaggtgaagggcagtccgg

SEQ ID NO: 22365 - DNA, 28 bp, synthetic construct
  source 1..28: mol_type = other DNA
ggccggactgcccttcacctcgcagtgg

SEQ ID NO: 22366 - DNA, 28 bp, synthetic construct
  source 1..28: mol_type = other DNA
aggtgaagggcagtccggccattacagg

SEQ ID NO: 22367 - DNA, 28 bp, synthetic construct
  source 1..28: mol_type = other DNA
ggtgaagggcagtccggccattacaggg

SEQ ID NO: 22368 - DNA, 28 bp, synthetic construct
  source 1..28: mol_type = other DNA
ttggtttcaggagccctgtaatggccgg

SEQ ID NO: 22369 - DNA, 28 bp, synthetic construct
  source 1..28: mol_type = other DNA
ccattacagggctcctgaaaccaaaagg

SEQ ID NO: 22370 - DNA, 28 bp, synthetic construct
  source 1..28: mol_type = other DNA
agcatctcaaattccttttggtttcagg

SEQ ID NO: 22371 - DNA, 28 bp, synthetic construct
  source 1..28: mol_type = other DNA
tgggtgctgatgtcaatgctcaggttgg

SEQ ID NO: 22372 - DNA, 28 bp, synthetic construct
  source 1..28: mol_type = other DNA
acctgagcattgacatcagcacccaagg

SEQ ID NO: 22373 - DNA, 28 bp, synthetic construct
  source 1..28: mol_type = other DNA
tccttgggtgctgatgtcaatgctcagg

SEQ ID NO: 22374 - DNA, 28 bp, synthetic construct
  source 1..28: mol_type = other DNA
gcatcgtggagcttttggtgtccttggg

SEQ ID NO: 22375 - DNA, 28 bp, synthetic construct
  source 1..28: mol_type = other DNA
ggcatcgtggagcttttggtgtccttgg

SEQ ID NO: 22376 - DNA, 28 bp, synthetic construct
  source 1..28: mol_type = other DNA
ggacaccaaaagctccacgatgcccagg

SEQ ID NO: 22377 - DNA, 28 bp, synthetic construct
  source 1..28: mol_type = other DNA
ggctacctgggcatcgtggagcttttgg

SEQ ID NO: 22378 - DNA, 28 bp, synthetic construct
  source 1..28: mol_type = other DNA
aagctccacgatgcccaggtagccatgg

SEQ ID NO: 22379 - DNA, 28 bp, synthetic construct
  source 1..28: mol_type = other DNA
tctatccatggctacctgggcatcgtgg

SEQ ID NO: 22380 - DNA, 28 bp, synthetic construct
  source 1..28: mol_type = other DNA
acgatgcccaggtagccatggatagagg

SEQ ID NO: 22381 - DNA, 28 bp, synthetic construct
  source 1..28: mol_type = other DNA
acttagcctctatccatggctacctggg

SEQ ID NO: 22382 - DNA, 28 bp, synthetic construct
  source 1..28: mol_type = other DNA
cacttagcctctatccatggctacctgg

SEQ ID NO: 22383 - DNA, 28 bp, synthetic construct
  source 1..28: mol_type = other DNA
cgtgtctacacttagcctctatccatgg

SEQ ID NO: 22384 - DNA, 28 bp, synthetic construct
  source 1..28: mol_type = other DNA
gatagaggctaagtgtagacacgtgtgg

SEQ ID NO: 22385 - DNA, 28 bp, synthetic construct
  source 1..28: mol_type = other DNA
aggctaagtgtagacacgtgtggcctgg

SEQ ID NO: 22386 - DNA, 28 bp, synthetic construct
  source 1..28: mol_type = other DNA
gacacgtgtggcctggaagaacaaaagg

SEQ ID NO: 22387 - DNA, 28 bp, synthetic construct
  source 1..28: mol_type = other DNA
tatacttttttccttttgttcttccagg

SEQ ID NO: 22388 - DNA, 28 bp, synthetic construct
  source 1..28: mol_type = other DNA
agggaggcagacataccattgtagttgg

SEQ ID NO: 22389 - DNA, 28 bp, synthetic construct
  source 1..28: mol_type = other DNA
cataccattgtagttggtagccttcagg

SEQ ID NO: 22390 - DNA, 28 bp, synthetic construct
  source 1..28: mol_type = other DNA
ccattgtagttggtagccttcaggatgg

SEQ ID NO: 22391 - DNA, 28 bp, synthetic construct
  source 1..28: mol_type = other DNA
gtagttggtagccttcaggatggagtgg

SEQ ID NO: 22392 - DNA, 28 bp, synthetic construct
  source 1..28: mol_type = other DNA
gttggtagccttcaggatggagtggagg

SEQ ID NO: 22393 - DNA, 28 bp, synthetic construct
  source 1..28: mol_type = other DNA
tagccttcaggatggagtggaggtgcgg

SEQ ID NO: 22394 - DNA, 28 bp, synthetic construct
  source 1..28: mol_type = other DNA
agccttcaggatggagtggaggtgcggg

SEQ ID NO: 22395 - DNA, 28 bp, synthetic construct
  source 1..28: mol_type = other DNA
gccttcaggatggagtggaggtgcgggg

SEQ ID NO: 22396 - DNA, 28 bp, synthetic construct
  source 1..28: mol_type = other DNA
accccgcacctccactccatcctgaagg

SEQ ID NO: 22397 - DNA, 28 bp, synthetic construct
  source 1..28: mol_type = other DNA
ttcaggatggagtggaggtgcggggtgg

SEQ ID NO: 22398 - DNA, 28 bp, synthetic construct
  source 1..28: mol_type = other DNA
atggagtggaggtgcggggtggtgcagg

SEQ ID NO: 22399 - DNA, 28 bp, synthetic construct
  source 1..28: mol_type = other DNA
gtgcggggtggtgcaggactgagtcagg

SEQ ID NO: 22400 - DNA, 28 bp, synthetic construct
  source 1..28: mol_type = other DNA
caggactgagtcaggactcccacgctgg

SEQ ID NO: 22401 - DNA, 28 bp, synthetic construct
  source 1..28: mol_type = other DNA
ctgagtcaggactcccacgctggccagg

SEQ ID NO: 22402 - DNA, 28 bp, synthetic construct
  source 1..28: mol_type = other DNA
gtgagcagggctgcctggccagcgtggg

SEQ ID NO: 22403 - DNA, 28 bp, synthetic construct
  source 1..28: mol_type = other DNA
tgtgagcagggctgcctggccagcgtgg

SEQ ID NO: 22404 - DNA, 28 bp, synthetic construct
  source 1..28: mol_type = other DNA
acgctggccaggcagccctgctcacagg

SEQ ID NO: 22405 - DNA, 28 bp, synthetic construct
  source 1..28: mol_type = other DNA
ggccaggcagccctgctcacaggcaagg

SEQ ID NO: 22406 - DNA, 28 bp, synthetic construct
  source 1..28: mol_type = other DNA
caccttgcctgtgagcagggctgcctgg

SEQ ID NO: 22407 - DNA, 28 bp, synthetic construct
  source 1..28: mol_type = other DNA
gcagccctgctcacaggcaaggtgtagg

SEQ ID NO: 22408 - DNA, 28 bp, synthetic construct
  source 1..28: mol_type = other DNA
cagccctgctcacaggcaaggtgtaggg

SEQ ID NO: 22409 - DNA, 28 bp, synthetic construct
  source 1..28: mol_type = other DNA
agccctgctcacaggcaaggtgtagggg

SEQ ID NO: 22410 - DNA, 28 bp, synthetic construct
  source 1..28: mol_type = other DNA
gccctgctcacaggcaaggtgtaggggg

SEQ ID NO: 22411 - DNA, 28 bp, synthetic construct
  source 1..28: mol_type = other DNA
ccctgctcacaggcaaggtgtagggggg

SEQ ID NO: 22412 - DNA, 28 bp, synthetic construct
  source 1..28: mol_type = other DNA
acccccctacaccttgcctgtgagcagg

SEQ ID NO: 22413 - DNA, 28 bp, synthetic construct
  source 1..28: mol_type = other DNA
taggggggtatttcctcgaaagtctcgg

SEQ ID NO: 22414 - DNA, 28 bp, synthetic construct
  source 1..28: mol_type = other DNA
tatttcctcgaaagtctcggagctcagg

SEQ ID NO: 22415 - DNA, 28 bp, synthetic construct
  source 1..28: mol_type = other DNA
gtgatcctgagctccgagactttcgagg

SEQ ID NO: 22416 - DNA, 28 bp, synthetic construct
  source 1..28: mol_type = other DNA
aaattgctgaggcacttctgggagctgg

SEQ ID NO: 22417 - DNA, 28 bp, synthetic construct
  source 1..28: mol_type = other DNA
ctcccagaagtgcctcagcaatttctgg

SEQ ID NO: 22418 - DNA, 28 bp, synthetic construct
  source 1..28: mol_type = other DNA
agccagaaattgctgaggcacttctggg

SEQ ID NO: 22419 - DNA, 28 bp, synthetic construct
  source 1..28: mol_type = other DNA
cagccagaaattgctgaggcacttctgg

SEQ ID NO: 22420 - DNA, 28 bp, synthetic construct
  source 1..28: mol_type = other DNA
cagaagtgcctcagcaatttctggctgg

SEQ ID NO: 22421 - DNA, 28 bp, synthetic construct
  source 1..28: mol_type = other DNA
agtgcctcagcaatttctggctggttgg

SEQ ID NO: 22422 - DNA, 28 bp, synthetic construct
  source 1..28: mol_type = other DNA
atcaccaaccagccagaaattgctgagg

SEQ ID NO: 22423 - DNA, 28 bp, synthetic construct
  source 1..28: mol_type = other DNA
tggctggttggtgatcacagccaagtgg

SEQ ID NO: 22424 - DNA, 28 bp, synthetic construct
  source 1..28: mol_type = other DNA
ggttggtgatcacagccaagtggagtgg

SEQ ID NO: 22425 - DNA, 28 bp, synthetic construct
  source 1..28: mol_type = other DNA
ttgcattcgtagactccactccacttgg

SEQ ID NO: 22426 - DNA, 28 bp, synthetic construct
  source 1..28: mol_type = other DNA
agcaggtgcgccgcttgcctggcccggg

SEQ ID NO: 22427 - DNA, 28 bp, synthetic construct
  source 1..28: mol_type = other DNA
cagcaggtgcgccgcttgcctggcccgg

SEQ ID NO: 22428 - DNA, 28 bp, synthetic construct
  source 1..28: mol_type = other DNA
gccaggcaagcggcgcacctgctgcagg

SEQ ID NO: 22429 - DNA, 28 bp, synthetic construct
  source 1..28: mol_type = other DNA
acctgcagcaggtgcgccgcttgcctgg

SEQ ID NO: 22430 - DNA, 28 bp, synthetic construct
  source 1..28: mol_type = other DNA
gcggcgcacctgctgcaggttgttctgg

SEQ ID NO: 22431 - DNA, 28 bp, synthetic construct
  source 1..28: mol_type = other DNA
ctcaacttccagaacaacctgcagcagg

SEQ ID NO: 22432 - DNA, 28 bp, synthetic construct
  source 1..28: mol_type = other DNA
ctgctgcaggttgttctggaagttgagg

SEQ ID NO: 22433 - DNA, 28 bp, synthetic construct
  source 1..28: mol_type = other DNA
tgcaggttgttctggaagttgaggaagg

SEQ ID NO: 22434 - DNA, 28 bp, synthetic construct
  source 1..28: mol_type = other DNA
gttgttctggaagttgaggaaggccagg

SEQ ID NO: 22435 - DNA, 28 bp, synthetic construct
  source 1..28: mol_type = other DNA
gaggaaggccaggtctcccttcacctgg

SEQ ID NO: 22436 - DNA, 28 bp, synthetic construct
  source 1..28: mol_type = other DNA
gaaggccaggtctcccttcacctggcgg

SEQ ID NO: 22437 - DNA, 28 bp, synthetic construct
  source 1..28: mol_type = other DNA
gtgatccgccaggtgaagggagacctgg

SEQ ID NO: 22438 - DNA, 28 bp, synthetic construct
  source 1..28: mol_type = other DNA
cccttcacctggcggatcacttccatgg

SEQ ID NO: 22439 - DNA, 28 bp, synthetic construct
  source 1..28: mol_type = other DNA
accatggaagtgatccgccaggtgaagg

SEQ ID NO: 22440 - DNA, 28 bp, synthetic construct
  source 1..28: mol_type = other DNA
gcactgaccatggaagtgatccgccagg

SEQ ID NO: 22441 - DNA, 28 bp, synthetic construct
  source 1..28: mol_type = other DNA
ttccatggtcagtgccttttcttcatgg

SEQ ID NO: 22442 - DNA, 28 bp, synthetic construct
  source 1..28: mol_type = other DNA
atccatgaagaaaaggcactgaccatgg

SEQ ID NO: 22443 - DNA, 28 bp, synthetic construct
  source 1..28: mol_type = other DNA
gtcagtgccttttcttcatggatgatgg

SEQ ID NO: 22444 - DNA, 28 bp, synthetic construct
  source 1..28: mol_type = other DNA
cacttggccatcatccatgaagaaaagg

SEQ ID NO: 22445 - DNA, 28 bp, synthetic construct
  source 1..28: mol_type = other DNA
ttcttcatggatgatggccaagtgcagg

SEQ ID NO: 22446 - DNA, 28 bp, synthetic construct
  source 1..28: mol_type = other DNA
gatgatggccaagtgcaggaacctgtgg

SEQ ID NO: 22447 - DNA, 28 bp, synthetic construct
  source 1..28: mol_type = other DNA
atgatggccaagtgcaggaacctgtggg

SEQ ID NO: 22448 - DNA, 28 bp, synthetic construct
  source 1..28: mol_type = other DNA
tgatggccaagtgcaggaacctgtgggg

SEQ ID NO: 22449 - DNA, 28 bp, synthetic construct
  source 1..28: mol_type = other DNA
tctcttccccacaggttcctgcacttgg

SEQ ID NO: 22450 - DNA, 28 bp, synthetic construct
  source 1..28: mol_type = other DNA
aagtgcaggaacctgtggggaagagagg

SEQ ID NO: 22451 - DNA, 28 bp, synthetic construct
  source 1..28: mol_type = other DNA
agtgcaggaacctgtggggaagagaggg

SEQ ID NO: 22452 - DNA, 28 bp, synthetic construct
  source 1..28: mol_type = other DNA
tggggtttttccctctcttccccacagg

SEQ ID NO: 22453 - DNA, 28 bp, synthetic construct
  source 1..28: mol_type = other DNA
cgtaagtggcggaggcccggggctgggg

SEQ ID NO: 22454 - DNA, 28 bp, synthetic construct
  source 1..28: mol_type = other DNA
tcgtaagtggcggaggcccggggctggg

SEQ ID NO: 22455 - DNA, 28 bp, synthetic construct
  source 1..28: mol_type = other DNA
ctcgtaagtggcggaggcccggggctgg

SEQ ID NO: 22456 - DNA, 28 bp, synthetic construct
  source 1..28: mol_type = other DNA
gggactcgtaagtggcggaggcccgggg

SEQ ID NO: 22457 - DNA, 28 bp, synthetic construct
  source 1..28: mol_type = other DNA
ggggactcgtaagtggcggaggcccggg

SEQ ID NO: 22458 - DNA, 28 bp, synthetic construct
  source 1..28: mol_type = other DNA
cggggactcgtaagtggcggaggcccgg

SEQ ID NO: 22459 - DNA, 28 bp, synthetic construct
  source 1..28: mol_type = other DNA
gaggacggggactcgtaagtggcggagg

SEQ ID NO: 22460 - DNA, 28 bp, synthetic construct
  source 1..28: mol_type = other DNA
tccgccacttacgagtccccgtcctcgg

SEQ ID NO: 22461 - DNA, 28 bp, synthetic construct
  source 1..28: mol_type = other DNA
accgaggacggggactcgtaagtggcgg

SEQ ID NO: 22462 - DNA, 28 bp, synthetic construct
  source 1..28: mol_type = other DNA
ctcaccgaggacggggactcgtaagtgg

SEQ ID NO: 22463 - DNA, 28 bp, synthetic construct
  source 1..28: mol_type = other DNA
tggaagcagcagctcaccgaggacgggg

SEQ ID NO: 22464 - DNA, 28 bp, synthetic construct
  source 1..28: mol_type = other DNA
ctggaagcagcagctcaccgaggacggg

SEQ ID NO: 22465 - DNA, 28 bp, synthetic construct
  source 1..28: mol_type = other DNA
ccgtcctcggtgagctgctgcttccagg

SEQ ID NO: 22466 - DNA, 28 bp, synthetic construct
  source 1..28: mol_type = other DNA
cgtcctcggtgagctgctgcttccaggg

SEQ ID NO: 22467 - DNA, 28 bp, synthetic construct
  source 1..28: mol_type = other DNA
gagccctggaagcagcagctcaccgagg

SEQ ID NO: 22468 - DNA, 28 bp, synthetic construct
  source 1..28: mol_type = other DNA
gctgcttccagggctccgagccgcgcgg

SEQ ID NO: 22469 - DNA, 28 bp, synthetic construct
  source 1..28: mol_type = other DNA
ggaggtgccgcgcggctcggagccctgg

SEQ ID NO: 22470 - DNA, 28 bp, synthetic construct
  source 1..28: mol_type = other DNA
gctccgagccgcgcggcacctcctgcgg

SEQ ID NO: 22471 - DNA, 28 bp, synthetic construct
  source 1..28: mol_type = other DNA
gagccgcaggaggtgccgcgcggctcgg

SEQ ID NO: 22472 - DNA, 28 bp, synthetic construct
  source 1..28: mol_type = other DNA
gccgcgcggcacctcctgcggctcgagg

SEQ ID NO: 22473 - DNA, 28 bp, synthetic construct
  source 1..28: mol_type = other DNA
gcctcgagccgcaggaggtgccgcgcgg

SEQ ID NO: 22474 - DNA, 28 bp, synthetic construct
  source 1..28: mol_type = other DNA
gcgcggcacctcctgcggctcgaggcgg

SEQ ID NO: 22475 - DNA, 28 bp, synthetic construct
  source 1..28: mol_type = other DNA
caggagatccgcctcgagccgcaggagg

SEQ ID NO: 22476 - DNA, 28 bp, synthetic construct
  source 1..28: mol_type = other DNA
ctgcaggagatccgcctcgagccgcagg

SEQ ID NO: 22477 - DNA, 28 bp, synthetic construct
  source 1..28: mol_type = other DNA
tacgagcagatggtcaaggagctgcagg

SEQ ID NO: 22478 - DNA, 28 bp, synthetic construct
  source 1..28: mol_type = other DNA
gacgaggagtacgagcagatggtcaagg

SEQ ID NO: 22479 - DNA, 28 bp, synthetic construct
  source 1..28: mol_type = other DNA
atgaaagacgaggagtacgagcagatgg

SEQ ID NO: 22480 - DNA, 28 bp, synthetic construct
  source 1..28: mol_type = other DNA
atctgctcgtactcctcgtctttcatgg

SEQ ID NO: 22481 - DNA, 28 bp, synthetic construct
  source 1..28: mol_type = other DNA
gtactcctcgtctttcatggagtccagg

SEQ ID NO: 22482 - DNA, 28 bp, synthetic construct
  source 1..28: mol_type = other DNA
agcggcctggactccatgaaagacgagg

SEQ ID NO: 22483 - DNA, 28 bp, synthetic construct
  source 1..28: mol_type = other DNA
tttcatggagtccaggccgctgtcgtgg

SEQ ID NO: 22484 - DNA, 28 bp, synthetic construct
  source 1..28: mol_type = other DNA
catggagtccaggccgctgtcgtggcgg

SEQ ID NO: 22485 - DNA, 28 bp, synthetic construct
  source 1..28: mol_type = other DNA
ctggacgaccgccacgacagcggcctgg

SEQ ID NO: 22486 - DNA, 28 bp, synthetic construct
  source 1..28: mol_type = other DNA
ggctactggacgaccgccacgacagcgg

SEQ ID NO: 22487 - DNA, 28 bp, synthetic construct
  source 1..28: mol_type = other DNA
gacgggctgaagaaggagcggctactgg

SEQ ID NO: 22488 - DNA, 28 bp, synthetic construct
  source 1..28: mol_type = other DNA
tagccgctccttcttcagcccgtcgcgg

SEQ ID NO: 22489 - DNA, 28 bp, synthetic construct
  source 1..28: mol_type = other DNA
agccgctccttcttcagcccgtcgcggg

SEQ ID NO: 22490 - DNA, 28 bp, synthetic construct
  source 1..28: mol_type = other DNA
gccgctccttcttcagcccgtcgcgggg

SEQ ID NO: 22491 - DNA, 28 bp, synthetic construct
  source 1..28: mol_type = other DNA
ccgctccttcttcagcccgtcgcggggg

SEQ ID NO: 22492 - DNA, 28 bp, synthetic construct
  source 1..28: mol_type = other DNA
gagggcccccgcgacgggctgaagaagg

SEQ ID NO: 22493 - DNA, 28 bp, synthetic construct
  source 1..28: mol_type = other DNA
ttcagcccgtcgcgggggccctccatgg

SEQ ID NO: 22494 - DNA, 28 bp, synthetic construct
  source 1..28: mol_type = other DNA
gtgggccatggagggcccccgcgacggg

SEQ ID NO: 22495 - DNA, 28 bp, synthetic construct
  source 1..28: mol_type = other DNA
agtgggccatggagggcccccgcgacgg

SEQ ID NO: 22496 - DNA, 28 bp, synthetic construct
  source 1..28: mol_type = other DNA
gcgggggccctccatggcccactcctgg

SEQ ID NO: 22497 - DNA, 28 bp, synthetic construct
  source 1..28: mol_type = other DNA
cgggggccctccatggcccactcctggg

SEQ ID NO: 22498 - DNA, 28 bp, synthetic construct
  source 1..28: mol_type = other DNA
gggggccctccatggcccactcctgggg

SEQ ID NO: 22499 - DNA, 28 bp, synthetic construct
  source 1..28: mol_type = other DNA
ggggccctccatggcccactcctggggg

SEQ ID NO: 22500 - DNA, 28 bp, synthetic construct
  source 1..28: mol_type = other DNA
agcgcccccaggagtgggccatggaggg

SEQ ID NO: 22501 - DNA, 28 bp, synthetic construct
  source 1..28: mol_type = other DNA
gagcgcccccaggagtgggccatggagg

SEQ ID NO: 22502 - DNA, 28 bp, synthetic construct
  source 1..28: mol_type = other DNA
tccatggcccactcctgggggcgctcgg

SEQ ID NO: 22503 - DNA, 28 bp, synthetic construct
  source 1..28: mol_type = other DNA
gccgagcgcccccaggagtgggccatgg

SEQ ID NO: 22504 - DNA, 28 bp, synthetic construct
  source 1..28: mol_type = other DNA
caggcggccgagcgcccccaggagtggg

SEQ ID NO: 22505 - DNA, 28 bp, synthetic construct
  source 1..28: mol_type = other DNA
ccactcctgggggcgctcggccgcctgg

SEQ ID NO: 22506 - DNA, 28 bp, synthetic construct
  source 1..28: mol_type = other DNA
atgttccaggcggccgagcgcccccagg

SEQ ID NO: 22507 - DNA, 28 bp, synthetic construct
  source 1..28: mol_type = other DNA
tgggggcgctcggccgcctggaacatgg

SEQ ID NO: 22508 - DNA, 28 bp, synthetic construct
  source 1..28: mol_type = other DNA
gcgctcggccgcctggaacatggcgcgg

SEQ ID NO: 22509 - DNA, 28 bp, synthetic construct
  source 1..28: mol_type = other DNA
cagctcgtccgcgccatgttccaggcgg

SEQ ID NO: 22510 - DNA, 28 bp, synthetic construct
  source 1..28: mol_type = other DNA
cctggaacatggcgcggacgagctgcgg

SEQ ID NO: 22511 - DNA, 28 bp, synthetic construct
  source 1..28: mol_type = other DNA
ctggaacatggcgcggacgagctgcggg

SEQ ID NO: 22512 - DNA, 28 bp, synthetic construct
  source 1..28: mol_type = other DNA
cgcggacgagctgcgggcgctgctgcgg

SEQ ID NO: 22513 - DNA, 28 bp, synthetic construct
  source 1..28: mol_type = other DNA
gcggacgagctgcgggcgctgctgcggg

SEQ ID NO: 22514 - DNA, 28 bp, synthetic construct
  source 1..28: mol_type = other DNA
gctgcgggcgctgctgcgggtgcgctgg

SEQ ID NO: 22515 - DNA, 28 bp, synthetic construct
  source 1..28: mol_type = other DNA
ctgcgggcgctgctgcgggtgcgctggg

SEQ ID NO: 22516 - DNA, 28 bp, synthetic construct
  source 1..28: mol_type = other DNA
gcgctgctgcgggtgcgctgggccgcgg

SEQ ID NO: 22517 - DNA, 28 bp, synthetic construct
  source 1..28: mol_type = other DNA
cgctgctgcgggtgcgctgggccgcggg

SEQ ID NO: 22518 - DNA, 28 bp, synthetic construct
  source 1..28: mol_type = other DNA
cagcgaggaagcagcgcgcagcccgcgg

SEQ ID NO: 22519 - DNA, 28 bp, synthetic construct
  source 1..28: mol_type = other DNA
cgcgggctgcgcgctgcttcctcgctgg

SEQ ID NO: 22520 - DNA, 28 bp, synthetic construct
  source 1..28: mol_type = other DNA
gcgggctgcgcgctgcttcctcgctggg

SEQ ID NO: 22521 - DNA, 28 bp, synthetic construct
  source 1..28: mol_type = other DNA
cgggctgcgcgctgcttcctcgctgggg

SEQ ID NO: 22522 - DNA, 28 bp, synthetic construct
  source 1..28: mol_type = other DNA
gcgcgctgcttcctcgctggggcgctgg

SEQ ID NO: 22523 - DNA, 28 bp, synthetic construct
  source 1..28: mol_type = other DNA
cgctgcttcctcgctggggcgctggcgg

SEQ ID NO: 22524 - DNA, 28 bp, synthetic construct
  source 1..28: mol_type = other DNA
gctgcttcctcgctggggcgctggcggg

SEQ ID NO: 22525 - DNA, 28 bp, synthetic construct
  source 1..28: mol_type = other DNA
gcttcctcgctggggcgctggcgggcgg

SEQ ID NO: 22526 - DNA, 28 bp, synthetic construct
  source 1..28: mol_type = other DNA
cttcctcgctggggcgctggcgggcggg

SEQ ID NO: 22527 - DNA, 28 bp, synthetic construct
  source 1..28: mol_type = other DNA
cgtcccgcccgccagcgccccagcgagg

SEQ ID NO: 22528 - DNA, 28 bp, synthetic construct
  source 1..28: mol_type = other DNA
ctcgctggggcgctggcgggcgggacgg

SEQ ID NO: 22529 - DNA, 28 bp, synthetic construct
  source 1..28: mol_type = other DNA
gctggggcgctggcgggcgggacggcgg

SEQ ID NO: 22530 - DNA, 28 bp, synthetic construct
  source 1..28: mol_type = other DNA
ggcgctggcgggcgggacggcggcacgg

SEQ ID NO: 22531 - DNA, 28 bp, synthetic construct
  source 1..28: mol_type = other DNA
ggcgggacggcggcacggactgctgtgg

SEQ ID NO: 22532 - DNA, 28 bp, synthetic construct
  source 1..28: mol_type = other DNA
gcgggacggcggcacggactgctgtggg

SEQ ID NO: 22533 - DNA, 28 bp, synthetic construct
  source 1..28: mol_type = other DNA
tgctgtgggctctgcagcgccgccgcgg

SEQ ID NO: 22534 - DNA, 28 bp, synthetic construct
  source 1..28: mol_type = other DNA
cgccgccgcggcgccctataaacgctgg

SEQ ID NO: 22535 - DNA, 28 bp, synthetic construct
  source 1..28: mol_type = other DNA
agccagcgtttatagggcgccgcggcgg

SEQ ID NO: 22536 - DNA, 28 bp, synthetic construct
  source 1..28: mol_type = other DNA
gccgcggcgccctataaacgctggctgg

SEQ ID NO: 22537 - DNA, 28 bp, synthetic construct
  source 1..28: mol_type = other DNA
ccgcggcgccctataaacgctggctggg

SEQ ID NO: 22538 - DNA, 28 bp, synthetic construct
  source 1..28: mol_type = other DNA
cgcggcgccctataaacgctggctgggg

SEQ ID NO: 22539 - DNA, 28 bp, synthetic construct
  source 1..28: mol_type = other DNA
gagaaatccccagccagcgtttataggg

SEQ ID NO: 22540 - DNA, 28 bp, synthetic construct
  source 1..28: mol_type = other DNA
agagaaatccccagccagcgtttatagg

SEQ ID NO: 22541 - DNA, 28 bp, synthetic construct
  source 1..28: mol_type = other DNA
tataaacgctggctggggatttctctgg

SEQ ID NO: 22542 - DNA, 28 bp, synthetic construct
  source 1..28: mol_type = other DNA
ataaacgctggctggggatttctctggg

SEQ ID NO: 22543 - DNA, 28 bp, synthetic construct
  source 1..28: mol_type = other DNA
taaacgctggctggggatttctctgggg

SEQ ID NO: 22544 - DNA, 28 bp, synthetic construct
  source 1..28: mol_type = other DNA
acgctggctggggatttctctggggcgg

SEQ ID NO: 22545 - DNA, 28 bp, synthetic construct
  source 1..28: mol_type = other DNA
cgctggctggggatttctctggggcggg

SEQ ID NO: 22546 - DNA, 28 bp, synthetic construct
  source 1..28: mol_type = other DNA
gctggctggggatttctctggggcgggg

SEQ ID NO: 22547 - DNA, 28 bp, synthetic construct
  source 1..28: mol_type = other DNA
ctggggatttctctggggcggggtcagg

SEQ ID NO: 22548 - DNA, 28 bp, synthetic construct
  source 1..28: mol_type = other DNA
gatttctctggggcggggtcaggctcgg

SEQ ID NO: 22549 - DNA, 28 bp, synthetic construct
  source 1..28: mol_type = other DNA
atttctctggggcggggtcaggctcggg

SEQ ID NO: 22550 - DNA, 28 bp, synthetic construct
  source 1..28: mol_type = other DNA
tttctctggggcggggtcaggctcgggg

SEQ ID NO: 22551 - DNA, 28 bp, synthetic construct
  source 1..28: mol_type = other DNA
ttctctttttctggtctgactggcttgg

SEQ ID NO: 22552 - DNA, 28 bp, synthetic construct
  source 1..28: mol_type = other DNA
gccagtcagaccagaaaaagagaactgg

SEQ ID NO: 22553 - DNA, 28 bp, synthetic construct
  source 1..28: mol_type = other DNA
gccagttctctttttctggtctgactgg

SEQ ID NO: 22554 - DNA, 28 bp, synthetic construct
  source 1..28: mol_type = other DNA
gaggacgaagccagttctctttttctgg

SEQ ID NO: 22555 - DNA, 28 bp, synthetic construct
  source 1..28: mol_type = other DNA
aagagaactggcttcgtcctctgctagg

SEQ ID NO: 22556 - DNA, 28 bp, synthetic construct
  source 1..28: mol_type = other DNA
agagaactggcttcgtcctctgctaggg

SEQ ID NO: 22557 - DNA, 28 bp, synthetic construct
  source 1..28: mol_type = other DNA
gagaactggcttcgtcctctgctagggg

SEQ ID NO: 22558 - DNA, 28 bp, synthetic construct
  source 1..28: mol_type = other DNA
agaactggcttcgtcctctgctaggggg

SEQ ID NO: 22559 - DNA, 28 bp, synthetic construct
  source 1..28: mol_type = other DNA
ttaggcttctttttccccctagcagagg

SEQ ID NO: 22560 - DNA, 28 bp, synthetic construct
  source 1..28: mol_type = other DNA
ggaaaaagaagcctaaaccctgagctgg

SEQ ID NO: 22561 - DNA, 28 bp, synthetic construct
  source 1..28: mol_type = other DNA
gaaaaagaagcctaaaccctgagctggg

SEQ ID NO: 22562 - DNA, 28 bp, synthetic construct
  source 1..28: mol_type = other DNA
aaaaagaagcctaaaccctgagctgggg

SEQ ID NO: 22563 - DNA, 28 bp, synthetic construct
  source 1..28: mol_type = other DNA
gcctaaaccctgagctggggttcatcgg

SEQ ID NO: 22564 - DNA, 28 bp, synthetic construct
  source 1..28: mol_type = other DNA
tccgatgaaccccagctcagggtttagg

SEQ ID NO: 22565 - DNA, 28 bp, synthetic construct
  source 1..28: mol_type = other DNA
agtttctccgatgaaccccagctcaggg

SEQ ID NO: 22566 - DNA, 28 bp, synthetic construct
  source 1..28: mol_type = other DNA
gagtttctccgatgaaccccagctcagg

SEQ ID NO: 22567 - DNA, 28 bp, synthetic construct
  source 1..28: mol_type = other DNA
gagaaactccctgcgatgagccactagg

SEQ ID NO: 22568 - DNA, 28 bp, synthetic construct
  source 1..28: mol_type = other DNA
agaaactccctgcgatgagccactaggg

SEQ ID NO: 22569 - DNA, 28 bp, synthetic construct
  source 1..28: mol_type = other DNA
tccctgcgatgagccactagggtcacgg

SEQ ID NO: 22570 - DNA, 28 bp, synthetic construct
  source 1..28: mol_type = other DNA
tccgtgaccctagtggctcatcgcaggg

SEQ ID NO: 22571 - DNA, 28 bp, synthetic construct
  source 1..28: mol_type = other DNA
gtccgtgaccctagtggctcatcgcagg

SEQ ID NO: 22572 - DNA, 28 bp, synthetic construct
  source 1..28: mol_type = other DNA
gcgatgagccactagggtcacggacagg

SEQ ID NO: 22573 - DNA, 28 bp, synthetic construct
  source 1..28: mol_type = other DNA
cgatgagccactagggtcacggacaggg

SEQ ID NO: 22574 - DNA, 28 bp, synthetic construct
  source 1..28: mol_type = other DNA
aaaagttccctgtccgtgaccctagtgg

SEQ ID NO: 22575 - DNA, 28 bp, synthetic construct
  source 1..28: mol_type = other DNA
agggaactttttgatgagcgccgagtgg

SEQ ID NO: 22576 - DNA, 28 bp, synthetic construct
  source 1..28: mol_type = other DNA
aactttttgatgagcgccgagtggctgg

SEQ ID NO: 22577 - DNA, 28 bp, synthetic construct
  source 1..28: mol_type = other DNA
tggtcggaaggactttccagccactcgg

SEQ ID NO: 22578 - DNA, 28 bp, synthetic construct
  source 1..28: mol_type = other DNA
gagtggctggaaagtccttccgaccagg

SEQ ID NO: 22579 - DNA, 28 bp, synthetic construct
  source 1..28: mol_type = other DNA
tccttccgaccaggccccctccccccgg

SEQ ID NO: 22580 - DNA, 28 bp, synthetic construct
  source 1..28: mol_type = other DNA
accggggggagggggcctggtcggaagg

SEQ ID NO: 22581 - DNA, 28 bp, synthetic construct
  source 1..28: mol_type = other DNA
aagtaccggggggagggggcctggtcgg

SEQ ID NO: 22582 - DNA, 28 bp, synthetic construct
  source 1..28: mol_type = other DNA
agggaagtaccggggggagggggcctgg

SEQ ID NO: 22583 - DNA, 28 bp, synthetic construct
  source 1..28: mol_type = other DNA
gctgcagggaagtaccggggggaggggg

SEQ ID NO: 22584 - DNA, 28 bp, synthetic construct
  source 1..28: mol_type = other DNA
ggctgcagggaagtaccggggggagggg

SEQ ID NO: 22585 - DNA, 28 bp, synthetic construct
  source 1..28: mol_type = other DNA
aggctgcagggaagtaccggggggaggg

SEQ ID NO: 22586 - DNA, 28 bp, synthetic construct
  source 1..28: mol_type = other DNA
caggctgcagggaagtaccggggggagg

SEQ ID NO: 22587 - DNA, 28 bp, synthetic construct
  source 1..28: mol_type = other DNA
gtgcaggctgcagggaagtaccgggggg

SEQ ID NO: 22588 - DNA, 28 bp, synthetic construct
  source 1..28: mol_type = other DNA
ggtgcaggctgcagggaagtaccggggg

SEQ ID NO: 22589 - DNA, 28 bp, synthetic construct
  source 1..28: mol_type = other DNA
gggtgcaggctgcagggaagtaccgggg

SEQ ID NO: 22590 - DNA, 28 bp, synthetic construct
  source 1..28: mol_type = other DNA
agggtgcaggctgcagggaagtaccggg

SEQ ID NO: 22591 - DNA, 28 bp, synthetic construct
  source 1..28: mol_type = other DNA
cagggtgcaggctgcagggaagtaccgg

SEQ ID NO: 22592 - DNA, 28 bp, synthetic construct
  source 1..28: mol_type = other DNA
acaggattacagggtgcaggctgcaggg

SEQ ID NO: 22593 - DNA, 28 bp, synthetic construct
  source 1..28: mol_type = other DNA
gacaggattacagggtgcaggctgcagg

SEQ ID NO: 22594 - DNA, 28 bp, synthetic construct
  source 1..28: mol_type = other DNA
gcagagggacaggattacagggtgcagg

SEQ ID NO: 22595 - DNA, 28 bp, synthetic construct
  source 1..28: mol_type = other DNA
tcacttgcagagggacaggattacaggg

SEQ ID NO: 22596 - DNA, 28 bp, synthetic construct
  source 1..28: mol_type = other DNA
ctcacttgcagagggacaggattacagg

SEQ ID NO: 22597 - DNA, 28 bp, synthetic construct
  source 1..28: mol_type = other DNA
aaagaaggctcacttgcagagggacagg

SEQ ID NO: 22598 - DNA, 28 bp, synthetic construct
  source 1..28: mol_type = other DNA
cagggaaagaaggctcacttgcagaggg

SEQ ID NO: 22599 - DNA, 28 bp, synthetic construct
  source 1..28: mol_type = other DNA
cctctgcaagtgagccttctttccctgg

SEQ ID NO: 22600 - DNA, 28 bp, synthetic construct
  source 1..28: mol_type = other DNA
ctctgcaagtgagccttctttccctggg

SEQ ID NO: 22601 - DNA, 28 bp, synthetic construct
  source 1..28: mol_type = other DNA
tctgcaagtgagccttctttccctgggg

SEQ ID NO: 22602 - DNA, 28 bp, synthetic construct
  source 1..28: mol_type = other DNA
gatcgtgggaaaccccagggaaagaagg

SEQ ID NO: 22603 - DNA, 28 bp, synthetic construct
  source 1..28: mol_type = other DNA
ttcaaatcgatcgtgggaaaccccaggg

SEQ ID NO: 22604 - DNA, 28 bp, synthetic construct
  source 1..28: mol_type = other DNA
attcaaatcgatcgtgggaaaccccagg

SEQ ID NO: 22605 - DNA, 28 bp, synthetic construct
  source 1..28: mol_type = other DNA
ggggtttcccacgatcgatttgaattgg

SEQ ID NO: 22606 - DNA, 28 bp, synthetic construct
  source 1..28: mol_type = other DNA
gggtttcccacgatcgatttgaattggg

SEQ ID NO: 22607 - DNA, 28 bp, synthetic construct
  source 1..28: mol_type = other DNA
ggtttcccacgatcgatttgaattgggg

SEQ ID NO: 22608 - DNA, 28 bp, synthetic construct
  source 1..28: mol_type = other DNA
gacgaccccaattcaaatcgatcgtggg

SEQ ID NO: 22609 - DNA, 28 bp, synthetic construct
  source 1..28: mol_type = other DNA
cgacgaccccaattcaaatcgatcgtgg

SEQ ID NO: 22610 - DNA, 28 bp, synthetic construct
  source 1..28: mol_type = other DNA
cacgatcgatttgaattggggtcgtcgg

SEQ ID NO: 22611 - DNA, 28 bp, synthetic construct
  source 1..28: mol_type = other DNA
ggggtcgtcggctgctgagatcccaagg

SEQ ID NO: 22612 - DNA, 28 bp, synthetic construct
  source 1..28: mol_type = other DNA
tgagatcccaaggacgccgacctgatgg

SEQ ID NO: 22613 - DNA, 28 bp, synthetic construct
  source 1..28: mol_type = other DNA
gagatcccaaggacgccgacctgatggg

SEQ ID NO: 22614 - DNA, 28 bp, synthetic construct
  source 1..28: mol_type = other DNA
atcccaaggacgccgacctgatgggcgg

SEQ ID NO: 22615 - DNA, 28 bp, synthetic construct
  source 1..28: mol_type = other DNA
gaccgcccatcaggtcggcgtccttggg

SEQ ID NO: 22616 - DNA, 28 bp, synthetic construct
  source 1..28: mol_type = other DNA
ggaccgcccatcaggtcggcgtccttgg

SEQ ID NO: 22617 - DNA, 28 bp, synthetic construct
  source 1..28: mol_type = other DNA
gccgacctgatgggcggtccctctttgg

SEQ ID NO: 22618 - DNA, 28 bp, synthetic construct
  source 1..28: mol_type = other DNA
ccgacctgatgggcggtccctctttggg

SEQ ID NO: 22619 - DNA, 28 bp, synthetic construct
  source 1..28: mol_type = other DNA
cgacctgatgggcggtccctctttgggg

SEQ ID NO: 22620 - DNA, 28 bp, synthetic construct
  source 1..28: mol_type = other DNA
aaaccccaaagagggaccgcccatcagg

SEQ ID NO: 22621 - DNA, 28 bp, synthetic construct
  source 1..28: mol_type = other DNA
ccctctttggggtttgccaacctgccgg

SEQ ID NO: 22622 - DNA, 28 bp, synthetic construct
  source 1..28: mol_type = other DNA
accggcaggttggcaaaccccaaagagg

SEQ ID NO: 22623 - DNA, 28 bp, synthetic construct
  source 1..28: mol_type = other DNA
caaaaaacggaaaggaccggcaggttgg

SEQ ID NO: 22624 - DNA, 28 bp, synthetic construct
  source 1..28: mol_type = other DNA
agatcaaaaaacggaaaggaccggcagg

SEQ ID NO: 22625 - DNA, 28 bp, synthetic construct
  source 1..28: mol_type = other DNA
caaaagatcaaaaaacggaaaggaccgg

SEQ ID NO: 22626 - DNA, 28 bp, synthetic construct
  source 1..28: mol_type = other DNA
gttttcaaaagatcaaaaaacggaaagg

SEQ ID NO: 22627 - DNA, 28 bp, synthetic construct
  source 1..28: mol_type = other DNA
cttgcgttttcaaaagatcaaaaaacgg

SEQ ID NO: 22628 - DNA, 28 bp, synthetic construct
  source 1..28: mol_type = other DNA
ttttgatcttttgaaaacgcaagagtgg

SEQ ID NO: 22629 - DNA, 28 bp, synthetic construct
  source 1..28: mol_type = other DNA
tttgaaaacgcaagagtggaaatgatgg

SEQ ID NO: 22630 - DNA, 28 bp, synthetic construct
  source 1..28: mol_type = other DNA
aaaacgcaagagtggaaatgatggctgg

SEQ ID NO: 22631 - DNA, 28 bp, synthetic construct
  source 1..28: mol_type = other DNA
aaacgcaagagtggaaatgatggctggg

SEQ ID NO: 22632 - DNA, 28 bp, synthetic construct
  source 1..28: mol_type = other DNA
aagagtggaaatgatggctgggcgtagg

SEQ ID NO: 22633 - DNA, 28 bp, synthetic construct
  source 1..28: mol_type = other DNA
agagtggaaatgatggctgggcgtaggg

SEQ ID NO: 22634 - DNA, 28 bp, synthetic construct
  source 1..28: mol_type = other DNA
gggatttgctttccccagacttctaagg

SEQ ID NO: 22635 - DNA, 28 bp, synthetic construct
  source 1..28: mol_type = other DNA
ggatttgctttccccagacttctaaggg

SEQ ID NO: 22636 - DNA, 28 bp, synthetic construct
  source 1..28: mol_type = other DNA
gatttgctttccccagacttctaagggg

SEQ ID NO: 22637 - DNA, 28 bp, synthetic construct
  source 1..28: mol_type = other DNA
tgctttccccagacttctaaggggaagg

SEQ ID NO: 22638 - DNA, 28 bp, synthetic construct
  source 1..28: mol_type = other DNA
gtgcgtccttccccttagaagtctgggg

SEQ ID NO: 22639 - DNA, 28 bp, synthetic construct
  source 1..28: mol_type = other DNA
agtgcgtccttccccttagaagtctggg

SEQ ID NO: 22640 - DNA, 28 bp, synthetic construct
  source 1..28: mol_type = other DNA
cagtgcgtccttccccttagaagtctgg

SEQ ID NO: 22641 - DNA, 28 bp, synthetic construct
  source 1..28: mol_type = other DNA
gacttctaaggggaaggacgcactgtgg

SEQ ID NO: 22642 - DNA, 28 bp, synthetic construct
  source 1..28: mol_type = other DNA
ctaaggggaaggacgcactgtggttagg

SEQ ID NO: 22643 - DNA, 28 bp, synthetic construct
  source 1..28: mol_type = other DNA
taaggggaaggacgcactgtggttaggg

SEQ ID NO: 22644 - DNA, 28 bp, synthetic construct
  source 1..28: mol_type = other DNA
aaggggaaggacgcactgtggttagggg

SEQ ID NO: 22645 - DNA, 28 bp, synthetic construct
  source 1..28: mol_type = other DNA
aggggaaggacgcactgtggttaggggg

SEQ ID NO: 22646 - DNA, 28 bp, synthetic construct
  source 1..28: mol_type = other DNA
ggacgcactgtggttagggggctgcagg

SEQ ID NO: 22647 - DNA, 28 bp, synthetic construct
  source 1..28: mol_type = other DNA
gtggttagggggctgcaggccgcgccgg

SEQ ID NO: 22648 - DNA, 28 bp, synthetic construct
  source 1..28: mol_type = other DNA
ccgcgccggtgtttctgcctataccagg

SEQ ID NO: 22649 - DNA, 28 bp, synthetic construct
  source 1..28: mol_type = other DNA
aagagcctggtataggcagaaacaccgg

SEQ ID NO: 22650 - DNA, 28 bp, synthetic construct
  source 1..28: mol_type = other DNA
gcctataccaggctctttgcagcaaagg

SEQ ID NO: 22651 - DNA, 28 bp, synthetic construct
  source 1..28: mol_type = other DNA
tcctttgctgcaaagagcctggtatagg

SEQ ID NO: 22652 - DNA, 28 bp, synthetic construct
  source 1..28: mol_type = other DNA
aaaagttcctttgctgcaaagagcctgg

SEQ ID NO: 22653 - DNA, 28 bp, synthetic construct
  source 1..28: mol_type = other DNA
ctggcgggggtgcgtgggggggtggggg

SEQ ID NO: 22654 - DNA, 28 bp, synthetic construct
  source 1..28: mol_type = other DNA
ccccacccccccacgcacccccgccagg

SEQ ID NO: 22655 - DNA, 28 bp, synthetic construct
  source 1..28: mol_type = other DNA
acctggcgggggtgcgtgggggggtggg

SEQ ID NO: 22656 - DNA, 28 bp, synthetic construct
  source 1..28: mol_type = other DNA
tacctggcgggggtgcgtgggggggtgg

SEQ ID NO: 22657 - DNA, 28 bp, synthetic construct
  source 1..28: mol_type = other DNA
ttctacctggcgggggtgcgtggggggg

SEQ ID NO: 22658 - DNA, 28 bp, synthetic construct
  source 1..28: mol_type = other DNA
cttctacctggcgggggtgcgtgggggg

SEQ ID NO: 22659 - DNA, 28 bp, synthetic construct
  source 1..28: mol_type = other DNA
acttctacctggcgggggtgcgtggggg

SEQ ID NO: 22660 - DNA, 28 bp, synthetic construct
  source 1..28: mol_type = other DNA
aacttctacctggcgggggtgcgtgggg

SEQ ID NO: 22661 - DNA, 28 bp, synthetic construct
  source 1..28: mol_type = other DNA
caacttctacctggcgggggtgcgtggg

SEQ ID NO: 22662 - DNA, 28 bp, synthetic construct
  source 1..28: mol_type = other DNA
acaacttctacctggcgggggtgcgtgg

SEQ ID NO: 22663 - DNA, 28 bp, synthetic construct
  source 1..28: mol_type = other DNA
agctttcacaacttctacctggcggggg

SEQ ID NO: 22664 - DNA, 28 bp, synthetic construct
  source 1..28: mol_type = other DNA
aagctttcacaacttctacctggcgggg

SEQ ID NO: 22665 - DNA, 28 bp, synthetic construct
  source 1..28: mol_type = other DNA
aaagctttcacaacttctacctggcggg

SEQ ID NO: 22666 - DNA, 28 bp, synthetic construct
  source 1..28: mol_type = other DNA
caaagctttcacaacttctacctggcgg

SEQ ID NO: 22667 - DNA, 28 bp, synthetic construct
  source 1..28: mol_type = other DNA
cgccaggtagaagttgtgaaagctttgg

SEQ ID NO: 22668 - DNA, 28 bp, synthetic construct
  source 1..28: mol_type = other DNA
ctccaaagctttcacaacttctacctgg

SEQ ID NO: 22669 - DNA, 28 bp, synthetic construct
  source 1..28: mol_type = other DNA
caggtagaagttgtgaaagctttggagg

SEQ ID NO: 22670 - DNA, 28 bp, synthetic construct
  source 1..28: mol_type = other DNA
tggaggagtgaaaagcctaaatccttgg

SEQ ID NO: 22671 - DNA, 28 bp, synthetic construct
  source 1..28: mol_type = other DNA
tgatttgagagttctccaaggatttagg

SEQ ID NO: 22672 - DNA, 28 bp, synthetic construct
  source 1..28: mol_type = other DNA
taggaagtgatttgagagttctccaagg

SEQ ID NO: 22673 - DNA, 28 bp, synthetic construct
  source 1..28: mol_type = other DNA
ttggagaactctcaaatcacttcctagg

SEQ ID NO: 22674 - DNA, 28 bp, synthetic construct
  source 1..28: mol_type = other DNA
tggagaactctcaaatcacttcctaggg

SEQ ID NO: 22675 - DNA, 28 bp, synthetic construct
  source 1..28: mol_type = other DNA
cctagggatgaacagccctgttgactgg

SEQ ID NO: 22676 - DNA, 28 bp, synthetic construct
  source 1..28: mol_type = other DNA
ctagggatgaacagccctgttgactggg

SEQ ID NO: 22677 - DNA, 28 bp, synthetic construct
  source 1..28: mol_type = other DNA
tagggatgaacagccctgttgactgggg

SEQ ID NO: 22678 - DNA, 28 bp, synthetic construct
  source 1..28: mol_type = other DNA
agggatgaacagccctgttgactggggg

SEQ ID NO: 22679 - DNA, 28 bp, synthetic construct
  source 1..28: mol_type = other DNA
gatgaacagccctgttgactgggggagg

SEQ ID NO: 22680 - DNA, 28 bp, synthetic construct
  source 1..28: mol_type = other DNA
atgaacagccctgttgactgggggaggg

SEQ ID NO: 22681 - DNA, 28 bp, synthetic construct
  source 1..28: mol_type = other DNA
tgaacagccctgttgactgggggagggg

SEQ ID NO: 22682 - DNA, 28 bp, synthetic construct
  source 1..28: mol_type = other DNA
gcgtttgcccctcccccagtcaacaggg

SEQ ID NO: 22683 - DNA, 28 bp, synthetic construct
  source 1..28: mol_type = other DNA
agcgtttgcccctcccccagtcaacagg

SEQ ID NO: 22684 - DNA, 28 bp, synthetic construct
  source 1..28: mol_type = other DNA
gggggaggggcaaacgctccctgtatgg

SEQ ID NO: 22685 - DNA, 28 bp, synthetic construct
  source 1..28: mol_type = other DNA
ggggaggggcaaacgctccctgtatggg

SEQ ID NO: 22686 - DNA, 28 bp, synthetic construct
  source 1..28: mol_type = other DNA
gggaggggcaaacgctccctgtatgggg

SEQ ID NO: 22687 - DNA, 28 bp, synthetic construct
  source 1..28: mol_type = other DNA
tccctgtatggggaaactgctgaatagg

SEQ ID NO: 22688 - DNA, 28 bp, synthetic construct
  source 1..28: mol_type = other DNA
tcctattcagcagtttccccatacaggg

SEQ ID NO: 22689 - DNA, 28 bp, synthetic construct
  source 1..28: mol_type = other DNA
gtcctattcagcagtttccccatacagg

SEQ ID NO: 22690 - DNA, 28 bp, synthetic construct
  source 1..28: mol_type = other DNA
tttacttgggaaacaaaaaaaatcatgg

SEQ ID NO: 22691 - DNA, 28 bp, synthetic construct
  source 1..28: mol_type = other DNA
ttttttttgtttcccaagtaaagcaagg

SEQ ID NO: 22692 - DNA, 28 bp, synthetic construct
  source 1..28: mol_type = other DNA
caaacattaacaccttgctttacttggg

SEQ ID NO: 22693 - DNA, 28 bp, synthetic construct
  source 1..28: mol_type = other DNA
acaaacattaacaccttgctttacttgg

SEQ ID NO: 22694 - DNA, 28 bp, synthetic construct
  source 1..28: mol_type = other DNA
taaagcaaggtgttaatgtttgtagtgg

SEQ ID NO: 22695 - DNA, 28 bp, synthetic construct
  source 1..28: mol_type = other DNA
agcaaggtgttaatgtttgtagtggtgg

SEQ ID NO: 22696 - DNA, 28 bp, synthetic construct
  source 1..28: mol_type = other DNA
gtgttaatgtttgtagtggtggttgtgg

SEQ ID NO: 22697 - DNA, 28 bp, synthetic construct
  source 1..28: mol_type = other DNA
acacaatagctactctgctattgcaagg

SEQ ID NO: 22698 - DNA, 28 bp, synthetic construct
  source 1..28: mol_type = other DNA
acctacattgtgctcccgcagaaaaagg

SEQ ID NO: 22699 - DNA, 28 bp, synthetic construct
  source 1..28: mol_type = other DNA
tcctttttctgcgggagcacaatgtagg

SEQ ID NO: 22700 - DNA, 28 bp, synthetic construct
  source 1..28: mol_type = other DNA
agtaggctcacgatcctttttctgcggg

SEQ ID NO: 22701 - DNA, 28 bp, synthetic construct
  source 1..28: mol_type = other DNA
aagtaggctcacgatcctttttctgcgg

SEQ ID NO: 22702 - DNA, 28 bp, synthetic construct
  source 1..28: mol_type = other DNA
agaaaaaggatcgtgagcctacttctgg

SEQ ID NO: 22703 - DNA, 28 bp, synthetic construct
  source 1..28: mol_type = other DNA
gaaaaaggatcgtgagcctacttctggg

SEQ ID NO: 22704 - DNA, 28 bp, synthetic construct
  source 1..28: mol_type = other DNA
gcctacttctgggcacccaaattcgagg

SEQ ID NO: 22705 - DNA, 28 bp, synthetic construct
  source 1..28: mol_type = other DNA
tcctcgaatttgggtgcccagaagtagg

SEQ ID NO: 22706 - DNA, 28 bp, synthetic construct
  source 1..28: mol_type = other DNA
cccaaattcgaggagaacttagagaagg

SEQ ID NO: 22707 - DNA, 28 bp, synthetic construct
  source 1..28: mol_type = other DNA
tccttctctaagttctcctcgaatttgg

SEQ ID NO: 22708 - DNA, 28 bp, synthetic construct
  source 1..28: mol_type = other DNA
aaattcgaggagaacttagagaaggagg

SEQ ID NO: 22709 - DNA, 28 bp, synthetic construct
  source 1..28: mol_type = other DNA
gtttagttagtgccttaaccgcgattgg

SEQ ID NO: 22710 - DNA, 28 bp, synthetic construct
  source 1..28: mol_type = other DNA
gtgccttaaccgcgattggaccttaagg

SEQ ID NO: 22711 - DNA, 28 bp, synthetic construct
  source 1..28: mol_type = other DNA
ggtccttaaggtccaatcgcggttaagg

SEQ ID NO: 22712 - DNA, 28 bp, synthetic construct
  source 1..28: mol_type = other DNA
cttagtggtccttaaggtccaatcgcgg

SEQ ID NO: 22713 - DNA, 28 bp, synthetic construct
  source 1..28: mol_type = other DNA
gcaactactttcttagtggtccttaagg

SEQ ID NO: 22714 - DNA, 28 bp, synthetic construct
  source 1..28: mol_type = other DNA
aaggaccactaagaaagtagttgccagg

SEQ ID NO: 22715 - DNA, 28 bp, synthetic construct
  source 1..28: mol_type = other DNA
ggatgcctggcaactactttcttagtgg

SEQ ID NO: 22716 - DNA, 28 bp, synthetic construct
  source 1..28: mol_type = other DNA
aagaaagtagttgccaggcatcctgcgg

SEQ ID NO: 22717 - DNA, 28 bp, synthetic construct
  source 1..28: mol_type = other DNA
agaaagtagttgccaggcatcctgcggg

SEQ ID NO: 22718 - DNA, 28 bp, synthetic construct
  source 1..28: mol_type = other DNA
aagtagttgccaggcatcctgcgggagg

SEQ ID NO: 22719 - DNA, 28 bp, synthetic construct
  source 1..28: mol_type = other DNA
tgccaggcatcctgcgggaggctcaagg

SEQ ID NO: 22720 - DNA, 28 bp, synthetic construct
  source 1..28: mol_type = other DNA
taccttgagcctcccgcaggatgcctgg

SEQ ID NO: 22721 - DNA, 28 bp, synthetic construct
  source 1..28: mol_type = other DNA
gatgggactaccttgagcctcccgcagg

SEQ ID NO: 22722 - DNA, 28 bp, synthetic construct
  source 1..28: mol_type = other DNA
gagagcaaggaggggcgggcaggatggg

SEQ ID NO: 22723 - DNA, 28 bp, synthetic construct
  source 1..28: mol_type = other DNA
agagagcaaggaggggcgggcaggatgg

SEQ ID NO: 22724 - DNA, 28 bp, synthetic construct
  source 1..28: mol_type = other DNA
gacaagagagcaaggaggggcgggcagg

SEQ ID NO: 22725 - DNA, 28 bp, synthetic construct
  source 1..28: mol_type = other DNA
cccgcccctccttgctctcttgtcctgg

SEQ ID NO: 22726 - DNA, 28 bp, synthetic construct
  source 1..28: mol_type = other DNA
ccgcccctccttgctctcttgtcctggg

SEQ ID NO: 22727 - DNA, 28 bp, synthetic construct
  source 1..28: mol_type = other DNA
cgcccctccttgctctcttgtcctgggg

SEQ ID NO: 22728 - DNA, 28 bp, synthetic construct
  source 1..28: mol_type = other DNA
gcccctccttgctctcttgtcctggggg

SEQ ID NO: 22729 - DNA, 28 bp, synthetic construct
  source 1..28: mol_type = other DNA
tcccccaggacaagagagcaaggagggg

SEQ ID NO: 22730 - DNA, 28 bp, synthetic construct
  source 1..28: mol_type = other DNA
gtcccccaggacaagagagcaaggaggg

SEQ ID NO: 22731 - DNA, 28 bp, synthetic construct
  source 1..28: mol_type = other DNA
tgtcccccaggacaagagagcaaggagg

SEQ ID NO: 22732 - DNA, 28 bp, synthetic construct
  source 1..28: mol_type = other DNA
tactgtcccccaggacaagagagcaagg

SEQ ID NO: 22733 - DNA, 28 bp, synthetic construct
  source 1..28: mol_type = other DNA
tcttgtcctgggggacagtagcagttgg

SEQ ID NO: 22734 - DNA, 28 bp, synthetic construct
  source 1..28: mol_type = other DNA
atgggtccaactgctactgtcccccagg

SEQ ID NO: 22735 - DNA, 28 bp, synthetic construct
  source 1..28: mol_type = other DNA
agcagttggacccattcacgccacctgg

SEQ ID NO: 22736 - DNA, 28 bp, synthetic construct
  source 1..28: mol_type = other DNA
gcagttggacccattcacgccacctggg

SEQ ID NO: 22737 - DNA, 28 bp, synthetic construct
  source 1..28: mol_type = other DNA
acccattcacgccacctgggtagaaagg

SEQ ID NO: 22738 - DNA, 28 bp, synthetic construct
  source 1..28: mol_type = other DNA
cccattcacgccacctgggtagaaaggg

SEQ ID NO: 22739 - DNA, 28 bp, synthetic construct
  source 1..28: mol_type = other DNA
ccattcacgccacctgggtagaaagggg

SEQ ID NO: 22740 - DNA, 28 bp, synthetic construct
  source 1..28: mol_type = other DNA
acgccacctgggtagaaaggggtttcgg

SEQ ID NO: 22741 - DNA, 28 bp, synthetic construct
  source 1..28: mol_type = other DNA
gagccgaaacccctttctacccaggtgg

SEQ ID NO: 22742 - DNA, 28 bp, synthetic construct
  source 1..28: mol_type = other DNA
agtgagccgaaacccctttctacccagg

SEQ ID NO: 22743 - DNA, 28 bp, synthetic construct
  source 1..28: mol_type = other DNA
aaaggggtttcggctcactatgctctgg

SEQ ID NO: 22744 - DNA, 28 bp, synthetic construct
  source 1..28: mol_type = other DNA
tggagagcataaattatatttctgcagg

SEQ ID NO: 22745 - DNA, 28 bp, synthetic construct
  source 1..28: mol_type = other DNA
tgcaggcttggaggtggaggtggagtgg

SEQ ID NO: 22746 - DNA, 28 bp, synthetic construct
  source 1..28: mol_type = other DNA
tggcttgcaggcttggaggtggaggtgg

SEQ ID NO: 22747 - DNA, 28 bp, synthetic construct
  source 1..28: mol_type = other DNA
cctccacctccaagcctgcaagccatgg

SEQ ID NO: 22748 - DNA, 28 bp, synthetic construct
  source 1..28: mol_type = other DNA
agtccatggcttgcaggcttggaggtgg

SEQ ID NO: 22749 - DNA, 28 bp, synthetic construct
  source 1..28: mol_type = other DNA
ttcagtccatggcttgcaggcttggagg

SEQ ID NO: 22750 - DNA, 28 bp, synthetic construct
  source 1..28: mol_type = other DNA
gaattcagtccatggcttgcaggcttgg

SEQ ID NO: 22751 - DNA, 28 bp, synthetic construct
  source 1..28: mol_type = other DNA
tagatgaattcagtccatggcttgcagg

SEQ ID NO: 22752 - DNA, 28 bp, synthetic construct
  source 1..28: mol_type = other DNA
aagccatggactgaattcatctacttgg

SEQ ID NO: 22753 - DNA, 28 bp, synthetic construct
  source 1..28: mol_type = other DNA
ctaccaagtagatgaattcagtccatgg

SEQ ID NO: 22754 - DNA, 28 bp, synthetic construct
  source 1..28: mol_type = other DNA
actgaattcatctacttggtagaattgg

SEQ ID NO: 22755 - DNA, 28 bp, synthetic construct
  source 1..28: mol_type = other DNA
ttcatctacttggtagaattggtacagg

SEQ ID NO: 22756 - DNA, 28 bp, synthetic construct
  source 1..28: mol_type = other DNA
ggtacaggcaaaataaagcaaacttcgg

SEQ ID NO: 22757 - DNA, 28 bp, synthetic construct
  source 1..28: mol_type = other DNA
gtcagagctcttcagaattagtcccagg

SEQ ID NO: 22758 - DNA, 28 bp, synthetic construct
  source 1..28: mol_type = other DNA
agagctcttcagaattagtcccaggagg

SEQ ID NO: 22759 - DNA, 28 bp, synthetic construct
  source 1..28: mol_type = other DNA
ctctgcagaactacagaggcctcctggg

SEQ ID NO: 22760 - DNA, 28 bp, synthetic construct
  source 1..28: mol_type = other DNA
tctctgcagaactacagaggcctcctgg

SEQ ID NO: 22761 - DNA, 28 bp, synthetic construct
  source 1..28: mol_type = other DNA
gcctctgtagttctgcagagatttctgg

SEQ ID NO: 22762 - DNA, 28 bp, synthetic construct
  source 1..28: mol_type = other DNA
accagaaatctctgcagaactacagagg

SEQ ID NO: 22763 - DNA, 28 bp, synthetic construct
  source 1..28: mol_type = other DNA
ttattgcaatcatctttaccttgactgg

SEQ ID NO: 22764 - DNA, 28 bp, synthetic construct
  source 1..28: mol_type = other DNA
ggattggttagtacaaggccagtcaagg

SEQ ID NO: 22765 - DNA, 28 bp, synthetic construct
  source 1..28: mol_type = other DNA
gagaggggaaggattggttagtacaagg

SEQ ID NO: 22766 - DNA, 28 bp, synthetic construct
  source 1..28: mol_type = other DNA
ggagatacgaagagaggggaaggattgg

SEQ ID NO: 22767 - DNA, 28 bp, synthetic construct
  source 1..28: mol_type = other DNA
ggggtggagatacgaagagaggggaagg

SEQ ID NO: 22768 - DNA, 28 bp, synthetic construct
  source 1..28: mol_type = other DNA
gggaggggtggagatacgaagagagggg

SEQ ID NO: 22769 - DNA, 28 bp, synthetic construct
  source 1..28: mol_type = other DNA
ggggaggggtggagatacgaagagaggg

SEQ ID NO: 22770 - DNA, 28 bp, synthetic construct
  source 1..28: mol_type = other DNA
aggggaggggtggagatacgaagagagg

SEQ ID NO: 22771 - DNA, 28 bp, synthetic construct
  source 1..28: mol_type = other DNA
tttcattctaatattaggggaggggtgg

SEQ ID NO: 22772 - DNA, 28 bp, synthetic construct
  source 1..28: mol_type = other DNA
ttctttcattctaatattaggggagggg

SEQ ID NO: 22773 - DNA, 28 bp, synthetic construct
  source 1..28: mol_type = other DNA
tttctttcattctaatattaggggaggg

SEQ ID NO: 22774 - DNA, 28 bp, synthetic construct
  source 1..28: mol_type = other DNA
atttctttcattctaatattaggggagg

SEQ ID NO: 22775 - DNA, 28 bp, synthetic construct
  source 1..28: mol_type = other DNA
cagatttctttcattctaatattagggg

SEQ ID NO: 22776 - DNA, 28 bp, synthetic construct
  source 1..28: mol_type = other DNA
tcagatttctttcattctaatattaggg

SEQ ID NO: 22777 - DNA, 28 bp, synthetic construct
  source 1..28: mol_type = other DNA
gtcagatttctttcattctaatattagg

SEQ ID NO: 22778 - DNA, 28 bp, synthetic construct
  source 1..28: mol_type = other DNA
ctcgatagagagagaccaagtatgaagg

SEQ ID NO: 22779 - DNA, 28 bp, synthetic construct
  source 1..28: mol_type = other DNA
tcgatagagagagaccaagtatgaaggg

SEQ ID NO: 22780 - DNA, 28 bp, synthetic construct
  source 1..28: mol_type = other DNA
attttaatttttttcccttcatacttgg

SEQ ID NO: 22781 - RNA, 20 nt, synthetic construct
  source 1..20: mol_type = other RNA
ccaccccccactatgaagtc

SEQ ID NO: 22782 - RNA, 20 nt, synthetic construct
  source 1..20: mol_type = other RNA
gacttcatagtggggggtgg

SEQ ID NO: 22783 - RNA, 20 nt, synthetic construct
  source 1..20: mol_type = other RNA
tgacttcatagtggggggtg

SEQ ID NO: 22784 - RNA, 20 nt, synthetic construct
  source 1..20: mol_type = other RNA
ctgacttcatagtggggggt

SEQ ID NO: 22785 - RNA, 20 nt, synthetic construct
  source 1..20: mol_type = other RNA
ccccactatgaagtcaggtg

SEQ ID NO: 22786 - RNA, 20 nt, synthetic construct
  source 1..20: mol_type = other RNA
acacctgacttcatagtggg

SEQ ID NO: 22787 - RNA, 20 nt, synthetic construct
  source 1..20: mol_type = other RNA
cacacctgacttcatagtgg

SEQ ID NO: 22788 - RNA, 20 nt, synthetic construct
  source 1..20: mol_type = other RNA
ccacacctgacttcatagtg

SEQ ID NO: 22789 - RNA, 20 nt, synthetic construct
  source 1..20: mol_type = other RNA
tccacacctgacttcatagt

SEQ ID NO: 22790 - RNA, 20 nt, synthetic construct
  source 1..20: mol_type = other RNA
ttccacacctgacttcatag

SEQ ID NO: 22791 - RNA, 20 nt, synthetic construct
  source 1..20: mol_type = other RNA
ggtgtggaattttccatttt

SEQ ID NO: 22792 - RNA, 20 nt, synthetic construct
  source 1..20: mol_type = other RNA
ttccattttcggcctcacac

SEQ ID NO: 22793 - RNA, 20 nt, synthetic construct
  source 1..20: mol_type = other RNA
tgccagtgtgaggccgaaaa

SEQ ID NO: 22794 - RNA, 20 nt, synthetic construct
  source 1..20: mol_type = other RNA
aaattatgagtgccagtgtg

SEQ ID NO: 22795 - RNA, 20 nt, synthetic construct
  source 1..20: mol_type = other RNA
gcactcataatttcagattt

SEQ ID NO: 22796 - RNA, 20 nt, synthetic construct
  source 1..20: mol_type = other RNA
gattttggattttctaatta

SEQ ID NO: 22797 - RNA, 20 nt, synthetic construct
  source 1..20: mol_type = other RNA
ttggattttctaattaagga

SEQ ID NO: 22798 - RNA, 20 nt, synthetic construct
  source 1..20: mol_type = other RNA
aataatgtgattaacagtac

SEQ ID NO: 22799 - RNA, 20 nt, synthetic construct
  source 1..20: mol_type = other RNA
tattattccattttgtgatg

SEQ ID NO: 22800 - RNA, 20 nt, synthetic construct
  source 1..20: mol_type = other RNA
tttgcttcctcatcacaaaa

SEQ ID NO: 22801 - RNA, 20 nt, synthetic construct
  source 1..20: mol_type = other RNA
gatgaggaagcaaactctaa

SEQ ID NO: 22802 - RNA, 20 nt, synthetic construct
  source 1..20: mol_type = other RNA
agactctcgagtagcagagc

SEQ ID NO: 22803 - RNA, 20 nt, synthetic construct
  source 1..20: mol_type = other RNA
gcagacatgtcactaaaagg

SEQ ID NO: 22804 - RNA, 20 nt, synthetic construct
  source 1..20: mol_type = other RNA
catgcagacatgtcactaaa

SEQ ID NO: 22805 - RNA, 20 nt, synthetic construct
  source 1..20: mol_type = other RNA
acatgtctgcatgacagcag

SEQ ID NO: 22806 - RNA, 20 nt, synthetic construct
  source 1..20: mol_type = other RNA
gcagtggctgcagtctctcc

SEQ ID NO: 22807 - RNA, 20 nt, synthetic construct
  source 1..20: mol_type = other RNA
cagtggctgcagtctctcca

SEQ ID NO: 22808 - RNA, 20 nt, synthetic construct
  source 1..20: mol_type = other RNA
aaaaattagctgaaacaccc

SEQ ID NO: 22809 - RNA, 20 nt, synthetic construct
  source 1..20: mol_type = other RNA
tgtttcagctaatttttgtt

SEQ ID NO: 22810 - RNA, 20 nt, synthetic construct
  source 1..20: mol_type = other RNA
gtttcagctaatttttgttt

SEQ ID NO: 22811 - RNA, 20 nt, synthetic construct
  source 1..20: mol_type = other RNA
tttcagctaatttttgtttg

SEQ ID NO: 22812 - RNA, 20 nt, synthetic construct
  source 1..20: mol_type = other RNA
ttcagctaatttttgtttgg

SEQ ID NO: 22813 - RNA, 20 nt, synthetic construct
  source 1..20: mol_type = other RNA
tcagctaatttttgtttggg

SEQ ID NO: 22814 - RNA, 20 nt, synthetic construct
  source 1..20: mol_type = other RNA
cagctaatttttgtttgggg

SEQ ID NO: 22815 - RNA, 20 nt, synthetic construct
  source 1..20: mol_type = other RNA
agctaatttttgtttggggg

SEQ ID NO: 22816 - RNA, 20 nt, synthetic construct
  source 1..20: mol_type = other RNA
aatttttgtttggggggggt

SEQ ID NO: 22817 - RNA, 20 nt, synthetic construct
  source 1..20: mol_type = other RNA
ttttgtttggggggggttgg

SEQ ID NO: 22818 - RNA, 20 nt, synthetic construct
  source 1..20: mol_type = other RNA
ggggttggtggttaaatttt

SEQ ID NO: 22819 - RNA, 20 nt, synthetic construct
  source 1..20: mol_type = other RNA
ttaaatttttggtgagatcc

SEQ ID NO: 22820 - RNA, 20 nt, synthetic construct
  source 1..20: mol_type = other RNA
gagatcctggtgttccccaa

SEQ ID NO: 22821 - RNA, 20 nt, synthetic construct
  source 1..20: mol_type = other RNA
caacacctttggggaacacc

SEQ ID NO: 22822 - RNA, 20 nt, synthetic construct
  source 1..20: mol_type = other RNA
tgaatcagtcaacacctttg

SEQ ID NO: 22823 - RNA, 20 nt, synthetic construct
  source 1..20: mol_type = other RNA
ctgaatcagtcaacaccttt

SEQ ID NO: 22824 - RNA, 20 nt, synthetic construct
  source 1..20: mol_type = other RNA
gctgaatcagtcaacacctt

SEQ ID NO: 22825 - RNA, 20 nt, synthetic construct
  source 1..20: mol_type = other RNA
tggaactcaggaaggctatg

SEQ ID NO: 22826 - RNA, 20 nt, synthetic construct
  source 1..20: mol_type = other RNA
ctgagttccagctacagacc

SEQ ID NO: 22827 - RNA, 20 nt, synthetic construct
  source 1..20: mol_type = other RNA
tgagttccagctacagacct

SEQ ID NO: 22828 - RNA, 20 nt, synthetic construct
  source 1..20: mol_type = other RNA
gagttccagctacagacctg

SEQ ID NO: 22829 - RNA, 20 nt, synthetic construct
  source 1..20: mol_type = other RNA
caggtctgtagctggaactc

SEQ ID NO: 22830 - RNA, 20 nt, synthetic construct
  source 1..20: mol_type = other RNA
cgagaccccaggtctgtagc

SEQ ID NO: 22831 - RNA, 20 nt, synthetic construct
  source 1..20: mol_type = other RNA
tggggtctcgtgttcattct

SEQ ID NO: 22832 - RNA, 20 nt, synthetic construct
  source 1..20: mol_type = other RNA
ggggtctcgtgttcattctt

SEQ ID NO: 22833 - RNA, 20 nt, synthetic construct
  source 1..20: mol_type = other RNA
gggtctcgtgttcattcttg

SEQ ID NO: 22834 - RNA, 20 nt, synthetic construct
  source 1..20: mol_type = other RNA
aagaatgaacacgagacccc

SEQ ID NO: 22835 - RNA, 20 nt, synthetic construct
  source 1..20: mol_type = other RNA
cagtgactaaactgctaaaa

SEQ ID NO: 22836 - RNA, 20 nt, synthetic construct
  source 1..20: mol_type = other RNA
cattttagcagtttagtcac

SEQ ID NO: 22837 - RNA, 20 nt, synthetic construct
  source 1..20: mol_type = other RNA
gagcaagaagcacactgcct

SEQ ID NO: 22838 - RNA, 20 nt, synthetic construct
  source 1..20: mol_type = other RNA
agcaagaagcacactgcctt

SEQ ID NO: 22839 - RNA, 20 nt, synthetic construct
  source 1..20: mol_type = other RNA
cagtgaatgaaaatgtccca

SEQ ID NO: 22840 - RNA, 20 nt, synthetic construct
  source 1..20: mol_type = other RNA
tacactgggcacaactagat

SEQ ID NO: 22841 - RNA, 20 nt, synthetic construct
  source 1..20: mol_type = other RNA
ctacactgggcacaactaga

SEQ ID NO: 22842 - RNA, 20 nt, synthetic construct
  source 1..20: mol_type = other RNA
gatgacatttggtctacact

SEQ ID NO: 22843 - RNA, 20 nt, synthetic construct
  source 1..20: mol_type = other RNA
tgatgacatttggtctacac

SEQ ID NO: 22844 - RNA, 20 nt, synthetic construct
  source 1..20: mol_type = other RNA
atgtcatcatccaaaccaca

SEQ ID NO: 22845 - RNA, 20 nt, synthetic construct
  source 1..20: mol_type = other RNA
tgtcatcatccaaaccacac

SEQ ID NO: 22846 - RNA, 20 nt, synthetic construct
  source 1..20: mol_type = other RNA
atccaaaccacacgggacag

SEQ ID NO: 22847 - RNA, 20 nt, synthetic construct
  source 1..20: mol_type = other RNA
ggcctctgtcccgtgtggtt

SEQ ID NO: 22848 - RNA, 20 nt, synthetic construct
  source 1..20: mol_type = other RNA
atgcaggcctctgtcccgtg

SEQ ID NO: 22849 - RNA, 20 nt, synthetic construct
  source 1..20: mol_type = other RNA
aggcctgcatgcgtcctgtt

SEQ ID NO: 22850 - RNA, 20 nt, synthetic construct
  source 1..20: mol_type = other RNA
ttgccaaacaggacgcatgc

SEQ ID NO: 22851 - RNA, 20 nt, synthetic construct
  source 1..20: mol_type = other RNA
tgggcagctgtttgccaaac

SEQ ID NO: 22852 - RNA, 20 nt, synthetic construct
  source 1..20: mol_type = other RNA
gcaaacagctgcccagccag

SEQ ID NO: 22853 - RNA, 20 nt, synthetic construct
  source 1..20: mol_type = other RNA
caaacagctgcccagccagt

SEQ ID NO: 22854 - RNA, 20 nt, synthetic construct
  source 1..20: mol_type = other RNA
aaacagctgcccagccagtg

SEQ ID NO: 22855 - RNA, 20 nt, synthetic construct
  source 1..20: mol_type = other RNA
aacagctgcccagccagtgg

SEQ ID NO: 22856 - RNA, 20 nt, synthetic construct
  source 1..20: mol_type = other RNA
gaactgctcccccactggct

SEQ ID NO: 22857 - RNA, 20 nt, synthetic construct
  source 1..20: mol_type = other RNA
tgaactgctcccccactggc

SEQ ID NO: 22858 - RNA, 20 nt, synthetic construct
  source 1..20: mol_type = other RNA
agcatgaactgctcccccac

SEQ ID NO: 22859 - RNA, 20 nt, synthetic construct
  source 1..20: mol_type = other RNA
cttagactaccaccccctcc

SEQ ID NO: 22860 - RNA, 20 nt, synthetic construct
  source 1..20: mol_type = other RNA
ccaccccctccaggtgtctt

SEQ ID NO: 22861 - RNA, 20 nt, synthetic construct
  source 1..20: mol_type = other RNA
cctaagacacctggaggggg

SEQ ID NO: 22862 - RNA, 20 nt, synthetic construct
  source 1..20: mol_type = other RNA
tccaggtgtcttaggcacgc

SEQ ID NO: 22863 - RNA, 20 nt, synthetic construct
  source 1..20: mol_type = other RNA
cgtgcctaagacacctggag

SEQ ID NO: 22864 - RNA, 20 nt, synthetic construct
  source 1..20: mol_type = other RNA
gcgtgcctaagacacctgga

SEQ ID NO: 22865 - RNA, 20 nt, synthetic construct
  source 1..20: mol_type = other RNA
agcgtgcctaagacacctgg

SEQ ID NO: 22866 - RNA, 20 nt, synthetic construct
  source 1..20: mol_type = other RNA
accagcgtgcctaagacacc

SEQ ID NO: 22867 - RNA, 20 nt, synthetic construct
  source 1..20: mol_type = other RNA
tcttaggcacgctggtcctt

SEQ ID NO: 22868 - RNA, 20 nt, synthetic construct
  source 1..20: mol_type = other RNA
gcacgctggtccttaggaga

SEQ ID NO: 22869 - RNA, 20 nt, synthetic construct
  source 1..20: mol_type = other RNA
cacgctggtccttaggagaa

SEQ ID NO: 22870 - RNA, 20 nt, synthetic construct
  source 1..20: mol_type = other RNA
gaaggtcaacccttctccta

SEQ ID NO: 22871 - RNA, 20 nt, synthetic construct
  source 1..20: mol_type = other RNA
gaccttccactccctcttgc

SEQ ID NO: 22872 - RNA, 20 nt, synthetic construct
  source 1..20: mol_type = other RNA
cacctgcaagagggagtgga

SEQ ID NO: 22873 - RNA, 20 nt, synthetic construct
  source 1..20: mol_type = other RNA
aggacacctgcaagagggag

SEQ ID NO: 22874 - RNA, 20 nt, synthetic construct
  source 1..20: mol_type = other RNA
acttaaggacacctgcaaga

SEQ ID NO: 22875 - RNA, 20 nt, synthetic construct
  source 1..20: mol_type = other RNA
aacttaaggacacctgcaag

SEQ ID NO: 22876 - RNA, 20 nt, synthetic construct
  source 1..20: mol_type = other RNA
tgtccttaagtttgctcgct

SEQ ID NO: 22877 - RNA, 20 nt, synthetic construct
  source 1..20: mol_type = other RNA
tgaccaagcgagcaaactta

SEQ ID NO: 22878 - RNA, 20 nt, synthetic construct
  source 1..20: mol_type = other RNA
ggtcaagtcctacgaagccc

SEQ ID NO: 22879 - RNA, 20 nt, synthetic construct
  source 1..20: mol_type = other RNA
ctcaggatcctgggcttcgt

SEQ ID NO: 22880 - RNA, 20 nt, synthetic construct
  source 1..20: mol_type = other RNA
gctggcgatctcaggatcct

SEQ ID NO: 22881 - RNA, 20 nt, synthetic construct
  source 1..20: mol_type = other RNA
ggctggcgatctcaggatcc

SEQ ID NO: 22882 - RNA, 20 nt, synthetic construct
  source 1..20: mol_type = other RNA
cctgagatcgccagcctgtc

SEQ ID NO: 22883 - RNA, 20 nt, synthetic construct
  source 1..20: mol_type = other RNA
cctgacaggctggcgatctc

SEQ ID NO: 22884 - RNA, 20 nt, synthetic construct
  source 1..20: mol_type = other RNA
cagcctgtcaggcaagctga

SEQ ID NO: 22885 - RNA, 20 nt, synthetic construct
  source 1..20: mol_type = other RNA
cttcagcttgcctgacaggc

SEQ ID NO: 22886 - RNA, 20 nt, synthetic construct
  source 1..20: mol_type = other RNA
gcgccttcagcttgcctgac

SEQ ID NO: 22887 - RNA, 20 nt, synthetic construct
  source 1..20: mol_type = other RNA
cccatgaccctgccacccca

SEQ ID NO: 22888 - RNA, 20 nt, synthetic construct
  source 1..20: mol_type = other RNA
ccatgaccctgccaccccat

SEQ ID NO: 22889 - RNA, 20 nt, synthetic construct
  source 1..20: mol_type = other RNA
tggggtggcagggtcatggg

SEQ ID NO: 22890 - RNA, 20 nt, synthetic construct
  source 1..20: mol_type = other RNA
ccatggggtggcagggtcat

SEQ ID NO: 22891 - RNA, 20 nt, synthetic construct
  source 1..20: mol_type = other RNA
cccatggggtggcagggtca

SEQ ID NO: 22892 - RNA, 20 nt, synthetic construct
  source 1..20: mol_type = other RNA
ccaccccatgggcctgctgc

SEQ ID NO: 22893 - RNA, 20 nt, synthetic construct
  source 1..20: mol_type = other RNA
cagcaggcccatggggtggc

SEQ ID NO: 22894 - RNA, 20 nt, synthetic construct
  source 1..20: mol_type = other RNA
ccccatgggcctgctgctgg

SEQ ID NO: 22895 - RNA, 20 nt, synthetic construct
  source 1..20: mol_type = other RNA
ccagcagcaggcccatgggg

SEQ ID NO: 22896 - RNA, 20 nt, synthetic construct
  source 1..20: mol_type = other RNA
ccaccagcagcaggcccatg

SEQ ID NO: 22897 - RNA, 20 nt, synthetic construct
  source 1..20: mol_type = other RNA
gccaccagcagcaggcccat

SEQ ID NO: 22898 - RNA, 20 nt, synthetic construct
  source 1..20: mol_type = other RNA
tgccaccagcagcaggccca

SEQ ID NO: 22899 - RNA, 20 nt, synthetic construct
  source 1..20: mol_type = other RNA
gcctgctgctggtggcagcg

SEQ ID NO: 22900 - RNA, 20 nt, synthetic construct
  source 1..20: mol_type = other RNA
gccacgctgccaccagcagc

SEQ ID NO: 22901 - RNA, 20 nt, synthetic construct
  source 1..20: mol_type = other RNA
cgtggccgcctcctgagagt

SEQ ID NO: 22902 - RNA, 20 nt, synthetic construct
  source 1..20: mol_type = other RNA
gagggccaactctcaggagg

SEQ ID NO: 22903 - RNA, 20 nt, synthetic construct
  source 1..20: mol_type = other RNA
agggagggccaactctcagg

SEQ ID NO: 22904 - RNA, 20 nt, synthetic construct
  source 1..20: mol_type = other RNA
acaagggagggccaactctc

SEQ ID NO: 22905 - RNA, 20 nt, synthetic construct
  source 1..20: mol_type = other RNA
ccctcccttgtgccactgcc

SEQ ID NO: 22906 - RNA, 20 nt, synthetic construct
  source 1..20: mol_type = other RNA
cctcccttgtgccactgcca

SEQ ID NO: 22907 - RNA, 20 nt, synthetic construct
  source 1..20: mol_type = other RNA
ctcccttgtgccactgccag

SEQ ID NO: 22908 - RNA, 20 nt, synthetic construct
  source 1..20: mol_type = other RNA
ccttgtgccactgccagggg

SEQ ID NO: 22909 - RNA, 20 nt, synthetic construct
  source 1..20: mol_type = other RNA
ccctggcagtggcacaaggg

SEQ ID NO: 22910 - RNA, 20 nt, synthetic construct
  source 1..20: mol_type = other RNA
ctcccctggcagtggcacaa

SEQ ID NO: 22911 - RNA, 20 nt, synthetic construct
  source 1..20: mol_type = other RNA
tgccactgccaggggaggaa

SEQ ID NO: 22912 - RNA, 20 nt, synthetic construct
  source 1..20: mol_type = other RNA
ggcctttcctcccctggcag

SEQ ID NO: 22913 - RNA, 20 nt, synthetic construct
  source 1..20: mol_type = other RNA
catcaaggcctttcctcccc

SEQ ID NO: 22914 - RNA, 20 nt, synthetic construct
  source 1..20: mol_type = other RNA
tattattgtctggaacatca

SEQ ID NO: 22915 - RNA, 20 nt, synthetic construct
  source 1..20: mol_type = other RNA
caggcgcatttattattgtc

SEQ ID NO: 22916 - RNA, 20 nt, synthetic construct
  source 1..20: mol_type = other RNA
atgcgcctgtgacttagcct

SEQ ID NO: 22917 - RNA, 20 nt, synthetic construct
  source 1..20: mol_type = other RNA
tgacaccaaggctaagtcac

SEQ ID NO: 22918 - RNA, 20 nt, synthetic construct
  source 1..20: mol_type = other RNA
gccttggtgtcagtctcttg

SEQ ID NO: 22919 - RNA, 20 nt, synthetic construct
  source 1..20: mol_type = other RNA
tccgcaagagactgacacca

SEQ ID NO: 22920 - RNA, 20 nt, synthetic construct
  source 1..20: mol_type = other RNA
aaggagagatgggggttgtc

SEQ ID NO: 22921 - RNA, 20 nt, synthetic construct
  source 1..20: mol_type = other RNA
aatcagggaaggagagatgg

SEQ ID NO: 22922 - RNA, 20 nt, synthetic construct
  source 1..20: mol_type = other RNA
gaatcagggaaggagagatg

SEQ ID NO: 22923 - RNA, 20 nt, synthetic construct
  source 1..20: mol_type = other RNA
ggaatcagggaaggagagat

SEQ ID NO: 22924 - RNA, 20 nt, synthetic construct
  source 1..20: mol_type = other RNA
gggaatcagggaaggagaga

SEQ ID NO: 22925 - RNA, 20 nt, synthetic construct
  source 1..20: mol_type = other RNA
aaggcagagggaatcaggga

SEQ ID NO: 22926 - RNA, 20 nt, synthetic construct
  source 1..20: mol_type = other RNA
ctgattccctctgcctttcc

SEQ ID NO: 22927 - RNA, 20 nt, synthetic construct
  source 1..20: mol_type = other RNA
tggaaaggcagagggaatca

SEQ ID NO: 22928 - RNA, 20 nt, synthetic construct
  source 1..20: mol_type = other RNA
ctggaaaggcagagggaatc

SEQ ID NO: 22929 - RNA, 20 nt, synthetic construct
  source 1..20: mol_type = other RNA
atggggcctggaaaggcaga

SEQ ID NO: 22930 - RNA, 20 nt, synthetic construct
  source 1..20: mol_type = other RNA
gatggggcctggaaaggcag

SEQ ID NO: 22931 - RNA, 20 nt, synthetic construct
  source 1..20: mol_type = other RNA
cagggggatggggcctggaa

SEQ ID NO: 22932 - RNA, 20 nt, synthetic construct
  source 1..20: mol_type = other RNA
ctgttcagggggatggggcc

SEQ ID NO: 22933 - RNA, 20 nt, synthetic construct
  source 1..20: mol_type = other RNA
aggagctgttcagggggatg

SEQ ID NO: 22934 - RNA, 20 nt, synthetic construct
  source 1..20: mol_type = other RNA
gaggagctgttcagggggat

SEQ ID NO: 22935 - RNA, 20 nt, synthetic construct
  source 1..20: mol_type = other RNA
ggaggagctgttcaggggga

SEQ ID NO: 22936 - RNA, 20 nt, synthetic construct
  source 1..20: mol_type = other RNA
ccctgaacagctcctcccta

SEQ ID NO: 22937 - RNA, 20 nt, synthetic construct
  source 1..20: mol_type = other RNA
atagggaggagctgttcagg

SEQ ID NO: 22938 - RNA, 20 nt, synthetic construct
  source 1..20: mol_type = other RNA
catagggaggagctgttcag

SEQ ID NO: 22939 - RNA, 20 nt, synthetic construct
  source 1..20: mol_type = other RNA
ccatagggaggagctgttca

SEQ ID NO: 22940 - RNA, 20 nt, synthetic construct
  source 1..20: mol_type = other RNA
acagctcctccctatggtcc

SEQ ID NO: 22941 - RNA, 20 nt, synthetic construct
  source 1..20: mol_type = other RNA
ctcctccctatggtcctggc

SEQ ID NO: 22942 - RNA, 20 nt, synthetic construct
  source 1..20: mol_type = other RNA
tcctccctatggtcctggct

SEQ ID NO: 22943 - RNA, 20 nt, synthetic construct
  source 1..20: mol_type = other RNA
gcccagccaggaccataggg

SEQ ID NO: 22944 - RNA, 20 nt, synthetic construct
  source 1..20: mol_type = other RNA
taggcccagccaggaccata

SEQ ID NO: 22945 - RNA, 20 nt, synthetic construct
  source 1..20: mol_type = other RNA
ttaggcccagccaggaccat

SEQ ID NO: 22946 - RNA, 20 nt, synthetic construct
  source 1..20: mol_type = other RNA
gctgggcctaaccctgcccc

SEQ ID NO: 22947 - RNA, 20 nt, synthetic construct
  source 1..20: mol_type = other RNA
ctgggcctaaccctgcccca

SEQ ID NO: 22948 - RNA, 20 nt, synthetic construct
  source 1..20: mol_type = other RNA
ttaggccctggggcagggtt

SEQ ID NO: 22949 - RNA, 20 nt, synthetic construct
  source 1..20: mol_type = other RNA
tagggttaggccctggggca

SEQ ID NO: 22950 - RNA, 20 nt, synthetic construct
  source 1..20: mol_type = other RNA
gtagggttaggccctggggc

SEQ ID NO: 22951 - RNA, 20 nt, synthetic construct
  source 1..20: mol_type = other RNA
ccagggcctaaccctacctg

SEQ ID NO: 22952 - RNA, 20 nt, synthetic construct
  source 1..20: mol_type = other RNA
tcaggtagggttaggccctg

SEQ ID NO: 22953 - RNA, 20 nt, synthetic construct
  source 1..20: mol_type = other RNA
ctcaggtagggttaggccct

SEQ ID NO: 22954 - RNA, 20 nt, synthetic construct
  source 1..20: mol_type = other RNA
cctcaggtagggttaggccc

SEQ ID NO: 22955 - RNA, 20 nt, synthetic construct
  source 1..20: mol_type = other RNA
gaggagcctcaggtagggtt

SEQ ID NO: 22956 - RNA, 20 nt, synthetic construct
  source 1..20: mol_type = other RNA
aaggggaggagcctcaggta

SEQ ID NO: 22957 - RNA, 20 nt, synthetic construct
  source 1..20: mol_type = other RNA
gaaggggaggagcctcaggt

SEQ ID NO: 22958 - RNA, 20 nt, synthetic construct
  source 1..20: mol_type = other RNA
tgaggctcctccccttcccc

SEQ ID NO: 22959 - RNA, 20 nt, synthetic construct
  source 1..20: mol_type = other RNA
gaggctcctccccttccccc

SEQ ID NO: 22960 - RNA, 20 nt, synthetic construct
  source 1..20: mol_type = other RNA
aggctcctccccttcccccg

SEQ ID NO: 22961 - RNA, 20 nt, synthetic construct
  source 1..20: mol_type = other RNA
gggggaaggggaggagcctc

SEQ ID NO: 22962 - RNA, 20 nt, synthetic construct
  source 1..20: mol_type = other RNA
tcctccccttcccccggggc

SEQ ID NO: 22963 - RNA, 20 nt, synthetic construct
  source 1..20: mol_type = other RNA
acctgccccgggggaagggg

SEQ ID NO: 22964 - RNA, 20 nt, synthetic construct
  source 1..20: mol_type = other RNA
ttcccccggggcaggttgag

SEQ ID NO: 22965 - RNA, 20 nt, synthetic construct
  source 1..20: mol_type = other RNA
tcaacctgccccgggggaag

SEQ ID NO: 22966 - RNA, 20 nt, synthetic construct
  source 1..20: mol_type = other RNA
ctcaacctgccccgggggaa

SEQ ID NO: 22967 - RNA, 20 nt, synthetic construct
  source 1..20: mol_type = other RNA
tctcaacctgccccggggga

SEQ ID NO: 22968 - RNA, 20 nt, synthetic construct
  source 1..20: mol_type = other RNA
cccggggcaggttgagaggc

SEQ ID NO: 22969 - RNA, 20 nt, synthetic construct
  source 1..20: mol_type = other RNA
agcctctcaacctgccccgg

SEQ ID NO: 22970 - RNA, 20 nt, synthetic construct
  source 1..20: mol_type = other RNA
cagcctctcaacctgccccg

SEQ ID NO: 22971 - RNA, 20 nt, synthetic construct
  source 1..20: mol_type = other RNA
ggcaggttgagaggctggag

SEQ ID NO: 22972 - RNA, 20 nt, synthetic construct
  source 1..20: mol_type = other RNA
gcaggttgagaggctggagt

SEQ ID NO: 22973 - RNA, 20 nt, synthetic construct
  source 1..20: mol_type = other RNA
gagtgggtccctcagcgccc

SEQ ID NO: 22974 - RNA, 20 nt, synthetic construct
  source 1..20: mol_type = other RNA
agtgggtccctcagcgccct

SEQ ID NO: 22975 - RNA, 20 nt, synthetic construct
  source 1..20: mol_type = other RNA
gggtccctcagcgccctggg

SEQ ID NO: 22976 - RNA, 20 nt, synthetic construct
  source 1..20: mol_type = other RNA
ggtccctcagcgccctgggt

SEQ ID NO: 22977 - RNA, 20 nt, synthetic construct
  source 1..20: mol_type = other RNA
ccctcagcgccctgggtggg

SEQ ID NO: 22978 - RNA, 20 nt, synthetic construct
  source 1..20: mol_type = other RNA
cctcagcgccctgggtgggt

SEQ ID NO: 22979 - RNA, 20 nt, synthetic construct
  source 1..20: mol_type = other RNA
ccacccacccagggcgctga

SEQ ID NO: 22980 - RNA, 20 nt, synthetic construct
  source 1..20: mol_type = other RNA
cccacccacccagggcgctg

SEQ ID NO: 22981 - RNA, 20 nt, synthetic construct
  source 1..20: mol_type = other RNA
ctgggtgggtgggcctgcac

SEQ ID NO: 22982 - RNA, 20 nt, synthetic construct
  source 1..20: mol_type = other RNA
tgggtgggtgggcctgcaca

SEQ ID NO: 22983 - RNA, 20 nt, synthetic construct
  source 1..20: mol_type = other RNA
gggtgggtgggcctgcacag

SEQ ID NO: 22984 - RNA, 20 nt, synthetic construct
  source 1..20: mol_type = other RNA
ggtgggtgggcctgcacagg

SEQ ID NO: 22985 - RNA, 20 nt, synthetic construct
  source 1..20: mol_type = other RNA
ctgtgcaggcccacccaccc

SEQ ID NO: 22986 - RNA, 20 nt, synthetic construct
  source 1..20: mol_type = other RNA
gaaggaggtaccccctgtgc

SEQ ID NO: 22987 - RNA, 20 nt, synthetic construct
  source 1..20: mol_type = other RNA
agggggtacctccttctctg

SEQ ID NO: 22988 - RNA, 20 nt, synthetic construct
  source 1..20: mol_type = other RNA
tacctccttctctgaggaac

SEQ ID NO: 22989 - RNA, 20 nt, synthetic construct
  source 1..20: mol_type = other RNA
acctccttctctgaggaact

SEQ ID NO: 22990 - RNA, 20 nt, synthetic construct
  source 1..20: mol_type = other RNA
gcccagttcctcagagaagg

SEQ ID NO: 22991 - RNA, 20 nt, synthetic construct
  source 1..20: mol_type = other RNA
ctctgaggaactgggctgtt

SEQ ID NO: 22992 - RNA, 20 nt, synthetic construct
  source 1..20: mol_type = other RNA
tctgaggaactgggctgtta

SEQ ID NO: 22993 - RNA, 20 nt, synthetic construct
  source 1..20: mol_type = other RNA
ggctgttagggattttcctt

SEQ ID NO: 22994 - RNA, 20 nt, synthetic construct
  source 1..20: mol_type = other RNA
gggattttccttaggccctt

SEQ ID NO: 22995 - RNA, 20 nt, synthetic construct
  source 1..20: mol_type = other RNA
ggccctttggtttccgccta

SEQ ID NO: 22996 - RNA, 20 nt, synthetic construct
  source 1..20: mol_type = other RNA
tttggtttccgcctacggag

SEQ ID NO: 22997 - RNA, 20 nt, synthetic construct
  source 1..20: mol_type = other RNA
ctccgtaggcggaaaccaaa

SEQ ID NO: 22998 - RNA, 20 nt, synthetic construct
  source 1..20: mol_type = other RNA
tctccgtaggcggaaaccaa

SEQ ID NO: 22999 - RNA, 20 nt, synthetic construct
  source 1..20: mol_type = other RNA
tacggagaggtttcccccat

SEQ ID NO: 23000 - RNA, 20 nt, synthetic construct
  source 1..20: mol_type = other RNA
aatgggggaaacctctccgt

SEQ ID NO: 23001 - RNA, 20 nt, synthetic construct
  source 1..20: mol_type = other RNA
tgaggaagagcaaccaatgg

SEQ ID NO: 23002 - RNA, 20 nt, synthetic construct
  source 1..20: mol_type = other RNA
ttggttgctcttcctcagcc

SEQ ID NO: 23003 - RNA, 20 nt, synthetic construct
  source 1..20: mol_type = other RNA
tggttgctcttcctcagcca

SEQ ID NO: 23004 - RNA, 20 nt, synthetic construct
  source 1..20: mol_type = other RNA
ggctgaggaagagcaaccaa

SEQ ID NO: 23005 - RNA, 20 nt, synthetic construct
  source 1..20: mol_type = other RNA
cctcagccagggttacttcc

SEQ ID NO: 23006 - RNA, 20 nt, synthetic construct
  source 1..20: mol_type = other RNA
ccaggaagtaaccctggctg

SEQ ID NO: 23007 - RNA, 20 nt, synthetic construct
  source 1..20: mol_type = other RNA
aacagaccaggaagtaaccc

SEQ ID NO: 23008 - RNA, 20 nt, synthetic construct
  source 1..20: mol_type = other RNA
attgggtaggggaacagacc

SEQ ID NO: 23009 - RNA, 20 nt, synthetic construct
  source 1..20: mol_type = other RNA
agcggcggggtattgggtag

SEQ ID NO: 23010 - RNA, 20 nt, synthetic construct
  source 1..20: mol_type = other RNA
gagcggcggggtattgggta

SEQ ID NO: 23011 - RNA, 20 nt, synthetic construct
  source 1..20: mol_type = other RNA
agagcggcggggtattgggt

SEQ ID NO: 23012 - RNA, 20 nt, synthetic construct
  source 1..20: mol_type = other RNA
tgacagagcggcggggtatt

SEQ ID NO: 23013 - RNA, 20 nt, synthetic construct
  source 1..20: mol_type = other RNA
ctgacagagcggcggggtat

SEQ ID NO: 23014 - RNA, 20 nt, synthetic construct
  source 1..20: mol_type = other RNA
ctcaagctgacagagcggcg

SEQ ID NO: 23015 - RNA, 20 nt, synthetic construct
  source 1..20: mol_type = other RNA
gctcaagctgacagagcggc

SEQ ID NO: 23016 - RNA, 20 nt, synthetic construct
  source 1..20: mol_type = other RNA
gctctgtcagcttgagctcc

SEQ ID NO: 23017 - RNA, 20 nt, synthetic construct
  source 1..20: mol_type = other RNA
ctgtcagcttgagctccagg

SEQ ID NO: 23018 - RNA, 20 nt, synthetic construct
  source 1..20: mol_type = other RNA
tgagctccaggtggagctcc

SEQ ID NO: 23019 - RNA, 20 nt, synthetic construct
  source 1..20: mol_type = other RNA
gctccaggtggagctccagg

SEQ ID NO: 23020 - RNA, 20 nt, synthetic construct
  source 1..20: mol_type = other RNA
gagccacctggagctccacc

SEQ ID NO: 23021 - RNA, 20 nt, synthetic construct
  source 1..20: mol_type = other RNA
ccaggtggctcctcctctcc

SEQ ID NO: 23022 - RNA, 20 nt, synthetic construct
  source 1..20: mol_type = other RNA
caggtggctcctcctctccc

SEQ ID NO: 23023 - RNA, 20 nt, synthetic construct
  source 1..20: mol_type = other RNA
aggtggctcctcctctcccg

SEQ ID NO: 23024 - RNA, 20 nt, synthetic construct
  source 1..20: mol_type = other RNA
ggtggctcctcctctcccgg

SEQ ID NO: 23025 - RNA, 20 nt, synthetic construct
  source 1..20: mol_type = other RNA
ccgggagaggaggagccacc

SEQ ID NO: 23026 - RNA, 20 nt, synthetic construct
  source 1..20: mol_type = other RNA
gctcctcctctcccggggga

SEQ ID NO: 23027 - RNA, 20 nt, synthetic construct
  source 1..20: mol_type = other RNA
cctcctctcccgggggaagg

SEQ ID NO: 23028 - RNA, 20 nt, synthetic construct
  source 1..20: mol_type = other RNA
ccgccttcccccgggagagg

SEQ ID NO: 23029 - RNA, 20 nt, synthetic construct
  source 1..20: mol_type = other RNA
ctcccgggggaaggcggccc

SEQ ID NO: 23030 - RNA, 20 nt, synthetic construct
  source 1..20: mol_type = other RNA
gggccgccttcccccgggag

SEQ ID NO: 23031 - RNA, 20 nt, synthetic construct
  source 1..20: mol_type = other RNA
gtccagggccgccttccccc

SEQ ID NO: 23032 - RNA, 20 nt, synthetic construct
  source 1..20: mol_type = other RNA
ggtccagggccgccttcccc

SEQ ID NO: 23033 - RNA, 20 nt, synthetic construct
  source 1..20: mol_type = other RNA
gaaggcggccctggaccagc

SEQ ID NO: 23034 - RNA, 20 nt, synthetic construct
  source 1..20: mol_type = other RNA
ggcggccctggaccagcagg

SEQ ID NO: 23035 - RNA, 20 nt, synthetic construct
  source 1..20: mol_type = other RNA
gcggccctggaccagcaggc

SEQ ID NO: 23036 - RNA, 20 nt, synthetic construct
  source 1..20: mol_type = other RNA
caggcccgcctgctggtcca

SEQ ID NO: 23037 - RNA, 20 nt, synthetic construct
  source 1..20: mol_type = other RNA
gcaggcccgcctgctggtcc

SEQ ID NO: 23038 - RNA, 20 nt, synthetic construct
  source 1..20: mol_type = other RNA
agtacagcaggcccgcctgc

SEQ ID NO: 23039 - RNA, 20 nt, synthetic construct
  source 1..20: mol_type = other RNA
ggcctgctgtactcccgctt

SEQ ID NO: 23040 - RNA, 20 nt, synthetic construct
  source 1..20: mol_type = other RNA
gcctgctgtactcccgcttt

SEQ ID NO: 23041 - RNA, 20 nt, synthetic construct
  source 1..20: mol_type = other RNA
cctgctgtactcccgctttg

SEQ ID NO: 23042 - RNA, 20 nt, synthetic construct
  source 1..20: mol_type = other RNA
ccccaaagcgggagtacagc

SEQ ID NO: 23043 - RNA, 20 nt, synthetic construct
  source 1..20: mol_type = other RNA
tactcccgctttggggctgc

SEQ ID NO: 23044 - RNA, 20 nt, synthetic construct
  source 1..20: mol_type = other RNA
actcccgctttggggctgca

SEQ ID NO: 23045 - RNA, 20 nt, synthetic construct
  source 1..20: mol_type = other RNA
ctttggggctgcagggaagc

SEQ ID NO: 23046 - RNA, 20 nt, synthetic construct
  source 1..20: mol_type = other RNA
cttccctgcagccccaaagc

SEQ ID NO: 23047 - RNA, 20 nt, synthetic construct
  source 1..20: mol_type = other RNA
gcttccctgcagccccaaag

SEQ ID NO: 23048 - RNA, 20 nt, synthetic construct
  source 1..20: mol_type = other RNA
tgcagggaagctggccgctg

SEQ ID NO: 23049 - RNA, 20 nt, synthetic construct
  source 1..20: mol_type = other RNA
gcagggaagctggccgctgt

SEQ ID NO: 23050 - RNA, 20 nt, synthetic construct
  source 1..20: mol_type = other RNA
gggaagctggccgctgtggg

SEQ ID NO: 23051 - RNA, 20 nt, synthetic construct
  source 1..20: mol_type = other RNA
ctggccgctgtgggcggtct

SEQ ID NO: 23052 - RNA, 20 nt, synthetic construct
  source 1..20: mol_type = other RNA
tggccgctgtgggcggtctc

SEQ ID NO: 23053 - RNA, 20 nt, synthetic construct
  source 1..20: mol_type = other RNA
tggcccgagaccgcccacag

SEQ ID NO: 23054 - RNA, 20 nt, synthetic construct
  source 1..20: mol_type = other RNA
aaggacaggtggggcggggc

SEQ ID NO: 23055 - RNA, 20 nt, synthetic construct
  source 1..20: mol_type = other RNA
cgccccacctgtccttttcc

SEQ ID NO: 23056 - RNA, 20 nt, synthetic construct
  source 1..20: mol_type = other RNA
ggaaaaggacaggtggggcg

SEQ ID NO: 23057 - RNA, 20 nt, synthetic construct
  source 1..20: mol_type = other RNA
aggaaaaggacaggtggggc

SEQ ID NO: 23058 - RNA, 20 nt, synthetic construct
  source 1..20: mol_type = other RNA
caggaaaaggacaggtgggg

SEQ ID NO: 23059 - RNA, 20 nt, synthetic construct
  source 1..20: mol_type = other RNA
ctccaggaaaaggacaggtg

SEQ ID NO: 23060 - RNA, 20 nt, synthetic construct
  source 1..20: mol_type = other RNA
tctccaggaaaaggacaggt

SEQ ID NO: 23061 - RNA, 20 nt, synthetic construct
  source 1..20: mol_type = other RNA
gtctccaggaaaaggacagg

SEQ ID NO: 23062 - RNA, 20 nt, synthetic construct
  source 1..20: mol_type = other RNA
atagtctccaggaaaaggac

SEQ ID NO: 23063 - RNA, 20 nt, synthetic construct
  source 1..20: mol_type = other RNA
ttcctggagactattagtcc

SEQ ID NO: 23064 - RNA, 20 nt, synthetic construct
  source 1..20: mol_type = other RNA
tcctggagactattagtcca

SEQ ID NO: 23065 - RNA, 20 nt, synthetic construct
  source 1..20: mol_type = other RNA
accctggactaatagtctcc

SEQ ID NO: 23066 - RNA, 20 nt, synthetic construct
  source 1..20: mol_type = other RNA
gtttgtccctgcagtgccat

SEQ ID NO: 23067 - RNA, 20 nt, synthetic construct
  source 1..20: mol_type = other RNA
tccctgcagtgccattggcc

SEQ ID NO: 23068 - RNA, 20 nt, synthetic construct
  source 1..20: mol_type = other RNA
tgcagtgccattggcctggc

SEQ ID NO: 23069 - RNA, 20 nt, synthetic construct
  source 1..20: mol_type = other RNA
gccaggccaatggcactgca

SEQ ID NO: 23070 - RNA, 20 nt, synthetic construct
  source 1..20: mol_type = other RNA
tgccaggccaatggcactgc

SEQ ID NO: 23071 - RNA, 20 nt, synthetic construct
  source 1..20: mol_type = other RNA
gtgccattggcctggcaggc

SEQ ID NO: 23072 - RNA, 20 nt, synthetic construct
  source 1..20: mol_type = other RNA
tggcctggcaggcaggatcg

SEQ ID NO: 23073 - RNA, 20 nt, synthetic construct
  source 1..20: mol_type = other RNA
gatcctgcctgccaggccaa

SEQ ID NO: 23074 - RNA, 20 nt, synthetic construct
  source 1..20: mol_type = other RNA
cctggcaggcaggatcgagg

SEQ ID NO: 23075 - RNA, 20 nt, synthetic construct
  source 1..20: mol_type = other RNA
cctcctcgatcctgcctgcc

SEQ ID NO: 23076 - RNA, 20 nt, synthetic construct
  source 1..20: mol_type = other RNA
aggcaggatcgaggaggaag

SEQ ID NO: 23077 - RNA, 20 nt, synthetic construct
  source 1..20: mol_type = other RNA
ggaagtggctgattactgag

SEQ ID NO: 23078 - RNA, 20 nt, synthetic construct
  source 1..20: mol_type = other RNA
ctgagcggttcttcctcacc

SEQ ID NO: 23079 - RNA, 20 nt, synthetic construct
  source 1..20: mol_type = other RNA
cggttcttcctcacctggct

SEQ ID NO: 23080 - RNA, 20 nt, synthetic construct
  source 1..20: mol_type = other RNA
ggttcttcctcacctggctt

SEQ ID NO: 23081 - RNA, 20 nt, synthetic construct
  source 1..20: mol_type = other RNA
acagtggcccaagccaggtg

SEQ ID NO: 23082 - RNA, 20 nt, synthetic construct
  source 1..20: mol_type = other RNA
tgtgcacagtggcccaagcc

SEQ ID NO: 23083 - RNA, 20 nt, synthetic construct
  source 1..20: mol_type = other RNA
actgtgcacagctgtgccgc

SEQ ID NO: 23084 - RNA, 20 nt, synthetic construct
  source 1..20: mol_type = other RNA
agcggcacagctgtgcacag

SEQ ID NO: 23085 - RNA, 20 nt, synthetic construct
  source 1..20: mol_type = other RNA
tggctcagccccgccccctg

SEQ ID NO: 23086 - RNA, 20 nt, synthetic construct
  source 1..20: mol_type = other RNA
agggggcggggctgagccag

SEQ ID NO: 23087 - RNA, 20 nt, synthetic construct
  source 1..20: mol_type = other RNA
ccccctgcggccctctgccg

SEQ ID NO: 23088 - RNA, 20 nt, synthetic construct
  source 1..20: mol_type = other RNA
ggcagagggccgcagggggc

SEQ ID NO: 23089 - RNA, 20 nt, synthetic construct
  source 1..20: mol_type = other RNA
cggcagagggccgcaggggg

SEQ ID NO: 23090 - RNA, 20 nt, synthetic construct
  source 1..20: mol_type = other RNA
ccacggcagagggccgcagg

SEQ ID NO: 23091 - RNA, 20 nt, synthetic construct
  source 1..20: mol_type = other RNA
gccacggcagagggccgcag

SEQ ID NO: 23092 - RNA, 20 nt, synthetic construct
  source 1..20: mol_type = other RNA
agccacggcagagggccgca

SEQ ID NO: 23093 - RNA, 20 nt, synthetic construct
  source 1..20: mol_type = other RNA
aagccacggcagagggccgc

SEQ ID NO: 23094 - RNA, 20 nt, synthetic construct
  source 1..20: mol_type = other RNA
gagggggaagccacggcaga

SEQ ID NO: 23095 - RNA, 20 nt, synthetic construct
  source 1..20: mol_type = other RNA
ggagggggaagccacggcag

SEQ ID NO: 23096 - RNA, 20 nt, synthetic construct
  source 1..20: mol_type = other RNA
ctgtagggagggggaagcca

SEQ ID NO: 23097 - RNA, 20 nt, synthetic construct
  source 1..20: mol_type = other RNA
agcatctctctgtagggagg

SEQ ID NO: 23098 - RNA, 20 nt, synthetic construct
  source 1..20: mol_type = other RNA
cagcatctctctgtagggag

SEQ ID NO: 23099 - RNA, 20 nt, synthetic construct
  source 1..20: mol_type = other RNA
acagcatctctctgtaggga

SEQ ID NO: 23100 - RNA, 20 nt, synthetic construct
  source 1..20: mol_type = other RNA
gacagcatctctctgtaggg

SEQ ID NO: 23101 - RNA, 20 nt, synthetic construct
  source 1..20: mol_type = other RNA
tacagagagatgctgtcccg

SEQ ID NO: 23102 - RNA, 20 nt, synthetic construct
  source 1..20: mol_type = other RNA
acagagagatgctgtcccgt

SEQ ID NO: 23103 - RNA, 20 nt, synthetic construct
  source 1..20: mol_type = other RNA
cgggacagcatctctctgta

SEQ ID NO: 23104 - RNA, 20 nt, synthetic construct
  source 1..20: mol_type = other RNA
acgggacagcatctctctgt

SEQ ID NO: 23105 - RNA, 20 nt, synthetic construct
  source 1..20: mol_type = other RNA
gctgtcccgtgggtaagtcc

SEQ ID NO: 23106 - RNA, 20 nt, synthetic construct
  source 1..20: mol_type = other RNA
ctgtcccgtgggtaagtccc

SEQ ID NO: 23107 - RNA, 20 nt, synthetic construct
  source 1..20: mol_type = other RNA
gggtaagtcccgggcaccat

SEQ ID NO: 23108 - RNA, 20 nt, synthetic construct
  source 1..20: mol_type = other RNA
ggtaagtcccgggcaccatc

SEQ ID NO: 23109 - RNA, 20 nt, synthetic construct
  source 1..20: mol_type = other RNA
gtaagtcccgggcaccatcg

SEQ ID NO: 23110 - RNA, 20 nt, synthetic construct
  source 1..20: mol_type = other RNA
ctggggcagccggcagggcg

SEQ ID NO: 23111 - RNA, 20 nt, synthetic construct
  source 1..20: mol_type = other RNA
cctggggcagccggcagggc

SEQ ID NO: 23112 - RNA, 20 nt, synthetic construct
  source 1..20: mol_type = other RNA
gcctggggcagccggcaggg

SEQ ID NO: 23113 - RNA, 20 nt, synthetic construct
  source 1..20: mol_type = other RNA
tgccggctgccccaggccag

SEQ ID NO: 23114 - RNA, 20 nt, synthetic construct
  source 1..20: mol_type = other RNA
ctggcctggggcagccggca

SEQ ID NO: 23115 - RNA, 20 nt, synthetic construct
  source 1..20: mol_type = other RNA
actggcctggggcagccggc

SEQ ID NO: 23116 - RNA, 20 nt, synthetic construct
  source 1..20: mol_type = other RNA
gctgccccaggccagtggag

SEQ ID NO: 23117 - RNA, 20 nt, synthetic construct
  source 1..20: mol_type = other RNA
ctccactggcctggggcagc

SEQ ID NO: 23118 - RNA, 20 nt, synthetic construct
  source 1..20: mol_type = other RNA
gctgccactccactggcctg

SEQ ID NO: 23119 - RNA, 20 nt, synthetic construct
  source 1..20: mol_type = other RNA
ggctgccactccactggcct

SEQ ID NO: 23120 - RNA, 20 nt, synthetic construct
  source 1..20: mol_type = other RNA
gggctgccactccactggcc

SEQ ID NO: 23121 - RNA, 20 nt, synthetic construct
  source 1..20: mol_type = other RNA
tggagtggcagccccagaac

SEQ ID NO: 23122 - RNA, 20 nt, synthetic construct
  source 1..20: mol_type = other RNA
ggagtggcagccccagaact

SEQ ID NO: 23123 - RNA, 20 nt, synthetic construct
  source 1..20: mol_type = other RNA
agccccagaactgggaccac

SEQ ID NO: 23124 - RNA, 20 nt, synthetic construct
  source 1..20: mol_type = other RNA
gccccagaactgggaccacc

SEQ ID NO: 23125 - RNA, 20 nt, synthetic construct
  source 1..20: mol_type = other RNA
ccccagaactgggaccaccg

SEQ ID NO: 23126 - RNA, 20 nt, synthetic construct
  source 1..20: mol_type = other RNA
cccagaactgggaccaccgg

SEQ ID NO: 23127 - RNA, 20 nt, synthetic construct
  source 1..20: mol_type = other RNA
agaactgggaccaccggggg

SEQ ID NO: 23128 - RNA, 20 nt, synthetic construct
  source 1..20: mol_type = other RNA
ccccggtggtcccagttctg

SEQ ID NO: 23129 - RNA, 20 nt, synthetic construct
  source 1..20: mol_type = other RNA
cccccggtggtcccagttct

SEQ ID NO: 23130 - RNA, 20 nt, synthetic construct
  source 1..20: mol_type = other RNA
acccccggtggtcccagttc

SEQ ID NO: 23131 - RNA, 20 nt, synthetic construct
  source 1..20: mol_type = other RNA
tgggaccaccgggggtggtg

SEQ ID NO: 23132 - RNA, 20 nt, synthetic construct
  source 1..20: mol_type = other RNA
gaccaccgggggtggtgagg

SEQ ID NO: 23133 - RNA, 20 nt, synthetic construct
  source 1..20: mol_type = other RNA
ccgggggtggtgaggcggcc

SEQ ID NO: 23134 - RNA, 20 nt, synthetic construct
  source 1..20: mol_type = other RNA
ggccgcctcaccacccccgg

SEQ ID NO: 23135 - RNA, 20 nt, synthetic construct
  source 1..20: mol_type = other RNA
ccgggccgcctcaccacccc

SEQ ID NO: 23136 - RNA, 20 nt, synthetic construct
  source 1..20: mol_type = other RNA
gtggtgaggcggcccggcac

SEQ ID NO: 23137 - RNA, 20 nt, synthetic construct
  source 1..20: mol_type = other RNA
tggtgaggcggcccggcact

SEQ ID NO: 23138 - RNA, 20 nt, synthetic construct
  source 1..20: mol_type = other RNA
ggcactgggagctgcatctg

SEQ ID NO: 23139 - RNA, 20 nt, synthetic construct
  source 1..20: mol_type = other RNA
cagatgcagctcccagtgcc

SEQ ID NO: 23140 - RNA, 20 nt, synthetic construct
  source 1..20: mol_type = other RNA
tcagatgcagctcccagtgc

SEQ ID NO: 23141 - RNA, 20 nt, synthetic construct
  source 1..20: mol_type = other RNA
ctgggcaggcagagagctca

SEQ ID NO: 23142 - RNA, 20 nt, synthetic construct
  source 1..20: mol_type = other RNA
tctgggcaggcagagagctc

SEQ ID NO: 23143 - RNA, 20 nt, synthetic construct
  source 1..20: mol_type = other RNA
gaggtgcagctagtctgggc

SEQ ID NO: 23144 - RNA, 20 nt, synthetic construct
  source 1..20: mol_type = other RNA
tgaggaggtgcagctagtct

SEQ ID NO: 23145 - RNA, 20 nt, synthetic construct
  source 1..20: mol_type = other RNA
atgaggaggtgcagctagtc

SEQ ID NO: 23146 - RNA, 20 nt, synthetic construct
  source 1..20: mol_type = other RNA
agggggcgcagggaatgagg

SEQ ID NO: 23147 - RNA, 20 nt, synthetic construct
  source 1..20: mol_type = other RNA
ggaagggggcgcagggaatg

SEQ ID NO: 23148 - RNA, 20 nt, synthetic construct
  source 1..20: mol_type = other RNA
ccctgcgcccccttcctctc

SEQ ID NO: 23149 - RNA, 20 nt, synthetic construct
  source 1..20: mol_type = other RNA
ccggagaggaagggggcgca

SEQ ID NO: 23150 - RNA, 20 nt, synthetic construct
  source 1..20: mol_type = other RNA
tccggagaggaagggggcgc

SEQ ID NO: 23151 - RNA, 20 nt, synthetic construct
  source 1..20: mol_type = other RNA
cttcctctccggaagccccc

SEQ ID NO: 23152 - RNA, 20 nt, synthetic construct
  source 1..20: mol_type = other RNA
ggggcttccggagaggaagg

SEQ ID NO: 23153 - RNA, 20 nt, synthetic construct
  source 1..20: mol_type = other RNA
gggggcttccggagaggaag

SEQ ID NO: 23154 - RNA, 20 nt, synthetic construct
  source 1..20: mol_type = other RNA
tgggggcttccggagaggaa

SEQ ID NO: 23155 - RNA, 20 nt, synthetic construct
  source 1..20: mol_type = other RNA
ctctccggaagcccccagga

SEQ ID NO: 23156 - RNA, 20 nt, synthetic construct
  source 1..20: mol_type = other RNA
catcctgggggcttccggag

SEQ ID NO: 23157 - RNA, 20 nt, synthetic construct
  source 1..20: mol_type = other RNA
cggaagcccccaggatggtg

SEQ ID NO: 23158 - RNA, 20 nt, synthetic construct
  source 1..20: mol_type = other RNA
ctcaccatcctgggggcttc

SEQ ID NO: 23159 - RNA, 20 nt, synthetic construct
  source 1..20: mol_type = other RNA
gcccccaggatggtgaggta

SEQ ID NO: 23160 - RNA, 20 nt, synthetic construct
  source 1..20: mol_type = other RNA
cccccaggatggtgaggtaa

SEQ ID NO: 23161 - RNA, 20 nt, synthetic construct
  source 1..20: mol_type = other RNA
cccttacctcaccatcctgg

SEQ ID NO: 23162 - RNA, 20 nt, synthetic construct
  source 1..20: mol_type = other RNA
gcccttacctcaccatcctg

SEQ ID NO: 23163 - RNA, 20 nt, synthetic construct
  source 1..20: mol_type = other RNA
ggcccttacctcaccatcct

SEQ ID NO: 23164 - RNA, 20 nt, synthetic construct
  source 1..20: mol_type = other RNA
aggcccttacctcaccatcc

SEQ ID NO: 23165 - RNA, 20 nt, synthetic construct
  source 1..20: mol_type = other RNA
aggtaagggcctgccaccca

SEQ ID NO: 23166 - RNA, 20 nt, synthetic construct
  source 1..20: mol_type = other RNA
ctgccctgcctgggccgccc

SEQ ID NO: 23167 - RNA, 20 nt, synthetic construct
  source 1..20: mol_type = other RNA
ccctgcctgggccgcccagg

SEQ ID NO: 23168 - RNA, 20 nt, synthetic construct
  source 1..20: mol_type = other RNA
ccacctgggcggcccaggca

SEQ ID NO: 23169 - RNA, 20 nt, synthetic construct
  source 1..20: mol_type = other RNA
accacctgggcggcccaggc

SEQ ID NO: 23170 - RNA, 20 nt, synthetic construct
  source 1..20: mol_type = other RNA
tgaaaccacctgggcggccc

SEQ ID NO: 23171 - RNA, 20 nt, synthetic construct
  source 1..20: mol_type = other RNA
tctcggtgaaaccacctggg

SEQ ID NO: 23172 - RNA, 20 nt, synthetic construct
  source 1..20: mol_type = other RNA
aggtctcggtgaaaccacct

SEQ ID NO: 23173 - RNA, 20 nt, synthetic construct
  source 1..20: mol_type = other RNA
tggtttcaccgagacctcag

SEQ ID NO: 23174 - RNA, 20 nt, synthetic construct
  source 1..20: mol_type = other RNA
ggtttcaccgagacctcagt

SEQ ID NO: 23175 - RNA, 20 nt, synthetic construct
  source 1..20: mol_type = other RNA
tcaccgagacctcagtgggc

SEQ ID NO: 23176 - RNA, 20 nt, synthetic construct
  source 1..20: mol_type = other RNA
catccagcccactgaggtct

SEQ ID NO: 23177 - RNA, 20 nt, synthetic construct
  source 1..20: mol_type = other RNA
tctctgcatccagcccactg

SEQ ID NO: 23178 - RNA, 20 nt, synthetic construct
  source 1..20: mol_type = other RNA
ggatgcagagaccctgctca

SEQ ID NO: 23179 - RNA, 20 nt, synthetic construct
  source 1..20: mol_type = other RNA
gatgcagagaccctgctcaa

SEQ ID NO: 23180 - RNA, 20 nt, synthetic construct
  source 1..20: mol_type = other RNA
gagaccctgctcaagggccg

SEQ ID NO: 23181 - RNA, 20 nt, synthetic construct
  source 1..20: mol_type = other RNA
ctcaagggccgaggtgtcca

SEQ ID NO: 23182 - RNA, 20 nt, synthetic construct
  source 1..20: mol_type = other RNA
ggacacctcggcccttgagc

SEQ ID NO: 23183 - RNA, 20 nt, synthetic construct
  source 1..20: mol_type = other RNA
aggtgtccacggtagcttcc

SEQ ID NO: 23184 - RNA, 20 nt, synthetic construct
  source 1..20: mol_type = other RNA
ggaagctaccgtggacacct

SEQ ID NO: 23185 - RNA, 20 nt, synthetic construct
  source 1..20: mol_type = other RNA
tccacggtagcttcctggct

SEQ ID NO: 23186 - RNA, 20 nt, synthetic construct
  source 1..20: mol_type = other RNA
gccgagccaggaagctaccg

SEQ ID NO: 23187 - RNA, 20 nt, synthetic construct
  source 1..20: mol_type = other RNA
tcttgcgactgggccgagcc

SEQ ID NO: 23188 - RNA, 20 nt, synthetic construct
  source 1..20: mol_type = other RNA
tcggcccagtcgcaagaacc

SEQ ID NO: 23189 - RNA, 20 nt, synthetic construct
  source 1..20: mol_type = other RNA
cggcccagtcgcaagaacca

SEQ ID NO: 23190 - RNA, 20 nt, synthetic construct
  source 1..20: mol_type = other RNA
tcaccctggttcttgcgact

SEQ ID NO: 23191 - RNA, 20 nt, synthetic construct
  source 1..20: mol_type = other RNA
gtcaccctggttcttgcgac

SEQ ID NO: 23192 - RNA, 20 nt, synthetic construct
  source 1..20: mol_type = other RNA
gtgacttctcgctctccgtc

SEQ ID NO: 23193 - RNA, 20 nt, synthetic construct
  source 1..20: mol_type = other RNA
cttctcgctctccgtcaggt

SEQ ID NO: 23194 - RNA, 20 nt, synthetic construct
  source 1..20: mol_type = other RNA
ctcgctctccgtcaggtagg

SEQ ID NO: 23195 - RNA, 20 nt, synthetic construct
  source 1..20: mol_type = other RNA
tcgctctccgtcaggtaggt

SEQ ID NO: 23196 - RNA, 20 nt, synthetic construct
  source 1..20: mol_type = other RNA
cggggggcccacctacctga

SEQ ID NO: 23197 - RNA, 20 nt, synthetic construct
  source 1..20: mol_type = other RNA
aggtgggccccccgcaaccc

SEQ ID NO: 23198 - RNA, 20 nt, synthetic construct
  source 1..20: mol_type = other RNA
ggtgggccccccgcaacccc

SEQ ID NO: 23199 - RNA, 20 nt, synthetic construct
  source 1..20: mol_type = other RNA
ctcaccgcctggtgccctgc

SEQ ID NO: 23200 - RNA, 20 nt, synthetic construct
  source 1..20: mol_type = other RNA
tcaccgcctggtgccctgca

SEQ ID NO: 23201 - RNA, 20 nt, synthetic construct
  source 1..20: mol_type = other RNA
ccgcctggtgccctgcaggg

SEQ ID NO: 23202 - RNA, 20 nt, synthetic construct
  source 1..20: mol_type = other RNA
cgcctggtgccctgcagggt

SEQ ID NO: 23203 - RNA, 20 nt, synthetic construct
  source 1..20: mol_type = other RNA
gcctggtgccctgcagggtg

SEQ ID NO: 23204 - RNA, 20 nt, synthetic construct
  source 1..20: mol_type = other RNA
cctggtgccctgcagggtgg

SEQ ID NO: 23205 - RNA, 20 nt, synthetic construct
  source 1..20: mol_type = other RNA
ccaccctgcagggcaccagg

SEQ ID NO: 23206 - RNA, 20 nt, synthetic construct
  source 1..20: mol_type = other RNA
cccccaccctgcagggcacc

SEQ ID NO: 23207 - RNA, 20 nt, synthetic construct
  source 1..20: mol_type = other RNA
gccctgcagggtgggggatc

SEQ ID NO: 23208 - RNA, 20 nt, synthetic construct
  source 1..20: mol_type = other RNA
acctgatcccccaccctgca

SEQ ID NO: 23209 - RNA, 20 nt, synthetic construct
  source 1..20: mol_type = other RNA
cacctgatcccccaccctgc

SEQ ID NO: 23210 - RNA, 20 nt, synthetic construct
  source 1..20: mol_type = other RNA
gggatcaggtgacccatatt

SEQ ID NO: 23211 - RNA, 20 nt, synthetic construct
  source 1..20: mol_type = other RNA
catattcggatccagaactc

SEQ ID NO: 23212 - RNA, 20 nt, synthetic construct
  source 1..20: mol_type = other RNA
atattcggatccagaactca

SEQ ID NO: 23213 - RNA, 20 nt, synthetic construct
  source 1..20: mol_type = other RNA
tattcggatccagaactcag

SEQ ID NO: 23214 - RNA, 20 nt, synthetic construct
  source 1..20: mol_type = other RNA
tgagttctggatccgaatat

SEQ ID NO: 23215 - RNA, 20 nt, synthetic construct
  source 1..20: mol_type = other RNA
ctgagttctggatccgaata

SEQ ID NO: 23216 - RNA, 20 nt, synthetic construct
  source 1..20: mol_type = other RNA
catagaaatcccctgagttc

SEQ ID NO: 23217 - RNA, 20 nt, synthetic construct
  source 1..20: mol_type = other RNA
ggggatttctatgacctgta

SEQ ID NO: 23218 - RNA, 20 nt, synthetic construct
  source 1..20: mol_type = other RNA
gatttctatgacctgtatgg

SEQ ID NO: 23219 - RNA, 20 nt, synthetic construct
  source 1..20: mol_type = other RNA
atttctatgacctgtatgga

SEQ ID NO: 23220 - RNA, 20 nt, synthetic construct
  source 1..20: mol_type = other RNA
tttctatgacctgtatggag

SEQ ID NO: 23221 - RNA, 20 nt, synthetic construct
  source 1..20: mol_type = other RNA
caaacttctcccctccatac

SEQ ID NO: 23222 - RNA, 20 nt, synthetic construct
  source 1..20: mol_type = other RNA
gtttgcgactctgacagagc

SEQ ID NO: 23223 - RNA, 20 nt, synthetic construct
  source 1..20: mol_type = other RNA
tgcgactctgacagagctgg

SEQ ID NO: 23224 - RNA, 20 nt, synthetic construct
  source 1..20: mol_type = other RNA
ggagtactacactcagcagc

SEQ ID NO: 23225 - RNA, 20 nt, synthetic construct
  source 1..20: mol_type = other RNA
gagtactacactcagcagca

SEQ ID NO: 23226 - RNA, 20 nt, synthetic construct
  source 1..20: mol_type = other RNA
tcagcagcagggtgtcctgc

SEQ ID NO: 23227 - RNA, 20 nt, synthetic construct
  source 1..20: mol_type = other RNA
ggtgtcctgcaggaccgcga

SEQ ID NO: 23228 - RNA, 20 nt, synthetic construct
  source 1..20: mol_type = other RNA
tggtgccgtcgcggtcctgc

SEQ ID NO: 23229 - RNA, 20 nt, synthetic construct
  source 1..20: mol_type = other RNA
ggtggatgatggtgccgtcg

SEQ ID NO: 23230 - RNA, 20 nt, synthetic construct
  source 1..20: mol_type = other RNA
cgggtacttgaggtggatga

SEQ ID NO: 23231 - RNA, 20 nt, synthetic construct
  source 1..20: mol_type = other RNA
agttcagcgggtacttgagg

SEQ ID NO: 23232 - RNA, 20 nt, synthetic construct
  source 1..20: mol_type = other RNA
agcagttcagcgggtacttg

SEQ ID NO: 23233 - RNA, 20 nt, synthetic construct
  source 1..20: mol_type = other RNA
tgggatcggagcagttcagc

SEQ ID NO: 23234 - RNA, 20 nt, synthetic construct
  source 1..20: mol_type = other RNA
gtgggatcggagcagttcag

SEQ ID NO: 23235 - RNA, 20 nt, synthetic construct
  source 1..20: mol_type = other RNA
gctccgatcccactagtgag

SEQ ID NO: 23236 - RNA, 20 nt, synthetic construct
  source 1..20: mol_type = other RNA
gatcccactagtgagaggtg

SEQ ID NO: 23237 - RNA, 20 nt, synthetic construct
  source 1..20: mol_type = other RNA
atcccactagtgagaggtga

SEQ ID NO: 23238 - RNA, 20 nt, synthetic construct
  source 1..20: mol_type = other RNA
tcacctctcactagtgggat

SEQ ID NO: 23239 - RNA, 20 nt, synthetic construct
  source 1..20: mol_type = other RNA
agccctcacctctcactagt

SEQ ID NO: 23240 - RNA, 20 nt, synthetic construct
  source 1..20: mol_type = other RNA
gagccctcacctctcactag

SEQ ID NO: 23241 - RNA, 20 nt, synthetic construct
  source 1..20: mol_type = other RNA
tccctgacgctgccttctct

SEQ ID NO: 23242 - RNA, 20 nt, synthetic construct
  source 1..20: mol_type = other RNA
agagaaggcagcgtcaggga

SEQ ID NO: 23243 - RNA, 20 nt, synthetic construct
  source 1..20: mol_type = other RNA
ctgacgctgccttctctagg

SEQ ID NO: 23244 - RNA, 20 nt, synthetic construct
  source 1..20: mol_type = other RNA
acctagagaaggcagcgtca

SEQ ID NO: 23245 - RNA, 20 nt, synthetic construct
  source 1..20: mol_type = other RNA
cacctagagaaggcagcgtc

SEQ ID NO: 23246 - RNA, 20 nt, synthetic construct
  source 1..20: mol_type = other RNA
gccttctctaggtggtacca

SEQ ID NO: 23247 - RNA, 20 nt, synthetic construct
  source 1..20: mol_type = other RNA
gccatggtaccacctagaga

SEQ ID NO: 23248 - RNA, 20 nt, synthetic construct
  source 1..20: mol_type = other RNA
tggtaccatggccacatgtc

SEQ ID NO: 23249 - RNA, 20 nt, synthetic construct
  source 1..20: mol_type = other RNA
taccatggccacatgtctgg

SEQ ID NO: 23250 - RNA, 20 nt, synthetic construct
  source 1..20: mol_type = other RNA
accatggccacatgtctggc

SEQ ID NO: 23251 - RNA, 20 nt, synthetic construct
  source 1..20: mol_type = other RNA
tggccacatgtctggcgggc

SEQ ID NO: 23252 - RNA, 20 nt, synthetic construct
  source 1..20: mol_type = other RNA
gcccgccagacatgtggcca

SEQ ID NO: 23253 - RNA, 20 nt, synthetic construct
  source 1..20: mol_type = other RNA
ctgcctgcccgccagacatg

SEQ ID NO: 23254 - RNA, 20 nt, synthetic construct
  source 1..20: mol_type = other RNA
gcaggcagagacgctgctgc

SEQ ID NO: 23255 - RNA, 20 nt, synthetic construct
  source 1..20: mol_type = other RNA
agagacgctgctgcaggcca

SEQ ID NO: 23256 - RNA, 20 nt, synthetic construct
  source 1..20: mol_type = other RNA
gagacgctgctgcaggccaa

SEQ ID NO: 23257 - RNA, 20 nt, synthetic construct
  source 1..20: mol_type = other RNA
tgcaggccaagggcgagccc

SEQ ID NO: 23258 - RNA, 20 nt, synthetic construct
  source 1..20: mol_type = other RNA
aaacgtccagggctcgccct

SEQ ID NO: 23259 - RNA, 20 nt, synthetic construct
  source 1..20: mol_type = other RNA
tcacgcacaagaaacgtcca

SEQ ID NO: 23260 - RNA, 20 nt, synthetic construct
  source 1..20: mol_type = other RNA
ctcacgcacaagaaacgtcc

SEQ ID NO: 23261 - RNA, 20 nt, synthetic construct
  source 1..20: mol_type = other RNA
cgtgagagcctcagccagcc

SEQ ID NO: 23262 - RNA, 20 nt, synthetic construct
  source 1..20: mol_type = other RNA
cgaagtctccaggctggctg

SEQ ID NO: 23263 - RNA, 20 nt, synthetic construct
  source 1..20: mol_type = other RNA
aaagcacgaagtctccaggc

SEQ ID NO: 23264 - RNA, 20 nt, synthetic construct
  source 1..20: mol_type = other RNA
acagaaagcacgaagtctcc

SEQ ID NO: 23265 - RNA, 20 nt, synthetic construct
  source 1..20: mol_type = other RNA
tgtgctcagtgaccagccca

SEQ ID NO: 23266 - RNA, 20 nt, synthetic construct
  source 1..20: mol_type = other RNA
ctcagtgaccagcccaaggc

SEQ ID NO: 23267 - RNA, 20 nt, synthetic construct
  source 1..20: mol_type = other RNA
gaccagcccaaggctggccc

SEQ ID NO: 23268 - RNA, 20 nt, synthetic construct
  source 1..20: mol_type = other RNA
agcctgggccagccttgggc

SEQ ID NO: 23269 - RNA, 20 nt, synthetic construct
  source 1..20: mol_type = other RNA
ggggagcctgggccagcctt

SEQ ID NO: 23270 - RNA, 20 nt, synthetic construct
  source 1..20: mol_type = other RNA
cggggagcctgggccagcct

SEQ ID NO: 23271 - RNA, 20 nt, synthetic construct
  source 1..20: mol_type = other RNA
ctggcccaggctccccgctc

SEQ ID NO: 23272 - RNA, 20 nt, synthetic construct
  source 1..20: mol_type = other RNA
tggcccaggctccccgctca

SEQ ID NO: 23273 - RNA, 20 nt, synthetic construct
  source 1..20: mol_type = other RNA
tgaccctgagcggggagcct

SEQ ID NO: 23274 - RNA, 20 nt, synthetic construct
  source 1..20: mol_type = other RNA
gtgaccctgagcggggagcc

SEQ ID NO: 23275 - RNA, 20 nt, synthetic construct
  source 1..20: mol_type = other RNA
gctcagggtcacccacatca

SEQ ID NO: 23276 - RNA, 20 nt, synthetic construct
  source 1..20: mol_type = other RNA
gatgtgggtgaccctgagcg

SEQ ID NO: 23277 - RNA, 20 nt, synthetic construct
  source 1..20: mol_type = other RNA
tgatgtgggtgaccctgagc

SEQ ID NO: 23278 - RNA, 20 nt, synthetic construct
  source 1..20: mol_type = other RNA
ttgatgtgggtgaccctgag

SEQ ID NO: 23279 - RNA, 20 nt, synthetic construct
  source 1..20: mol_type = other RNA
ccacatcaaggtcatgtgcg

SEQ ID NO: 23280 - RNA, 20 nt, synthetic construct
  source 1..20: mol_type = other RNA
ctcgcacatgaccttgatgt

SEQ ID NO: 23281 - RNA, 20 nt, synthetic construct
  source 1..20: mol_type = other RNA
tcaaggtcatgtgcgaggta

SEQ ID NO: 23282 - RNA, 20 nt, synthetic construct
  source 1..20: mol_type = other RNA
atgtgcgaggtaaggcagcc

SEQ ID NO: 23283 - RNA, 20 nt, synthetic construct
  source 1..20: mol_type = other RNA
tgcgaggtaaggcagccagg

SEQ ID NO: 23284 - RNA, 20 nt, synthetic construct
  source 1..20: mol_type = other RNA
gaggtaaggcagccaggcgg

SEQ ID NO: 23285 - RNA, 20 nt, synthetic construct
  source 1..20: mol_type = other RNA
aggtaaggcagccaggcggc

SEQ ID NO: 23286 - RNA, 20 nt, synthetic construct
  source 1..20: mol_type = other RNA
ggtaaggcagccaggcggcg

SEQ ID NO: 23287 - RNA, 20 nt, synthetic construct
  source 1..20: mol_type = other RNA
gtaaggcagccaggcggcgg

SEQ ID NO: 23288 - RNA, 20 nt, synthetic construct
  source 1..20: mol_type = other RNA
ggcctaatttggctcccccc

SEQ ID NO: 23289 - RNA, 20 nt, synthetic construct
  source 1..20: mol_type = other RNA
gcctaatttggctcccccca

SEQ ID NO: 23290 - RNA, 20 nt, synthetic construct
  source 1..20: mol_type = other RNA
taatttggctccccccaggg

SEQ ID NO: 23291 - RNA, 20 nt, synthetic construct
  source 1..20: mol_type = other RNA
accctggggggagccaaatt

SEQ ID NO: 23292 - RNA, 20 nt, synthetic construct
  source 1..20: mol_type = other RNA
ccagggtggacgctacacag

SEQ ID NO: 23293 - RNA, 20 nt, synthetic construct
  source 1..20: mol_type = other RNA
cagggtggacgctacacagt

SEQ ID NO: 23294 - RNA, 20 nt, synthetic construct
  source 1..20: mol_type = other RNA
ctgtgtagcgtccaccctgg

SEQ ID NO: 23295 - RNA, 20 nt, synthetic construct
  source 1..20: mol_type = other RNA
actgtgtagcgtccaccctg

SEQ ID NO: 23296 - RNA, 20 nt, synthetic construct
  source 1..20: mol_type = other RNA
ggtggacgctacacagtggg

SEQ ID NO: 23297 - RNA, 20 nt, synthetic construct
  source 1..20: mol_type = other RNA
ccactgtgtagcgtccaccc

SEQ ID NO: 23298 - RNA, 20 nt, synthetic construct
  source 1..20: mol_type = other RNA
acgctacacagtgggtggtt

SEQ ID NO: 23299 - RNA, 20 nt, synthetic construct
  source 1..20: mol_type = other RNA
ggagaccttcgacagcctca

SEQ ID NO: 23300 - RNA, 20 nt, synthetic construct
  source 1..20: mol_type = other RNA
cttcgacagcctcacggacc

SEQ ID NO: 23301 - RNA, 20 nt, synthetic construct
  source 1..20: mol_type = other RNA
cgacagcctcacggacctgg

SEQ ID NO: 23302 - RNA, 20 nt, synthetic construct
  source 1..20: mol_type = other RNA
caggtccgtgaggctgtcga

SEQ ID NO: 23303 - RNA, 20 nt, synthetic construct
  source 1..20: mol_type = other RNA
aatgctccaccaggtccgtg

SEQ ID NO: 23304 - RNA, 20 nt, synthetic construct
  source 1..20: mol_type = other RNA
ggtggagcatttcaagaaga

SEQ ID NO: 23305 - RNA, 20 nt, synthetic construct
  source 1..20: mol_type = other RNA
gtggagcatttcaagaagac

SEQ ID NO: 23306 - RNA, 20 nt, synthetic construct
  source 1..20: mol_type = other RNA
tggagcatttcaagaagacg

SEQ ID NO: 23307 - RNA, 20 nt, synthetic construct
  source 1..20: mol_type = other RNA
tttcaagaagacggggattg

SEQ ID NO: 23308 - RNA, 20 nt, synthetic construct
  source 1..20: mol_type = other RNA
caagaagacggggattgagg

SEQ ID NO: 23309 - RNA, 20 nt, synthetic construct
  source 1..20: mol_type = other RNA
acggggattgaggaggcctc

SEQ ID NO: 23310 - RNA, 20 nt, synthetic construct
  source 1..20: mol_type = other RNA
caggcgcctttgtctacctg

SEQ ID NO: 23311 - RNA, 20 nt, synthetic construct
  source 1..20: mol_type = other RNA
caggtagacaaaggcgcctg

SEQ ID NO: 23312 - RNA, 20 nt, synthetic construct
  source 1..20: mol_type = other RNA
cgcctttgtctacctgcggc

SEQ ID NO: 23313 - RNA, 20 nt, synthetic construct
  source 1..20: mol_type = other RNA
ttgtctacctgcggcaggtc

SEQ ID NO: 23314 - RNA, 20 nt, synthetic construct
  source 1..20: mol_type = other RNA
tgtctacctgcggcaggtca

SEQ ID NO: 23315 - RNA, 20 nt, synthetic construct
  source 1..20: mol_type = other RNA
gtctacctgcggcaggtcag

SEQ ID NO: 23316 - RNA, 20 nt, synthetic construct
  source 1..20: mol_type = other RNA
tacctgcggcaggtcagggg

SEQ ID NO: 23317 - RNA, 20 nt, synthetic construct
  source 1..20: mol_type = other RNA
acctgcggcaggtcaggggt

SEQ ID NO: 23318 - RNA, 20 nt, synthetic construct
  source 1..20: mol_type = other RNA
gcccacccctgacctgccgc

SEQ ID NO: 23319 - RNA, 20 nt, synthetic construct
  source 1..20: mol_type = other RNA
ggcatagtacggctggggtg

SEQ ID NO: 23320 - RNA, 20 nt, synthetic construct
  source 1..20: mol_type = other RNA
cccagccgtactatgccacg

SEQ ID NO: 23321 - RNA, 20 nt, synthetic construct
  source 1..20: mol_type = other RNA
ccagccgtactatgccacga

SEQ ID NO: 23322 - RNA, 20 nt, synthetic construct
  source 1..20: mol_type = other RNA
ctcgtggcatagtacggctg

SEQ ID NO: 23323 - RNA, 20 nt, synthetic construct
  source 1..20: mol_type = other RNA
cctcgtggcatagtacggct

SEQ ID NO: 23324 - RNA, 20 nt, synthetic construct
  source 1..20: mol_type = other RNA
ccctcgtggcatagtacggc

SEQ ID NO: 23325 - RNA, 20 nt, synthetic construct
  source 1..20: mol_type = other RNA
ctatgccacgagggtgaatg

SEQ ID NO: 23326 - RNA, 20 nt, synthetic construct
  source 1..20: mol_type = other RNA
gtcagccgcattcaccctcg

SEQ ID NO: 23327 - RNA, 20 nt, synthetic construct
  source 1..20: mol_type = other RNA
tgacattgagaaccgagtgt

SEQ ID NO: 23328 - RNA, 20 nt, synthetic construct
  source 1..20: mol_type = other RNA
tcttgttcagttccaacact

SEQ ID NO: 23329 - RNA, 20 nt, synthetic construct
  source 1..20: mol_type = other RNA
gttggaactgaacaagaagc

SEQ ID NO: 23330 - RNA, 20 nt, synthetic construct
  source 1..20: mol_type = other RNA
gaacaagaagcaggagtccg

SEQ ID NO: 23331 - RNA, 20 nt, synthetic construct
  source 1..20: mol_type = other RNA
ggagtccgaggatacagcca

SEQ ID NO: 23332 - RNA, 20 nt, synthetic construct
  source 1..20: mol_type = other RNA
tccgaggatacagccaaggc

SEQ ID NO: 23333 - RNA, 20 nt, synthetic construct
  source 1..20: mol_type = other RNA
gccagccttggctgtatcct

SEQ ID NO: 23334 - RNA, 20 nt, synthetic construct
  source 1..20: mol_type = other RNA
atacagccaaggctggcttc

SEQ ID NO: 23335 - RNA, 20 nt, synthetic construct
  source 1..20: mol_type = other RNA
tacagccaaggctggcttct

SEQ ID NO: 23336 - RNA, 20 nt, synthetic construct
  source 1..20: mol_type = other RNA
agccaaggctggcttctggg

SEQ ID NO: 23337 - RNA, 20 nt, synthetic construct
  source 1..20: mol_type = other RNA
ctcctcccagaagccagcct

SEQ ID NO: 23338 - RNA, 20 nt, synthetic construct
  source 1..20: mol_type = other RNA
tggcttctgggaggagtttg

SEQ ID NO: 23339 - RNA, 20 nt, synthetic construct
  source 1..20: mol_type = other RNA
tgggaggagtttgaggtgca

SEQ ID NO: 23340 - RNA, 20 nt, synthetic construct
  source 1..20: mol_type = other RNA
gaggagtttgaggtgcatgg

SEQ ID NO: 23341 - RNA, 20 nt, synthetic construct
  source 1..20: mol_type = other RNA
aggagtttgaggtgcatggt

SEQ ID NO: 23342 - RNA, 20 nt, synthetic construct
  source 1..20: mol_type = other RNA
ggagtttgaggtgcatggtg

SEQ ID NO: 23343 - RNA, 20 nt, synthetic construct
  source 1..20: mol_type = other RNA
ttgaggtgcatggtggggac

SEQ ID NO: 23344 - RNA, 20 nt, synthetic construct
  source 1..20: mol_type = other RNA
ggtgcatggtggggaccggc

SEQ ID NO: 23345 - RNA, 20 nt, synthetic construct
  source 1..20: mol_type = other RNA
gtgcatggtggggaccggca

SEQ ID NO: 23346 - RNA, 20 nt, synthetic construct
  source 1..20: mol_type = other RNA
atggtggggaccggcagggc

SEQ ID NO: 23347 - RNA, 20 nt, synthetic construct
  source 1..20: mol_type = other RNA
caaactctgagatgtgggtg

SEQ ID NO: 23348 - RNA, 20 nt, synthetic construct
  source 1..20: mol_type = other RNA
gcaaactctgagatgtgggt

SEQ ID NO: 23349 - RNA, 20 nt, synthetic construct
  source 1..20: mol_type = other RNA
tgcaaactctgagatgtggg

SEQ ID NO: 23350 - RNA, 20 nt, synthetic construct
  source 1..20: mol_type = other RNA
atctcagagtttgcagaagc

SEQ ID NO: 23351 - RNA, 20 nt, synthetic construct
  source 1..20: mol_type = other RNA
cttctgcaaactctgagatg

SEQ ID NO: 23352 - RNA, 20 nt, synthetic construct
  source 1..20: mol_type = other RNA
tcagagtttgcagaagcagg

SEQ ID NO: 23353 - RNA, 20 nt, synthetic construct
  source 1..20: mol_type = other RNA
gaagaacttgcaccagcgtc

SEQ ID NO: 23354 - RNA, 20 nt, synthetic construct
  source 1..20: mol_type = other RNA
aacttgcaccagcgtctgga

SEQ ID NO: 23355 - RNA, 20 nt, synthetic construct
  source 1..20: mol_type = other RNA
acttgcaccagcgtctggaa

SEQ ID NO: 23356 - RNA, 20 nt, synthetic construct
  source 1..20: mol_type = other RNA
accagcgtctggaagggcag

SEQ ID NO: 23357 - RNA, 20 nt, synthetic construct
  source 1..20: mol_type = other RNA
gccgctgcccttccagacgc

SEQ ID NO: 23358 - RNA, 20 nt, synthetic construct
  source 1..20: mol_type = other RNA
agggcagcggccagagaaca

SEQ ID NO: 23359 - RNA, 20 nt, synthetic construct
  source 1..20: mol_type = other RNA
gggcagcggccagagaacaa

SEQ ID NO: 23360 - RNA, 20 nt, synthetic construct
  source 1..20: mol_type = other RNA
cggttcttgcccttgttctc

SEQ ID NO: 23361 - RNA, 20 nt, synthetic construct
  source 1..20: mol_type = other RNA
aggggagaatgttcttgtag

SEQ ID NO: 23362 - RNA, 20 nt, synthetic construct
  source 1..20: mol_type = other RNA
attctcccctgtgagcaccc

SEQ ID NO: 23363 - RNA, 20 nt, synthetic construct
  source 1..20: mol_type = other RNA
ggcagcctgggtgctcacag

SEQ ID NO: 23364 - RNA, 20 nt, synthetic construct
  source 1..20: mol_type = other RNA
gggcagcctgggtgctcaca

SEQ ID NO: 23365 - RNA, 20 nt, synthetic construct
  source 1..20: mol_type = other RNA
ggggcagcctgggtgctcac

SEQ ID NO: 23366 - RNA, 20 nt, synthetic construct
  source 1..20: mol_type = other RNA
actgggagtgggcggagagg

SEQ ID NO: 23367 - RNA, 20 nt, synthetic construct
  source 1..20: mol_type = other RNA
tcaactgggagtgggcggag

SEQ ID NO: 23368 - RNA, 20 nt, synthetic construct
  source 1..20: mol_type = other RNA
tgtggtcaactgggagtggg

SEQ ID NO: 23369 - RNA, 20 nt, synthetic construct
  source 1..20: mol_type = other RNA
ggctgtggtcaactgggagt

SEQ ID NO: 23370 - RNA, 20 nt, synthetic construct
  source 1..20: mol_type = other RNA
cggctgtggtcaactgggag

SEQ ID NO: 23371 - RNA, 20 nt, synthetic construct
  source 1..20: mol_type = other RNA
tcactcggctgtggtcaact

SEQ ID NO: 23372 - RNA, 20 nt, synthetic construct
  source 1..20: mol_type = other RNA
atcactcggctgtggtcaac

SEQ ID NO: 23373 - RNA, 20 nt, synthetic construct
  source 1..20: mol_type = other RNA
ccacagccgagtgatcctgc

SEQ ID NO: 23374 - RNA, 20 nt, synthetic construct
  source 1..20: mol_type = other RNA
cacagccgagtgatcctgca

SEQ ID NO: 23375 - RNA, 20 nt, synthetic construct
  source 1..20: mol_type = other RNA
gccgagtgatcctgcaggga

SEQ ID NO: 23376 - RNA, 20 nt, synthetic construct
  source 1..20: mol_type = other RNA
ccgagtgatcctgcagggac

SEQ ID NO: 23377 - RNA, 20 nt, synthetic construct
  source 1..20: mol_type = other RNA
cccgtccctgcaggatcact

SEQ ID NO: 23378 - RNA, 20 nt, synthetic construct
  source 1..20: mol_type = other RNA
tgttactgtcccgtccctgc

SEQ ID NO: 23379 - RNA, 20 nt, synthetic construct
  source 1..20: mol_type = other RNA
ggacgggacagtaacatccc

SEQ ID NO: 23380 - RNA, 20 nt, synthetic construct
  source 1..20: mol_type = other RNA
gacgggacagtaacatcccc

SEQ ID NO: 23381 - RNA, 20 nt, synthetic construct
  source 1..20: mol_type = other RNA
cattgatgtagtcggacccg

SEQ ID NO: 23382 - RNA, 20 nt, synthetic construct
  source 1..20: mol_type = other RNA
gcattgatgtagtcggaccc

SEQ ID NO: 23383 - RNA, 20 nt, synthetic construct
  source 1..20: mol_type = other RNA
ggcattgatgtagtcggacc

SEQ ID NO: 23384 - RNA, 20 nt, synthetic construct
  source 1..20: mol_type = other RNA
gtagttggcattgatgtagt

SEQ ID NO: 23385 - RNA, 20 nt, synthetic construct
  source 1..20: mol_type = other RNA
catcaatgccaactacatca

SEQ ID NO: 23386 - RNA, 20 nt, synthetic construct
  source 1..20: mol_type = other RNA
ctacatcaaggtcagcagtg

SEQ ID NO: 23387 - RNA, 20 nt, synthetic construct
  source 1..20: mol_type = other RNA
tacatcaaggtcagcagtgt

SEQ ID NO: 23388 - RNA, 20 nt, synthetic construct
  source 1..20: mol_type = other RNA
ggtcagcagtgtgggccacg

SEQ ID NO: 23389 - RNA, 20 nt, synthetic construct
  source 1..20: mol_type = other RNA
gtcagcagtgtgggccacgt

SEQ ID NO: 23390 - RNA, 20 nt, synthetic construct
  source 1..20: mol_type = other RNA
agcagtgtgggccacgtggg

SEQ ID NO: 23391 - RNA, 20 nt, synthetic construct
  source 1..20: mol_type = other RNA
gctggttctggacgcaagcg

SEQ ID NO: 23392 - RNA, 20 nt, synthetic construct
  source 1..20: mol_type = other RNA
tgcgtccagaaccagctgct

SEQ ID NO: 23393 - RNA, 20 nt, synthetic construct
  source 1..20: mol_type = other RNA
cagggcctagcagctggttc

SEQ ID NO: 23394 - RNA, 20 nt, synthetic construct
  source 1..20: mol_type = other RNA
tctcatcagggcctagcagc

SEQ ID NO: 23395 - RNA, 20 nt, synthetic construct
  source 1..20: mol_type = other RNA
aggtcttagcgttctcatca

SEQ ID NO: 23396 - RNA, 20 nt, synthetic construct
  source 1..20: mol_type = other RNA
taggtcttagcgttctcatc

SEQ ID NO: 23397 - RNA, 20 nt, synthetic construct
  source 1..20: mol_type = other RNA
taagacctacatcgccagcc

SEQ ID NO: 23398 - RNA, 20 nt, synthetic construct
  source 1..20: mol_type = other RNA
aagacctacatcgccagcca

SEQ ID NO: 23399 - RNA, 20 nt, synthetic construct
  source 1..20: mol_type = other RNA
catcgccagccagggttgtc

SEQ ID NO: 23400 - RNA, 20 nt, synthetic construct
  source 1..20: mol_type = other RNA
acaaccctggctggcgatgt

SEQ ID NO: 23401 - RNA, 20 nt, synthetic construct
  source 1..20: mol_type = other RNA
cgccagccagggttgtctgg

SEQ ID NO: 23402 - RNA, 20 nt, synthetic construct
  source 1..20: mol_type = other RNA
ccagggttgtctggaggcca

SEQ ID NO: 23403 - RNA, 20 nt, synthetic construct
  source 1..20: mol_type = other RNA
ggcctccagacaaccctggc

SEQ ID NO: 23404 - RNA, 20 nt, synthetic construct
  source 1..20: mol_type = other RNA
ccgtggcctccagacaaccc

SEQ ID NO: 23405 - RNA, 20 nt, synthetic construct
  source 1..20: mol_type = other RNA
aggccacggtcaatgacttc

SEQ ID NO: 23406 - RNA, 20 nt, synthetic construct
  source 1..20: mol_type = other RNA
ggtcaatgacttctggcaga

SEQ ID NO: 23407 - RNA, 20 nt, synthetic construct
  source 1..20: mol_type = other RNA
ctgccagaagtcattgaccg

SEQ ID NO: 23408 - RNA, 20 nt, synthetic construct
  source 1..20: mol_type = other RNA
atgacttctggcagatggcg

SEQ ID NO: 23409 - RNA, 20 nt, synthetic construct
  source 1..20: mol_type = other RNA
cttctggcagatggcgtggc

SEQ ID NO: 23410 - RNA, 20 nt, synthetic construct
  source 1..20: mol_type = other RNA
gggtggtcatgacgatgaca

SEQ ID NO: 23411 - RNA, 20 nt, synthetic construct
  source 1..20: mol_type = other RNA
catcgtcatgaccacccgag

SEQ ID NO: 23412 - RNA, 20 nt, synthetic construct
  source 1..20: mol_type = other RNA
cgtcatgaccacccgagagg

SEQ ID NO: 23413 - RNA, 20 nt, synthetic construct
  source 1..20: mol_type = other RNA
accacccgagaggtggagaa

SEQ ID NO: 23414 - RNA, 20 nt, synthetic construct
  source 1..20: mol_type = other RNA
cccgagaggtggagaaaggc

SEQ ID NO: 23415 - RNA, 20 nt, synthetic construct
  source 1..20: mol_type = other RNA
ccgagaggtggagaaaggcc

SEQ ID NO: 23416 - RNA, 20 nt, synthetic construct
  source 1..20: mol_type = other RNA
gcctttctccacctctcggg

SEQ ID NO: 23417 - RNA, 20 nt, synthetic construct
  source 1..20: mol_type = other RNA
gaggtggagaaaggccgggt

SEQ ID NO: 23418 - RNA, 20 nt, synthetic construct
  source 1..20: mol_type = other RNA
aggtggagaaaggccgggta

SEQ ID NO: 23419 - RNA, 20 nt, synthetic construct
  source 1..20: mol_type = other RNA
ggaagggggggcgccctacc

SEQ ID NO: 23420 - RNA, 20 nt, synthetic construct
  source 1..20: mol_type = other RNA
tggaaagggagggtcgggtg

SEQ ID NO: 23421 - RNA, 20 nt, synthetic construct
  source 1..20: mol_type = other RNA
ctggaaagggagggtcgggt

SEQ ID NO: 23422 - RNA, 20 nt, synthetic construct
  source 1..20: mol_type = other RNA
tctggaaagggagggtcggg

SEQ ID NO: 23423 - RNA, 20 nt, synthetic construct
  source 1..20: mol_type = other RNA
tgttctggaaagggagggtc

SEQ ID NO: 23424 - RNA, 20 nt, synthetic construct
  source 1..20: mol_type = other RNA
ttgttctggaaagggagggt

SEQ ID NO: 23425 - RNA, 20 nt, synthetic construct
  source 1..20: mol_type = other RNA
gcatttgttctggaaaggga

SEQ ID NO: 23426 - RNA, 20 nt, synthetic construct
  source 1..20: mol_type = other RNA
cgcatttgttctggaaaggg

SEQ ID NO: 23427 - RNA, 20 nt, synthetic construct
  source 1..20: mol_type = other RNA
ggacgcatttgttctggaaa

SEQ ID NO: 23428 - RNA, 20 nt, synthetic construct
  source 1..20: mol_type = other RNA
gggacgcatttgttctggaa

SEQ ID NO: 23429 - RNA, 20 nt, synthetic construct
  source 1..20: mol_type = other RNA
agaacaaatgcgtcccatac

SEQ ID NO: 23430 - RNA, 20 nt, synthetic construct
  source 1..20: mol_type = other RNA
agtatgggacgcatttgttc

SEQ ID NO: 23431 - RNA, 20 nt, synthetic construct
  source 1..20: mol_type = other RNA
atgcgtcccatactggcccg

SEQ ID NO: 23432 - RNA, 20 nt, synthetic construct
  source 1..20: mol_type = other RNA
cgtcccatactggcccgagg

SEQ ID NO: 23433 - RNA, 20 nt, synthetic construct
  source 1..20: mol_type = other RNA
gtcccatactggcccgaggt

SEQ ID NO: 23434 - RNA, 20 nt, synthetic construct
  source 1..20: mol_type = other RNA
tgcccacctcgggccagtat

SEQ ID NO: 23435 - RNA, 20 nt, synthetic construct
  source 1..20: mol_type = other RNA
atgcccacctcgggccagta

SEQ ID NO: 23436 - RNA, 20 nt, synthetic construct
  source 1..20: mol_type = other RNA
gcacgctgcatgcccacctc

SEQ ID NO: 23437 - RNA, 20 nt, synthetic construct
  source 1..20: mol_type = other RNA
gtgggcatgcagcgtgctta

SEQ ID NO: 23438 - RNA, 20 nt, synthetic construct
  source 1..20: mol_type = other RNA
tgggcatgcagcgtgcttat

SEQ ID NO: 23439 - RNA, 20 nt, synthetic construct
  source 1..20: mol_type = other RNA
ccctactctgtgaccaactg

SEQ ID NO: 23440 - RNA, 20 nt, synthetic construct
  source 1..20: mol_type = other RNA
cctactctgtgaccaactgc

SEQ ID NO: 23441 - RNA, 20 nt, synthetic construct
  source 1..20: mol_type = other RNA
ctactctgtgaccaactgcg

SEQ ID NO: 23442 - RNA, 20 nt, synthetic construct
  source 1..20: mol_type = other RNA
ccgcagttggtcacagagta

SEQ ID NO: 23443 - RNA, 20 nt, synthetic construct
  source 1..20: mol_type = other RNA
cccgcagttggtcacagagt

SEQ ID NO: 23444 - RNA, 20 nt, synthetic construct
  source 1..20: mol_type = other RNA
tgtgtcatgctccccgcagt

SEQ ID NO: 23445 - RNA, 20 nt, synthetic construct
  source 1..20: mol_type = other RNA
atacaaactccgtaccttac

SEQ ID NO: 23446 - RNA, 20 nt, synthetic construct
  source 1..20: mol_type = other RNA
taaggtacggagtttgtatt

SEQ ID NO: 23447 - RNA, 20 nt, synthetic construct
  source 1..20: mol_type = other RNA
taccttacaggtctccccgc

SEQ ID NO: 23448 - RNA, 20 nt, synthetic construct
  source 1..20: mol_type = other RNA
gcggggagacctgtaaggta

SEQ ID NO: 23449 - RNA, 20 nt, synthetic construct
  source 1..20: mol_type = other RNA
gtccagcggggagacctgta

SEQ ID NO: 23450 - RNA, 20 nt, synthetic construct
  source 1..20: mol_type = other RNA
tccccgctggacaatgtgag

SEQ ID NO: 23451 - RNA, 20 nt, synthetic construct
  source 1..20: mol_type = other RNA
gccactcacattgtccagcg

SEQ ID NO: 23452 - RNA, 20 nt, synthetic construct
  source 1..20: mol_type = other RNA
ggccactcacattgtccagc

SEQ ID NO: 23453 - RNA, 20 nt, synthetic construct
  source 1..20: mol_type = other RNA
gggccactcacattgtccag

SEQ ID NO: 23454 - RNA, 20 nt, synthetic construct
  source 1..20: mol_type = other RNA
tgaccctatgtcctcggctt

SEQ ID NO: 23455 - RNA, 20 nt, synthetic construct
  source 1..20: mol_type = other RNA
gaccctatgtcctcggctta

SEQ ID NO: 23456 - RNA, 20 nt, synthetic construct
  source 1..20: mol_type = other RNA
ctccctaagccgaggacata

SEQ ID NO: 23457 - RNA, 20 nt, synthetic construct
  source 1..20: mol_type = other RNA
tctccctaagccgaggacat

SEQ ID NO: 23458 - RNA, 20 nt, synthetic construct
  source 1..20: mol_type = other RNA
cggcttagggagacctgatt

SEQ ID NO: 23459 - RNA, 20 nt, synthetic construct
  source 1..20: mol_type = other RNA
ggcttagggagacctgattc

SEQ ID NO: 23460 - RNA, 20 nt, synthetic construct
  source 1..20: mol_type = other RNA
aatcaggtctccctaagccg

SEQ ID NO: 23461 - RNA, 20 nt, synthetic construct
  source 1..20: mol_type = other RNA
gagacctgattcgggagatc

SEQ ID NO: 23462 - RNA, 20 nt, synthetic construct
  source 1..20: mol_type = other RNA
aatgccagatctcccgaatc

SEQ ID NO: 23463 - RNA, 20 nt, synthetic construct
  source 1..20: mol_type = other RNA
ggcattaccagtacctgagc

SEQ ID NO: 23464 - RNA, 20 nt, synthetic construct
  source 1..20: mol_type = other RNA
tacctgagctggcccgacca

SEQ ID NO: 23465 - RNA, 20 nt, synthetic construct
  source 1..20: mol_type = other RNA
acctgagctggcccgaccat

SEQ ID NO: 23466 - RNA, 20 nt, synthetic construct
  source 1..20: mol_type = other RNA
cctgagctggcccgaccatg

SEQ ID NO: 23467 - RNA, 20 nt, synthetic construct
  source 1..20: mol_type = other RNA
ccccatggtcgggccagctc

SEQ ID NO: 23468 - RNA, 20 nt, synthetic construct
  source 1..20: mol_type = other RNA
tcactggggaccccatggtc

SEQ ID NO: 23469 - RNA, 20 nt, synthetic construct
  source 1..20: mol_type = other RNA
catggggtccccagtgagcc

SEQ ID NO: 23470 - RNA, 20 nt, synthetic construct
  source 1..20: mol_type = other RNA
atggggtccccagtgagcct

SEQ ID NO: 23471 - RNA, 20 nt, synthetic construct
  source 1..20: mol_type = other RNA
tggggtccccagtgagcctg

SEQ ID NO: 23472 - RNA, 20 nt, synthetic construct
  source 1..20: mol_type = other RNA
ggggtccccagtgagcctgg

SEQ ID NO: 23473 - RNA, 20 nt, synthetic construct
  source 1..20: mol_type = other RNA
caggctcactggggacccca

SEQ ID NO: 23474 - RNA, 20 nt, synthetic construct
  source 1..20: mol_type = other RNA
ggacacccccaggctcactg

SEQ ID NO: 23475 - RNA, 20 nt, synthetic construct
  source 1..20: mol_type = other RNA
aggacacccccaggctcact

SEQ ID NO: 23476 - RNA, 20 nt, synthetic construct
  source 1..20: mol_type = other RNA
gaggacacccccaggctcac

SEQ ID NO: 23477 - RNA, 20 nt, synthetic construct
  source 1..20: mol_type = other RNA
tgggggtgtcctcagcttcc

SEQ ID NO: 23478 - RNA, 20 nt, synthetic construct
  source 1..20: mol_type = other RNA
aggaagctgaggacaccccc

SEQ ID NO: 23479 - RNA, 20 nt, synthetic construct
  source 1..20: mol_type = other RNA
tgatctggtccaggaagctg

SEQ ID NO: 23480 - RNA, 20 nt, synthetic construct
  source 1..20: mol_type = other RNA
tcctggaccagatcaaccag

SEQ ID NO: 23481 - RNA, 20 nt, synthetic construct
  source 1..20: mol_type = other RNA
ggaccagatcaaccagcggc

SEQ ID NO: 23482 - RNA, 20 nt, synthetic construct
  source 1..20: mol_type = other RNA
gccgctggttgatctggtcc

SEQ ID NO: 23483 - RNA, 20 nt, synthetic construct
  source 1..20: mol_type = other RNA
tttcctgccgctggttgatc

SEQ ID NO: 23484 - RNA, 20 nt, synthetic construct
  source 1..20: mol_type = other RNA
gaggcagactttcctgccgc

SEQ ID NO: 23485 - RNA, 20 nt, synthetic construct
  source 1..20: mol_type = other RNA
caggaaagtctgcctcacgc

SEQ ID NO: 23486 - RNA, 20 nt, synthetic construct
  source 1..20: mol_type = other RNA
aggaaagtctgcctcacgca

SEQ ID NO: 23487 - RNA, 20 nt, synthetic construct
  source 1..20: mol_type = other RNA
acgatgatgggccctgcgtg

SEQ ID NO: 23488 - RNA, 20 nt, synthetic construct
  source 1..20: mol_type = other RNA
ggcccatcatcgtgcactgc

SEQ ID NO: 23489 - RNA, 20 nt, synthetic construct
  source 1..20: mol_type = other RNA
atcatcgtgcactgcaggtg

SEQ ID NO: 23490 - RNA, 20 nt, synthetic construct
  source 1..20: mol_type = other RNA
cacctgcagtgcacgatgat

SEQ ID NO: 23491 - RNA, 20 nt, synthetic construct
  source 1..20: mol_type = other RNA
tcacctgcagtgcacgatga

SEQ ID NO: 23492 - RNA, 20 nt, synthetic construct
  source 1..20: mol_type = other RNA
ggtgaggatgataatcctga

SEQ ID NO: 23493 - RNA, 20 nt, synthetic construct
  source 1..20: mol_type = other RNA
cccccgtctttccccagcgc

SEQ ID NO: 23494 - RNA, 20 nt, synthetic construct
  source 1..20: mol_type = other RNA
ccggcgctggggaaagacgg

SEQ ID NO: 23495 - RNA, 20 nt, synthetic construct
  source 1..20: mol_type = other RNA
tctttccccagcgccggcat

SEQ ID NO: 23496 - RNA, 20 nt, synthetic construct
  source 1..20: mol_type = other RNA
tgccggcgctggggaaagac

SEQ ID NO: 23497 - RNA, 20 nt, synthetic construct
  source 1..20: mol_type = other RNA
atgccggcgctggggaaaga

SEQ ID NO: 23498 - RNA, 20 nt, synthetic construct
  source 1..20: mol_type = other RNA
agcgccggcatcggccgcac

SEQ ID NO: 23499 - RNA, 20 nt, synthetic construct
  source 1..20: mol_type = other RNA
tgcggccgatgccggcgctg

SEQ ID NO: 23500 - RNA, 20 nt, synthetic construct
  source 1..20: mol_type = other RNA
gtgcggccgatgccggcgct

SEQ ID NO: 23501 - RNA, 20 nt, synthetic construct
  source 1..20: mol_type = other RNA
tgtgcggccgatgccggcgc

SEQ ID NO: 23502 - RNA, 20 nt, synthetic construct
  source 1..20: mol_type = other RNA
ggtgcctgtgcggccgatgc

SEQ ID NO: 23503 - RNA, 20 nt, synthetic construct
  source 1..20: mol_type = other RNA
tgacaatgatggtgcctgtg

SEQ ID NO: 23504 - RNA, 20 nt, synthetic construct
  source 1..20: mol_type = other RNA
cattgtcatcgacatgctca

SEQ ID NO: 23505 - RNA, 20 nt, synthetic construct
  source 1..20: mol_type = other RNA
gagcatgtcgatgacaatga

SEQ ID NO: 23506 - RNA, 20 nt, synthetic construct
  source 1..20: mol_type = other RNA
catggagaacatctccacca

SEQ ID NO: 23507 - RNA, 20 nt, synthetic construct
  source 1..20: mol_type = other RNA
atggagaacatctccaccaa

SEQ ID NO: 23508 - RNA, 20 nt, synthetic construct
  source 1..20: mol_type = other RNA
gaacatctccaccaagggtg

SEQ ID NO: 23509 - RNA, 20 nt, synthetic construct
  source 1..20: mol_type = other RNA
aacatctccaccaagggtga

SEQ ID NO: 23510 - RNA, 20 nt, synthetic construct
  source 1..20: mol_type = other RNA
acatctccaccaagggtgag

SEQ ID NO: 23511 - RNA, 20 nt, synthetic construct
  source 1..20: mol_type = other RNA
caccaagggtgaggggcacc

SEQ ID NO: 23512 - RNA, 20 nt, synthetic construct
  source 1..20: mol_type = other RNA
accaagggtgaggggcacct

SEQ ID NO: 23513 - RNA, 20 nt, synthetic construct
  source 1..20: mol_type = other RNA
ccaagggtgaggggcacctg

SEQ ID NO: 23514 - RNA, 20 nt, synthetic construct
  source 1..20: mol_type = other RNA
caagggtgaggggcacctgg

SEQ ID NO: 23515 - RNA, 20 nt, synthetic construct
  source 1..20: mol_type = other RNA
caggtgcccctcacccttgg

SEQ ID NO: 23516 - RNA, 20 nt, synthetic construct
  source 1..20: mol_type = other RNA
ccccaggtgcccctcaccct

SEQ ID NO: 23517 - RNA, 20 nt, synthetic construct
  source 1..20: mol_type = other RNA
gtgaggggcacctgggggtt

SEQ ID NO: 23518 - RNA, 20 nt, synthetic construct
  source 1..20: mol_type = other RNA
tgaggggcacctgggggttt

SEQ ID NO: 23519 - RNA, 20 nt, synthetic construct
  source 1..20: mol_type = other RNA
gaggggcacctgggggtttg

SEQ ID NO: 23520 - RNA, 20 nt, synthetic construct
  source 1..20: mol_type = other RNA
aggggcacctgggggtttgg

SEQ ID NO: 23521 - RNA, 20 nt, synthetic construct
  source 1..20: mol_type = other RNA
ggtttgactgccccccaccc

SEQ ID NO: 23522 - RNA, 20 nt, synthetic construct
  source 1..20: mol_type = other RNA
gactgccccccacccaggcc

SEQ ID NO: 23523 - RNA, 20 nt, synthetic construct
  source 1..20: mol_type = other RNA
acagtccaggcctgggtggg

SEQ ID NO: 23524 - RNA, 20 nt, synthetic construct
  source 1..20: mol_type = other RNA
cacagtccaggcctgggtgg

SEQ ID NO: 23525 - RNA, 20 nt, synthetic construct
  source 1..20: mol_type = other RNA
tcacagtccaggcctgggtg

SEQ ID NO: 23526 - RNA, 20 nt, synthetic construct
  source 1..20: mol_type = other RNA
gtcacagtccaggcctgggt

SEQ ID NO: 23527 - RNA, 20 nt, synthetic construct
  source 1..20: mol_type = other RNA
tgtcacagtccaggcctggg

SEQ ID NO: 23528 - RNA, 20 nt, synthetic construct
  source 1..20: mol_type = other RNA
caatgtcacagtccaggcct

SEQ ID NO: 23529 - RNA, 20 nt, synthetic construct
  source 1..20: mol_type = other RNA
tcaatgtcacagtccaggcc

SEQ ID NO: 23530 - RNA, 20 nt, synthetic construct
  source 1..20: mol_type = other RNA
ggatgtcaatgtcacagtcc

SEQ ID NO: 23531 - RNA, 20 nt, synthetic construct
  source 1..20: mol_type = other RNA
catccagaagaccatccaga

SEQ ID NO: 23532 - RNA, 20 nt, synthetic construct
  source 1..20: mol_type = other RNA
agaagaccatccagatggtg

SEQ ID NO: 23533 - RNA, 20 nt, synthetic construct
  source 1..20: mol_type = other RNA
gaagaccatccagatggtgc

SEQ ID NO: 23534 - RNA, 20 nt, synthetic construct
  source 1..20: mol_type = other RNA
gcaccatctggatggtcttc

SEQ ID NO: 23535 - RNA, 20 nt, synthetic construct
  source 1..20: mol_type = other RNA
ctgcgcccgcaccatctgga

SEQ ID NO: 23536 - RNA, 20 nt, synthetic construct
  source 1..20: mol_type = other RNA
gatggtgcgggcgcagcgct

SEQ ID NO: 23537 - RNA, 20 nt, synthetic construct
  source 1..20: mol_type = other RNA
atggtgcgggcgcagcgctc

SEQ ID NO: 23538 - RNA, 20 nt, synthetic construct
  source 1..20: mol_type = other RNA
agcgctgcgcccgcaccatc

SEQ ID NO: 23539 - RNA, 20 nt, synthetic construct
  source 1..20: mol_type = other RNA
gcgggcgcagcgctcgggca

SEQ ID NO: 23540 - RNA, 20 nt, synthetic construct
  source 1..20: mol_type = other RNA
gcgctcgggcatggtgcaga

SEQ ID NO: 23541 - RNA, 20 nt, synthetic construct
  source 1..20: mol_type = other RNA
ctcgggcatggtgcagacgg

SEQ ID NO: 23542 - RNA, 20 nt, synthetic construct
  source 1..20: mol_type = other RNA
gcagtacaagttcatctacg

SEQ ID NO: 23543 - RNA, 20 nt, synthetic construct
  source 1..20: mol_type = other RNA
ggtttcaatgaactgggcga

SEQ ID NO: 23544 - RNA, 20 nt, synthetic construct
  source 1..20: mol_type = other RNA
cttagtggtttcaatgaact

SEQ ID NO: 23545 - RNA, 20 nt, synthetic construct
  source 1..20: mol_type = other RNA
tcttagtggtttcaatgaac

SEQ ID NO: 23546 - RNA, 20 nt, synthetic construct
  source 1..20: mol_type = other RNA
tgaaaccactaagaagaagc

SEQ ID NO: 23547 - RNA, 20 nt, synthetic construct
  source 1..20: mol_type = other RNA
aaccactaagaagaagctgg

SEQ ID NO: 23548 - RNA, 20 nt, synthetic construct
  source 1..20: mol_type = other RNA
gacctccagcttcttcttag

SEQ ID NO: 23549 - RNA, 20 nt, synthetic construct
  source 1..20: mol_type = other RNA
gaagaagctggaggtcctgc

SEQ ID NO: 23550 - RNA, 20 nt, synthetic construct
  source 1..20: mol_type = other RNA
cctgcaggtgcgtgcagagc

SEQ ID NO: 23551 - RNA, 20 nt, synthetic construct
  source 1..20: mol_type = other RNA
ctgcaggtgcgtgcagagca

SEQ ID NO: 23552 - RNA, 20 nt, synthetic construct
  source 1..20: mol_type = other RNA
cctgctctgcacgcacctgc

SEQ ID NO: 23553 - RNA, 20 nt, synthetic construct
  source 1..20: mol_type = other RNA
ggtgcgtgcagagcagggcc

SEQ ID NO: 23554 - RNA, 20 nt, synthetic construct
  source 1..20: mol_type = other RNA
gtgcgtgcagagcagggcct

SEQ ID NO: 23555 - RNA, 20 nt, synthetic construct
  source 1..20: mol_type = other RNA
tgcgtgcagagcagggcctg

SEQ ID NO: 23556 - RNA, 20 nt, synthetic construct
  source 1..20: mol_type = other RNA
gcgtgcagagcagggcctgg

SEQ ID NO: 23557 - RNA, 20 nt, synthetic construct
  source 1..20: mol_type = other RNA
cgtgcagagcagggcctggg

SEQ ID NO: 23558 - RNA, 20 nt, synthetic construct
  source 1..20: mol_type = other RNA
gtgcagagcagggcctgggg

SEQ ID NO: 23559 - RNA, 20 nt, synthetic construct
  source 1..20: mol_type = other RNA
tgggcagagggacagtggga

SEQ ID NO: 23560 - RNA, 20 nt, synthetic construct
  source 1..20: mol_type = other RNA
actgtgggcagagggacagt

SEQ ID NO: 23561 - RNA, 20 nt, synthetic construct
  source 1..20: mol_type = other RNA
gactgtgggcagagggacag

SEQ ID NO: 23562 - RNA, 20 nt, synthetic construct
  source 1..20: mol_type = other RNA
cctctgcccacagtcgcaga

SEQ ID NO: 23563 - RNA, 20 nt, synthetic construct
  source 1..20: mol_type = other RNA
ctctgcccacagtcgcagaa

SEQ ID NO: 23564 - RNA, 20 nt, synthetic construct
  source 1..20: mol_type = other RNA
cttctgcgactgtgggcaga

SEQ ID NO: 23565 - RNA, 20 nt, synthetic construct
  source 1..20: mol_type = other RNA
ccttctgcgactgtgggcag

SEQ ID NO: 23566 - RNA, 20 nt, synthetic construct
  source 1..20: mol_type = other RNA
cccacagtcgcagaagggcc

SEQ ID NO: 23567 - RNA, 20 nt, synthetic construct
  source 1..20: mol_type = other RNA
cctggcccttctgcgactgt

SEQ ID NO: 23568 - RNA, 20 nt, synthetic construct
  source 1..20: mol_type = other RNA
gtcgcagaagggccaggagt

SEQ ID NO: 23569 - RNA, 20 nt, synthetic construct
  source 1..20: mol_type = other RNA
aagggccaggagtcggagta

SEQ ID NO: 23570 - RNA, 20 nt, synthetic construct
  source 1..20: mol_type = other RNA
agggccaggagtcggagtac

SEQ ID NO: 23571 - RNA, 20 nt, synthetic construct
  source 1..20: mol_type = other RNA
tgttcccgtactccgactcc

SEQ ID NO: 23572 - RNA, 20 nt, synthetic construct
  source 1..20: mol_type = other RNA
attcttcatggctgggggat

SEQ ID NO: 23573 - RNA, 20 nt, synthetic construct
  source 1..20: mol_type = other RNA
tgggcattcttcatggctgg

SEQ ID NO: 23574 - RNA, 20 nt, synthetic construct
  source 1..20: mol_type = other RNA
atgggcattcttcatggctg

SEQ ID NO: 23575 - RNA, 20 nt, synthetic construct
  source 1..20: mol_type = other RNA
catgggcattcttcatggct

SEQ ID NO: 23576 - RNA, 20 nt, synthetic construct
  source 1..20: mol_type = other RNA
catgaagaatgcccatgcca

SEQ ID NO: 23577 - RNA, 20 nt, synthetic construct
  source 1..20: mol_type = other RNA
cttggcatgggcattcttca

SEQ ID NO: 23578 - RNA, 20 nt, synthetic construct
  source 1..20: mol_type = other RNA
ggtgcgggaggccttggcat

SEQ ID NO: 23579 - RNA, 20 nt, synthetic construct
  source 1..20: mol_type = other RNA
aggtgcgggaggccttggca

SEQ ID NO: 23580 - RNA, 20 nt, synthetic construct
  source 1..20: mol_type = other RNA
ggacgaggtgcgggaggcct

SEQ ID NO: 23581 - RNA, 20 nt, synthetic construct
  source 1..20: mol_type = other RNA
ccgcacctcgtccaagtgag

SEQ ID NO: 23582 - RNA, 20 nt, synthetic construct
  source 1..20: mol_type = other RNA
tcacttggacgaggtgcggg

SEQ ID NO: 23583 - RNA, 20 nt, synthetic construct
  source 1..20: mol_type = other RNA
cactcacttggacgaggtgc

SEQ ID NO: 23584 - RNA, 20 nt, synthetic construct
  source 1..20: mol_type = other RNA
ccactcacttggacgaggtg

SEQ ID NO: 23585 - RNA, 20 nt, synthetic construct
  source 1..20: mol_type = other RNA
cagggccactcacttggacg

SEQ ID NO: 23586 - RNA, 20 nt, synthetic construct
  source 1..20: mol_type = other RNA
ggcagtcagggccactcact

SEQ ID NO: 23587 - RNA, 20 nt, synthetic construct
  source 1..20: mol_type = other RNA
agatgtagcctctgtcctct

SEQ ID NO: 23588 - RNA, 20 nt, synthetic construct
  source 1..20: mol_type = other RNA
gcctctgtcctctaggagct

SEQ ID NO: 23589 - RNA, 20 nt, synthetic construct
  source 1..20: mol_type = other RNA
tccaagctcctagaggacag

SEQ ID NO: 23590 - RNA, 20 nt, synthetic construct
  source 1..20: mol_type = other RNA
aggagcttggagtctagtgc

SEQ ID NO: 23591 - RNA, 20 nt, synthetic construct
  source 1..20: mol_type = other RNA
ggagcttggagtctagtgca

SEQ ID NO: 23592 - RNA, 20 nt, synthetic construct
  source 1..20: mol_type = other RNA
ggagtctagtgcagggaccg

SEQ ID NO: 23593 - RNA, 20 nt, synthetic construct
  source 1..20: mol_type = other RNA
tggctgcgtcacctgtgaga

SEQ ID NO: 23594 - RNA, 20 nt, synthetic construct
  source 1..20: mol_type = other RNA
ggctgcgtcacctgtgagac

SEQ ID NO: 23595 - RNA, 20 nt, synthetic construct
  source 1..20: mol_type = other RNA
gctgcgtcacctgtgagacg

SEQ ID NO: 23596 - RNA, 20 nt, synthetic construct
  source 1..20: mol_type = other RNA
gcgtcacctgtgagacgggg

SEQ ID NO: 23597 - RNA, 20 nt, synthetic construct
  source 1..20: mol_type = other RNA
ctgtgagacggggtggccag

SEQ ID NO: 23598 - RNA, 20 nt, synthetic construct
  source 1..20: mol_type = other RNA
tgtgagacggggtggccaga

SEQ ID NO: 23599 - RNA, 20 nt, synthetic construct
  source 1..20: mol_type = other RNA
gtgagacggggtggccagag

SEQ ID NO: 23600 - RNA, 20 nt, synthetic construct
  source 1..20: mol_type = other RNA
ctctggccaccccgtctcac

SEQ ID NO: 23601 - RNA, 20 nt, synthetic construct
  source 1..20: mol_type = other RNA
ccagaggggactgccagtgc

SEQ ID NO: 23602 - RNA, 20 nt, synthetic construct
  source 1..20: mol_type = other RNA
cagaggggactgccagtgcc

SEQ ID NO: 23603 - RNA, 20 nt, synthetic construct
  source 1..20: mol_type = other RNA
ccggcactggcagtcccctc

SEQ ID NO: 23604 - RNA, 20 nt, synthetic construct
  source 1..20: mol_type = other RNA
agcacagggggacccggcac

SEQ ID NO: 23605 - RNA, 20 nt, synthetic construct
  source 1..20: mol_type = other RNA
ggagacagcacagggggacc

SEQ ID NO: 23606 - RNA, 20 nt, synthetic construct
  source 1..20: mol_type = other RNA
aggtcaggagacagcacagg

SEQ ID NO: 23607 - RNA, 20 nt, synthetic construct
  source 1..20: mol_type = other RNA
caggtcaggagacagcacag

SEQ ID NO: 23608 - RNA, 20 nt, synthetic construct
  source 1..20: mol_type = other RNA
gcaggtcaggagacagcaca

SEQ ID NO: 23609 - RNA, 20 nt, synthetic construct
  source 1..20: mol_type = other RNA
tgcaggtcaggagacagcac

SEQ ID NO: 23610 - RNA, 20 nt, synthetic construct
  source 1..20: mol_type = other RNA
acaggcagttggtgcaggtc

SEQ ID NO: 23611 - RNA, 20 nt, synthetic construct
  source 1..20: mol_type = other RNA
caagtacaggcagttggtgc

SEQ ID NO: 23612 - RNA, 20 nt, synthetic construct
  source 1..20: mol_type = other RNA
ggggggcaagtacaggcagt

SEQ ID NO: 23613 - RNA, 20 nt, synthetic construct
  source 1..20: mol_type = other RNA
tgtacttgcccccctgcacc

SEQ ID NO: 23614 - RNA, 20 nt, synthetic construct
  source 1..20: mol_type = other RNA
gggtgcaggggggcaagtac

SEQ ID NO: 23615 - RNA, 20 nt, synthetic construct
  source 1..20: mol_type = other RNA
gtctgcagccgggtgcaggg

SEQ ID NO: 23616 - RNA, 20 nt, synthetic construct
  source 1..20: mol_type = other RNA
tgcacccggctgcagacaca

SEQ ID NO: 23617 - RNA, 20 nt, synthetic construct
  source 1..20: mol_type = other RNA
gtgtctgcagccgggtgcag

SEQ ID NO: 23618 - RNA, 20 nt, synthetic construct
  source 1..20: mol_type = other RNA
tgtgtctgcagccgggtgca

SEQ ID NO: 23619 - RNA, 20 nt, synthetic construct
  source 1..20: mol_type = other RNA
acccggctgcagacacaagg

SEQ ID NO: 23620 - RNA, 20 nt, synthetic construct
  source 1..20: mol_type = other RNA
tcctccttgtgtctgcagcc

SEQ ID NO: 23621 - RNA, 20 nt, synthetic construct
  source 1..20: mol_type = other RNA
atcctccttgtgtctgcagc

SEQ ID NO: 23622 - RNA, 20 nt, synthetic construct
  source 1..20: mol_type = other RNA
acctgcacactaagaacaag

SEQ ID NO: 23623 - RNA, 20 nt, synthetic construct
  source 1..20: mol_type = other RNA
cctgcacactaagaacaaga

SEQ ID NO: 23624 - RNA, 20 nt, synthetic construct
  source 1..20: mol_type = other RNA
gcacactaagaacaagaggg

SEQ ID NO: 23625 - RNA, 20 nt, synthetic construct
  source 1..20: mol_type = other RNA
ccctcttgttcttagtgtgc

SEQ ID NO: 23626 - RNA, 20 nt, synthetic construct
  source 1..20: mol_type = other RNA
aggagaaagtgaagaagcag

SEQ ID NO: 23627 - RNA, 20 nt, synthetic construct
  source 1..20: mol_type = other RNA
gaagcagcggtcagcagaca

SEQ ID NO: 23628 - RNA, 20 nt, synthetic construct
  source 1..20: mol_type = other RNA
agcagacaaggagaagagca

SEQ ID NO: 23629 - RNA, 20 nt, synthetic construct
  source 1..20: mol_type = other RNA
gcagacaaggagaagagcaa

SEQ ID NO: 23630 - RNA, 20 nt, synthetic construct
  source 1..20: mol_type = other RNA
agagcaagggttccctcaag

SEQ ID NO: 23631 - RNA, 20 nt, synthetic construct
  source 1..20: mol_type = other RNA
ttccctcaagaggaagtgag

SEQ ID NO: 23632 - RNA, 20 nt, synthetic construct
  source 1..20: mol_type = other RNA
caccgctcacttcctcttga

SEQ ID NO: 23633 - RNA, 20 nt, synthetic construct
  source 1..20: mol_type = other RNA
gcaccgctcacttcctcttg

SEQ ID NO: 23634 - RNA, 20 nt, synthetic construct
  source 1..20: mol_type = other RNA
aagtgagcggtgctgtcctc

SEQ ID NO: 23635 - RNA, 20 nt, synthetic construct
  source 1..20: mol_type = other RNA
tgagcggtgctgtcctcagg

SEQ ID NO: 23636 - RNA, 20 nt, synthetic construct
  source 1..20: mol_type = other RNA
gtgctgtcctcaggtggcca

SEQ ID NO: 23637 - RNA, 20 nt, synthetic construct
  source 1..20: mol_type = other RNA
agctgtaccatggccacctg

SEQ ID NO: 23638 - RNA, 20 nt, synthetic construct
  source 1..20: mol_type = other RNA
catggtacagctcttctgcc

SEQ ID NO: 23639 - RNA, 20 nt, synthetic construct
  source 1..20: mol_type = other RNA
atggtacagctcttctgcct

SEQ ID NO: 23640 - RNA, 20 nt, synthetic construct
  source 1..20: mol_type = other RNA
caggcagaagagctgtacca

SEQ ID NO: 23641 - RNA, 20 nt, synthetic construct
  source 1..20: mol_type = other RNA
ctgccaagagaagggagtga

SEQ ID NO: 23642 - RNA, 20 nt, synthetic construct
  source 1..20: mol_type = other RNA
gctgccaagagaagggagtg

SEQ ID NO: 23643 - RNA, 20 nt, synthetic construct
  source 1..20: mol_type = other RNA
ggctgaggctgccaagagaa

SEQ ID NO: 23644 - RNA, 20 nt, synthetic construct
  source 1..20: mol_type = other RNA
gggctgaggctgccaagaga

SEQ ID NO: 23645 - RNA, 20 nt, synthetic construct
  source 1..20: mol_type = other RNA
cagcctcagccctgaccctg

SEQ ID NO: 23646 - RNA, 20 nt, synthetic construct
  source 1..20: mol_type = other RNA
cttccacagggtcagggctg

SEQ ID NO: 23647 - RNA, 20 nt, synthetic construct
  source 1..20: mol_type = other RNA
gaaatgcttccacagggtca

SEQ ID NO: 23648 - RNA, 20 nt, synthetic construct
  source 1..20: mol_type = other RNA
cgaaatgcttccacagggtc

SEQ ID NO: 23649 - RNA, 20 nt, synthetic construct
  source 1..20: mol_type = other RNA
cctgtggaagcatttcgcga

SEQ ID NO: 23650 - RNA, 20 nt, synthetic construct
  source 1..20: mol_type = other RNA
catcgcgaaatgcttccaca

SEQ ID NO: 23651 - RNA, 20 nt, synthetic construct
  source 1..20: mol_type = other RNA
ccatcgcgaaatgcttccac

SEQ ID NO: 23652 - RNA, 20 nt, synthetic construct
  source 1..20: mol_type = other RNA
cagactcacaacctgaacct

SEQ ID NO: 23653 - RNA, 20 nt, synthetic construct
  source 1..20: mol_type = other RNA
aatggggcactcctaggttc

SEQ ID NO: 23654 - RNA, 20 nt, synthetic construct
  source 1..20: mol_type = other RNA
caaaagaatggggcactcct

SEQ ID NO: 23655 - RNA, 20 nt, synthetic construct
  source 1..20: mol_type = other RNA
ccattcttttgtaatttaaa

SEQ ID NO: 23656 - RNA, 20 nt, synthetic construct
  source 1..20: mol_type = other RNA
atttaaattacaaaagaatg

SEQ ID NO: 23657 - RNA, 20 nt, synthetic construct
  source 1..20: mol_type = other RNA
catttaaattacaaaagaat

SEQ ID NO: 23658 - RNA, 20 nt, synthetic construct
  source 1..20: mol_type = other RNA
ccatttaaattacaaaagaa

SEQ ID NO: 23659 - RNA, 20 nt, synthetic construct
  source 1..20: mol_type = other RNA
agggtcagggagaggtgggg

SEQ ID NO: 23660 - RNA, 20 nt, synthetic construct
  source 1..20: mol_type = other RNA
cagggtcagggagaggtggg

SEQ ID NO: 23661 - RNA, 20 nt, synthetic construct
  source 1..20: mol_type = other RNA
acagggtcagggagaggtgg

SEQ ID NO: 23662 - RNA, 20 nt, synthetic construct
  source 1..20: mol_type = other RNA
tacagggtcagggagaggtg

SEQ ID NO: 23663 - RNA, 20 nt, synthetic construct
  source 1..20: mol_type = other RNA
atacagggtcagggagaggt

SEQ ID NO: 23664 - RNA, 20 nt, synthetic construct
  source 1..20: mol_type = other RNA
tatacagggtcagggagagg

SEQ ID NO: 23665 - RNA, 20 nt, synthetic construct
  source 1..20: mol_type = other RNA
ctatatacagggtcagggag

SEQ ID NO: 23666 - RNA, 20 nt, synthetic construct
  source 1..20: mol_type = other RNA
accctgtatatagcccagcc

SEQ ID NO: 23667 - RNA, 20 nt, synthetic construct
  source 1..20: mol_type = other RNA
gctgggctatatacagggtc

SEQ ID NO: 23668 - RNA, 20 nt, synthetic construct
  source 1..20: mol_type = other RNA
gcctggctgggctatataca

SEQ ID NO: 23669 - RNA, 20 nt, synthetic construct
  source 1..20: mol_type = other RNA
atatagcccagccaggcccc

SEQ ID NO: 23670 - RNA, 20 nt, synthetic construct
  source 1..20: mol_type = other RNA
agcccagccaggccccaggc

SEQ ID NO: 23671 - RNA, 20 nt, synthetic construct
  source 1..20: mol_type = other RNA
gcccagccaggccccaggca

SEQ ID NO: 23672 - RNA, 20 nt, synthetic construct
  source 1..20: mol_type = other RNA
gccctgcctggggcctggct

SEQ ID NO: 23673 - RNA, 20 nt, synthetic construct
  source 1..20: mol_type = other RNA
ggccctgcctggggcctggc

SEQ ID NO: 23674 - RNA, 20 nt, synthetic construct
  source 1..20: mol_type = other RNA
ggttggccctgcctggggcc

SEQ ID NO: 23675 - RNA, 20 nt, synthetic construct
  source 1..20: mol_type = other RNA
agaagggttggccctgcctg

SEQ ID NO: 23676 - RNA, 20 nt, synthetic construct
  source 1..20: mol_type = other RNA
gagaagggttggccctgcct

SEQ ID NO: 23677 - RNA, 20 nt, synthetic construct
  source 1..20: mol_type = other RNA
ggagaagggttggccctgcc

SEQ ID NO: 23678 - RNA, 20 nt, synthetic construct
  source 1..20: mol_type = other RNA
atttacaagaggagaagggt

SEQ ID NO: 23679 - RNA, 20 nt, synthetic construct
  source 1..20: mol_type = other RNA
ctttatttacaagaggagaa

SEQ ID NO: 23680 - RNA, 20 nt, synthetic construct
  source 1..20: mol_type = other RNA
tcctcttgtaaataaagccc

SEQ ID NO: 23681 - RNA, 20 nt, synthetic construct
  source 1..20: mol_type = other RNA
cctcttgtaaataaagccct

SEQ ID NO: 23682 - RNA, 20 nt, synthetic construct
  source 1..20: mol_type = other RNA
cccagggctttatttacaag

SEQ ID NO: 23683 - RNA, 20 nt, synthetic construct
  source 1..20: mol_type = other RNA
ggcgacacacagtgatccca

SEQ ID NO: 23684 - RNA, 20 nt, synthetic construct
  source 1..20: mol_type = other RNA
aggcgacacacagtgatccc

SEQ ID NO: 23685 - DNA, 28 bp, synthetic construct
  source 1..28: mol_type = other DNA
ctcccccaccccccactatgaagtcagg

SEQ ID NO: 23686 - DNA, 28 bp, synthetic construct
  source 1..28: mol_type = other DNA
cacctgacttcatagtggggggtggggg

SEQ ID NO: 23687 - DNA, 28 bp, synthetic construct
  source 1..28: mol_type = other DNA
acacctgacttcatagtggggggtgggg

SEQ ID NO: 23688 - DNA, 28 bp, synthetic construct
  source 1..28: mol_type = other DNA
cacacctgacttcatagtggggggtggg

SEQ ID NO: 23689 - DNA, 28 bp, synthetic construct
  source 1..28: mol_type = other DNA
ccaccccccactatgaagtcaggtgtgg

SEQ ID NO: 23690 - DNA, 28 bp, synthetic construct
  source 1..28: mol_type = other DNA
attccacacctgacttcatagtgggggg

SEQ ID NO: 23691 - DNA, 28 bp, synthetic construct
  source 1..28: mol_type = other DNA
aattccacacctgacttcatagtggggg

SEQ ID NO: 23692 - DNA, 28 bp, synthetic construct
  source 1..28: mol_type = other DNA
aaattccacacctgacttcatagtgggg

SEQ ID NO: 23693 - DNA, 28 bp, synthetic construct
  source 1..28: mol_type = other DNA
aaaattccacacctgacttcatagtggg

SEQ ID NO: 23694 - DNA, 28 bp, synthetic construct
  source 1..28: mol_type = other DNA
gaaaattccacacctgacttcatagtgg

SEQ ID NO: 23695 - DNA, 28 bp, synthetic construct
  source 1..28: mol_type = other DNA
agtcaggtgtggaattttccattttcgg

SEQ ID NO: 23696 - DNA, 28 bp, synthetic construct
  source 1..28: mol_type = other DNA
gaattttccattttcggcctcacactgg

SEQ ID NO: 23697 - DNA, 28 bp, synthetic construct
  source 1..28: mol_type = other DNA
atgagtgccagtgtgaggccgaaaatgg

SEQ ID NO: 23698 - DNA, 28 bp, synthetic construct
  source 1..28: mol_type = other DNA
atctgaaattatgagtgccagtgtgagg

SEQ ID NO: 23699 - DNA, 28 bp, synthetic construct
  source 1..28: mol_type = other DNA
cactggcactcataatttcagattttgg

SEQ ID NO: 23700 - DNA, 28 bp, synthetic construct
  source 1..28: mol_type = other DNA
tttcagattttggattttctaattaagg

SEQ ID NO: 23701 - DNA, 28 bp, synthetic construct
  source 1..28: mol_type = other DNA
agattttggattttctaattaaggatgg

SEQ ID NO: 23702 - DNA, 28 bp, synthetic construct
  source 1..28: mol_type = other DNA
ggaataataatgtgattaacagtacagg

SEQ ID NO: 23703 - DNA, 28 bp, synthetic construct
  source 1..28: mol_type = other DNA
cacattattattccattttgtgatgagg

SEQ ID NO: 23704 - DNA, 28 bp, synthetic construct
  source 1..28: mol_type = other DNA
tagagtttgcttcctcatcacaaaatgg

SEQ ID NO: 23705 - DNA, 28 bp, synthetic construct
  source 1..28: mol_type = other DNA
tttgtgatgaggaagcaaactctaatgg

SEQ ID NO: 23706 - DNA, 28 bp, synthetic construct
  source 1..28: mol_type = other DNA
ggtgcagactctcgagtagcagagctgg

SEQ ID NO: 23707 - DNA, 28 bp, synthetic construct
  source 1..28: mol_type = other DNA
gtcatgcagacatgtcactaaaaggtgg

SEQ ID NO: 23708 - DNA, 28 bp, synthetic construct
  source 1..28: mol_type = other DNA
gctgtcatgcagacatgtcactaaaagg

SEQ ID NO: 23709 - DNA, 28 bp, synthetic construct
  source 1..28: mol_type = other DNA
tagtgacatgtctgcatgacagcagtgg

SEQ ID NO: 23710 - DNA, 28 bp, synthetic construct
  source 1..28: mol_type = other DNA
tgacagcagtggctgcagtctctccagg

SEQ ID NO: 23711 - DNA, 28 bp, synthetic construct
  source 1..28: mol_type = other DNA
gacagcagtggctgcagtctctccaggg

SEQ ID NO: 23712 - DNA, 28 bp, synthetic construct
  source 1..28: mol_type = other DNA
caaacaaaaattagctgaaacaccctgg

SEQ ID NO: 23713 - DNA, 28 bp, synthetic construct
  source 1..28: mol_type = other DNA
cagggtgtttcagctaatttttgtttgg

SEQ ID NO: 23714 - DNA, 28 bp, synthetic construct
  source 1..28: mol_type = other DNA
agggtgtttcagctaatttttgtttggg

SEQ ID NO: 23715 - DNA, 28 bp, synthetic construct
  source 1..28: mol_type = other DNA
gggtgtttcagctaatttttgtttgggg

SEQ ID NO: 23716 - DNA, 28 bp, synthetic construct
  source 1..28: mol_type = other DNA
ggtgtttcagctaatttttgtttggggg

SEQ ID NO: 23717 - DNA, 28 bp, synthetic construct
  source 1..28: mol_type = other DNA
gtgtttcagctaatttttgtttgggggg

SEQ ID NO: 23718 - DNA, 28 bp, synthetic construct
  source 1..28: mol_type = other DNA
tgtttcagctaatttttgtttggggggg

SEQ ID NO: 23719 - DNA, 28 bp, synthetic construct
  source 1..28: mol_type = other DNA
gtttcagctaatttttgtttgggggggg

SEQ ID NO: 23720 - DNA, 28 bp, synthetic construct
  source 1..28: mol_type = other DNA
cagctaatttttgtttggggggggttgg

SEQ ID NO: 23721 - DNA, 28 bp, synthetic construct
  source 1..28: mol_type = other DNA
ctaatttttgtttggggggggttggtgg

SEQ ID NO: 23722 - DNA, 28 bp, synthetic construct
  source 1..28: mol_type = other DNA
tggggggggttggtggttaaatttttgg

SEQ ID NO: 23723 - DNA, 28 bp, synthetic construct
  source 1..28: mol_type = other DNA
ggtggttaaatttttggtgagatcctgg

SEQ ID NO: 23724 - DNA, 28 bp, synthetic construct
  source 1..28: mol_type = other DNA
ttggtgagatcctggtgttccccaaagg

SEQ ID NO: 23725 - DNA, 28 bp, synthetic construct
  source 1..28: mol_type = other DNA
tcagtcaacacctttggggaacaccagg

SEQ ID NO: 23726 - DNA, 28 bp, synthetic construct
  source 1..28: mol_type = other DNA
agagctgaatcagtcaacacctttgggg

SEQ ID NO: 23727 - DNA, 28 bp, synthetic construct
  source 1..28: mol_type = other DNA
cagagctgaatcagtcaacacctttggg

SEQ ID NO: 23728 - DNA, 28 bp, synthetic construct
  source 1..28: mol_type = other DNA
gcagagctgaatcagtcaacacctttgg

SEQ ID NO: 23729 - DNA, 28 bp, synthetic construct
  source 1..28: mol_type = other DNA
gtagctggaactcaggaaggctatgagg

SEQ ID NO: 23730 - DNA, 28 bp, synthetic construct
  source 1..28: mol_type = other DNA
ccttcctgagttccagctacagacctgg

SEQ ID NO: 23731 - DNA, 28 bp, synthetic construct
  source 1..28: mol_type = other DNA
cttcctgagttccagctacagacctggg

SEQ ID NO: 23732 - DNA, 28 bp, synthetic construct
  source 1..28: mol_type = other DNA
ttcctgagttccagctacagacctgggg

SEQ ID NO: 23733 - DNA, 28 bp, synthetic construct
  source 1..28: mol_type = other DNA
gaccccaggtctgtagctggaactcagg

SEQ ID NO: 23734 - DNA, 28 bp, synthetic construct
  source 1..28: mol_type = other DNA
gaacacgagaccccaggtctgtagctgg

SEQ ID NO: 23735 - DNA, 28 bp, synthetic construct
  source 1..28: mol_type = other DNA
agacctggggtctcgtgttcattcttgg

SEQ ID NO: 23736 - DNA, 28 bp, synthetic construct
  source 1..28: mol_type = other DNA
gacctggggtctcgtgttcattcttggg

SEQ ID NO: 23737 - DNA, 28 bp, synthetic construct
  source 1..28: mol_type = other DNA
acctggggtctcgtgttcattcttgggg

SEQ ID NO: 23738 - DNA, 28 bp, synthetic construct
  source 1..28: mol_type = other DNA
accccaagaatgaacacgagaccccagg

SEQ ID NO: 23739 - DNA, 28 bp, synthetic construct
  source 1..28: mol_type = other DNA
ggttccagtgactaaactgctaaaatgg

SEQ ID NO: 23740 - DNA, 28 bp, synthetic construct
  source 1..28: mol_type = other DNA
tgaaccattttagcagtttagtcactgg

SEQ ID NO: 23741 - DNA, 28 bp, synthetic construct
  source 1..28: mol_type = other DNA
cctgagagcaagaagcacactgccttgg

SEQ ID NO: 23742 - DNA, 28 bp, synthetic construct
  source 1..28: mol_type = other DNA
ctgagagcaagaagcacactgccttggg

SEQ ID NO: 23743 - DNA, 28 bp, synthetic construct
  source 1..28: mol_type = other DNA
ggatgcagtgaatgaaaatgtcccaagg

SEQ ID NO: 23744 - DNA, 28 bp, synthetic construct
  source 1..28: mol_type = other DNA
tggtctacactgggcacaactagatggg

SEQ ID NO: 23745 - DNA, 28 bp, synthetic construct
  source 1..28: mol_type = other DNA
ttggtctacactgggcacaactagatgg

SEQ ID NO: 23746 - DNA, 28 bp, synthetic construct
  source 1..28: mol_type = other DNA
tggatgatgacatttggtctacactggg

SEQ ID NO: 23747 - DNA, 28 bp, synthetic construct
  source 1..28: mol_type = other DNA
ttggatgatgacatttggtctacactgg

SEQ ID NO: 23748 - DNA, 28 bp, synthetic construct
  source 1..28: mol_type = other DNA
accaaatgtcatcatccaaaccacacgg

SEQ ID NO: 23749 - DNA, 28 bp, synthetic construct
  source 1..28: mol_type = other DNA
ccaaatgtcatcatccaaaccacacggg

SEQ ID NO: 23750 - DNA, 28 bp, synthetic construct
  source 1..28: mol_type = other DNA
tcatcatccaaaccacacgggacagagg

SEQ ID NO: 23751 - DNA, 28 bp, synthetic construct
  source 1..28: mol_type = other DNA
atgcaggcctctgtcccgtgtggtttgg

SEQ ID NO: 23752 - DNA, 28 bp, synthetic construct
  source 1..28: mol_type = other DNA
gacgcatgcaggcctctgtcccgtgtgg

SEQ ID NO: 23753 - DNA, 28 bp, synthetic construct
  source 1..28: mol_type = other DNA
gacagaggcctgcatgcgtcctgtttgg

SEQ ID NO: 23754 - DNA, 28 bp, synthetic construct
  source 1..28: mol_type = other DNA
gctgtttgccaaacaggacgcatgcagg

SEQ ID NO: 23755 - DNA, 28 bp, synthetic construct
  source 1..28: mol_type = other DNA
ctggctgggcagctgtttgccaaacagg

SEQ ID NO: 23756 - DNA, 28 bp, synthetic construct
  source 1..28: mol_type = other DNA
gtttggcaaacagctgcccagccagtgg

SEQ ID NO: 23757 - DNA, 28 bp, synthetic construct
  source 1..28: mol_type = other DNA
tttggcaaacagctgcccagccagtggg

SEQ ID NO: 23758 - DNA, 28 bp, synthetic construct
  source 1..28: mol_type = other DNA
ttggcaaacagctgcccagccagtgggg

SEQ ID NO: 23759 - DNA, 28 bp, synthetic construct
  source 1..28: mol_type = other DNA
tggcaaacagctgcccagccagtggggg

SEQ ID NO: 23760 - DNA, 28 bp, synthetic construct
  source 1..28: mol_type = other DNA
agcatgaactgctcccccactggctggg

SEQ ID NO: 23761 - DNA, 28 bp, synthetic construct
  source 1..28: mol_type = other DNA
aagcatgaactgctcccccactggctgg

SEQ ID NO: 23762 - DNA, 28 bp, synthetic construct
  source 1..28: mol_type = other DNA
gtctaagcatgaactgctcccccactgg

SEQ ID NO: 23763 - DNA, 28 bp, synthetic construct
  source 1..28: mol_type = other DNA
tcatgcttagactaccaccccctccagg

SEQ ID NO: 23764 - DNA, 28 bp, synthetic construct
  source 1..28: mol_type = other DNA
gactaccaccccctccaggtgtcttagg

SEQ ID NO: 23765 - DNA, 28 bp, synthetic construct
  source 1..28: mol_type = other DNA
gcgtgcctaagacacctggagggggtgg

SEQ ID NO: 23766 - DNA, 28 bp, synthetic construct
  source 1..28: mol_type = other DNA
ccccctccaggtgtcttaggcacgctgg

SEQ ID NO: 23767 - DNA, 28 bp, synthetic construct
  source 1..28: mol_type = other DNA
accagcgtgcctaagacacctggagggg

SEQ ID NO: 23768 - DNA, 28 bp, synthetic construct
  source 1..28: mol_type = other DNA
gaccagcgtgcctaagacacctggaggg

SEQ ID NO: 23769 - DNA, 28 bp, synthetic construct
  source 1..28: mol_type = other DNA
ggaccagcgtgcctaagacacctggagg

SEQ ID NO: 23770 - DNA, 28 bp, synthetic construct
  source 1..28: mol_type = other DNA
taaggaccagcgtgcctaagacacctgg

SEQ ID NO: 23771 - DNA, 28 bp, synthetic construct
  source 1..28: mol_type = other DNA
aggtgtcttaggcacgctggtccttagg

SEQ ID NO: 23772 - DNA, 28 bp, synthetic construct
  source 1..28: mol_type = other DNA
cttaggcacgctggtccttaggagaagg

SEQ ID NO: 23773 - DNA, 28 bp, synthetic construct
  source 1..28: mol_type = other DNA
ttaggcacgctggtccttaggagaaggg

SEQ ID NO: 23774 - DNA, 28 bp, synthetic construct
  source 1..28: mol_type = other DNA
gagtggaaggtcaacccttctcctaagg

SEQ ID NO: 23775 - DNA, 28 bp, synthetic construct
  source 1..28: mol_type = other DNA
gggttgaccttccactccctcttgcagg

SEQ ID NO: 23776 - DNA, 28 bp, synthetic construct
  source 1..28: mol_type = other DNA
aaggacacctgcaagagggagtggaagg

SEQ ID NO: 23777 - DNA, 28 bp, synthetic construct
  source 1..28: mol_type = other DNA
acttaaggacacctgcaagagggagtgg

SEQ ID NO: 23778 - DNA, 28 bp, synthetic construct
  source 1..28: mol_type = other DNA
agcaaacttaaggacacctgcaagaggg

SEQ ID NO: 23779 - DNA, 28 bp, synthetic construct
  source 1..28: mol_type = other DNA
gagcaaacttaaggacacctgcaagagg

SEQ ID NO: 23780 - DNA, 28 bp, synthetic construct
  source 1..28: mol_type = other DNA
gcaggtgtccttaagtttgctcgcttgg

SEQ ID NO: 23781 - DNA, 28 bp, synthetic construct
  source 1..28: mol_type = other DNA
ggacttgaccaagcgagcaaacttaagg

SEQ ID NO: 23782 - DNA, 28 bp, synthetic construct
  source 1..28: mol_type = other DNA
cgcttggtcaagtcctacgaagcccagg

SEQ ID NO: 23783 - DNA, 28 bp, synthetic construct
  source 1..28: mol_type = other DNA
gcgatctcaggatcctgggcttcgtagg

SEQ ID NO: 23784 - DNA, 28 bp, synthetic construct
  source 1..28: mol_type = other DNA
gacaggctggcgatctcaggatcctggg

SEQ ID NO: 23785 - DNA, 28 bp, synthetic construct
  source 1..28: mol_type = other DNA
tgacaggctggcgatctcaggatcctgg

SEQ ID NO: 23786 - DNA, 28 bp, synthetic construct
  source 1..28: mol_type = other DNA
aggatcctgagatcgccagcctgtcagg

SEQ ID NO: 23787 - DNA, 28 bp, synthetic construct
  source 1..28: mol_type = other DNA
gcttgcctgacaggctggcgatctcagg

SEQ ID NO: 23788 - DNA, 28 bp, synthetic construct
  source 1..28: mol_type = other DNA
atcgccagcctgtcaggcaagctgaagg

SEQ ID NO: 23789 - DNA, 28 bp, synthetic construct
  source 1..28: mol_type = other DNA
agcgccttcagcttgcctgacaggctgg

SEQ ID NO: 23790 - DNA, 28 bp, synthetic construct
  source 1..28: mol_type = other DNA
aaacagcgccttcagcttgcctgacagg

SEQ ID NO: 23791 - DNA, 28 bp, synthetic construct
  source 1..28: mol_type = other DNA
tgccgcccatgaccctgccaccccatgg

SEQ ID NO: 23792 - DNA, 28 bp, synthetic construct
  source 1..28: mol_type = other DNA
gccgcccatgaccctgccaccccatggg

SEQ ID NO: 23793 - DNA, 28 bp, synthetic construct
  source 1..28: mol_type = other DNA
gcccatggggtggcagggtcatgggcgg

SEQ ID NO: 23794 - DNA, 28 bp, synthetic construct
  source 1..28: mol_type = other DNA
caggcccatggggtggcagggtcatggg

SEQ ID NO: 23795 - DNA, 28 bp, synthetic construct
  source 1..28: mol_type = other DNA
gcaggcccatggggtggcagggtcatgg

SEQ ID NO: 23796 - DNA, 28 bp, synthetic construct
  source 1..28: mol_type = other DNA
ccctgccaccccatgggcctgctgctgg

SEQ ID NO: 23797 - DNA, 28 bp, synthetic construct
  source 1..28: mol_type = other DNA
accagcagcaggcccatggggtggcagg

SEQ ID NO: 23798 - DNA, 28 bp, synthetic construct
  source 1..28: mol_type = other DNA
tgccaccccatgggcctgctgctggtgg

SEQ ID NO: 23799 - DNA, 28 bp, synthetic construct
  source 1..28: mol_type = other DNA
tgccaccagcagcaggcccatggggtgg

SEQ ID NO: 23800 - DNA, 28 bp, synthetic construct
  source 1..28: mol_type = other DNA
cgctgccaccagcagcaggcccatgggg

SEQ ID NO: 23801 - DNA, 28 bp, synthetic construct
  source 1..28: mol_type = other DNA
acgctgccaccagcagcaggcccatggg

SEQ ID NO: 23802 - DNA, 28 bp, synthetic construct
  source 1..28: mol_type = other DNA
cacgctgccaccagcagcaggcccatgg

SEQ ID NO: 23803 - DNA, 28 bp, synthetic construct
  source 1..28: mol_type = other DNA
catgggcctgctgctggtggcagcgtgg

SEQ ID NO: 23804 - DNA, 28 bp, synthetic construct
  source 1..28: mol_type = other DNA
aggcggccacgctgccaccagcagcagg

SEQ ID NO: 23805 - DNA, 28 bp, synthetic construct
  source 1..28: mol_type = other DNA
ggcagcgtggccgcctcctgagagttgg

SEQ ID NO: 23806 - DNA, 28 bp, synthetic construct
  source 1..28: mol_type = other DNA
caagggagggccaactctcaggaggcgg

SEQ ID NO: 23807 - DNA, 28 bp, synthetic construct
  source 1..28: mol_type = other DNA
gcacaagggagggccaactctcaggagg

SEQ ID NO: 23808 - DNA, 28 bp, synthetic construct
  source 1..28: mol_type = other DNA
gtggcacaagggagggccaactctcagg

SEQ ID NO: 23809 - DNA, 28 bp, synthetic construct
  source 1..28: mol_type = other DNA
gttggccctcccttgtgccactgccagg

SEQ ID NO: 23810 - DNA, 28 bp, synthetic construct
  source 1..28: mol_type = other DNA
ttggccctcccttgtgccactgccaggg

SEQ ID NO: 23811 - DNA, 28 bp, synthetic construct
  source 1..28: mol_type = other DNA
tggccctcccttgtgccactgccagggg

SEQ ID NO: 23812 - DNA, 28 bp, synthetic construct
  source 1..28: mol_type = other DNA
ccctcccttgtgccactgccaggggagg

SEQ ID NO: 23813 - DNA, 28 bp, synthetic construct
  source 1..28: mol_type = other DNA
tcctcccctggcagtggcacaagggagg

SEQ ID NO: 23814 - DNA, 28 bp, synthetic construct
  source 1..28: mol_type = other DNA
ctttcctcccctggcagtggcacaaggg

SEQ ID NO: 23815 - DNA, 28 bp, synthetic construct
  source 1..28: mol_type = other DNA
ccttgtgccactgccaggggaggaaagg

SEQ ID NO: 23816 - DNA, 28 bp, synthetic construct
  source 1..28: mol_type = other DNA
atcaaggcctttcctcccctggcagtgg

SEQ ID NO: 23817 - DNA, 28 bp, synthetic construct
  source 1..28: mol_type = other DNA
tggaacatcaaggcctttcctcccctgg

SEQ ID NO: 23818 - DNA, 28 bp, synthetic construct
  source 1..28: mol_type = other DNA
gcatttattattgtctggaacatcaagg

SEQ ID NO: 23819 - DNA, 28 bp, synthetic construct
  source 1..28: mol_type = other DNA
agtcacaggcgcatttattattgtctgg

SEQ ID NO: 23820 - DNA, 28 bp, synthetic construct
  source 1..28: mol_type = other DNA
aataaatgcgcctgtgacttagccttgg

SEQ ID NO: 23821 - DNA, 28 bp, synthetic construct
  source 1..28: mol_type = other DNA
gagactgacaccaaggctaagtcacagg

SEQ ID NO: 23822 - DNA, 28 bp, synthetic construct
  source 1..28: mol_type = other DNA
acttagccttggtgtcagtctcttgcgg

SEQ ID NO: 23823 - DNA, 28 bp, synthetic construct
  source 1..28: mol_type = other DNA
tcaggtccgcaagagactgacaccaagg

SEQ ID NO: 23824 - DNA, 28 bp, synthetic construct
  source 1..28: mol_type = other DNA
cagggaaggagagatgggggttgtcagg

SEQ ID NO: 23825 - DNA, 28 bp, synthetic construct
  source 1..28: mol_type = other DNA
gagggaatcagggaaggagagatggggg

SEQ ID NO: 23826 - DNA, 28 bp, synthetic construct
  source 1..28: mol_type = other DNA
agagggaatcagggaaggagagatgggg

SEQ ID NO: 23827 - DNA, 28 bp, synthetic construct
  source 1..28: mol_type = other DNA
cagagggaatcagggaaggagagatggg

SEQ ID NO: 23828 - DNA, 28 bp, synthetic construct
  source 1..28: mol_type = other DNA
gcagagggaatcagggaaggagagatgg

SEQ ID NO: 23829 - DNA, 28 bp, synthetic construct
  source 1..28: mol_type = other DNA
ctggaaaggcagagggaatcagggaagg

SEQ ID NO: 23830 - DNA, 28 bp, synthetic construct
  source 1..28: mol_type = other DNA
cttccctgattccctctgcctttccagg

SEQ ID NO: 23831 - DNA, 28 bp, synthetic construct
  source 1..28: mol_type = other DNA
gggcctggaaaggcagagggaatcaggg

SEQ ID NO: 23832 - DNA, 28 bp, synthetic construct
  source 1..28: mol_type = other DNA
ggggcctggaaaggcagagggaatcagg

SEQ ID NO: 23833 - DNA, 28 bp, synthetic construct
  source 1..28: mol_type = other DNA
gggggatggggcctggaaaggcagaggg

SEQ ID NO: 23834 - DNA, 28 bp, synthetic construct
  source 1..28: mol_type = other DNA
agggggatggggcctggaaaggcagagg

SEQ ID NO: 23835 - DNA, 28 bp, synthetic construct
  source 1..28: mol_type = other DNA
ctgttcagggggatggggcctggaaagg

SEQ ID NO: 23836 - DNA, 28 bp, synthetic construct
  source 1..28: mol_type = other DNA
aggagctgttcagggggatggggcctgg

SEQ ID NO: 23837 - DNA, 28 bp, synthetic construct
  source 1..28: mol_type = other DNA
tagggaggagctgttcagggggatgggg

SEQ ID NO: 23838 - DNA, 28 bp, synthetic construct
  source 1..28: mol_type = other DNA
atagggaggagctgttcagggggatggg

SEQ ID NO: 23839 - DNA, 28 bp, synthetic construct
  source 1..28: mol_type = other DNA
catagggaggagctgttcagggggatgg

SEQ ID NO: 23840 - DNA, 28 bp, synthetic construct
  source 1..28: mol_type = other DNA
catccccctgaacagctcctccctatgg

SEQ ID NO: 23841 - DNA, 28 bp, synthetic construct
  source 1..28: mol_type = other DNA
ggaccatagggaggagctgttcaggggg

SEQ ID NO: 23842 - DNA, 28 bp, synthetic construct
  source 1..28: mol_type = other DNA
aggaccatagggaggagctgttcagggg

SEQ ID NO: 23843 - DNA, 28 bp, synthetic construct
  source 1..28: mol_type = other DNA
caggaccatagggaggagctgttcaggg

SEQ ID NO: 23844 - DNA, 28 bp, synthetic construct
  source 1..28: mol_type = other DNA
cctgaacagctcctccctatggtcctgg

SEQ ID NO: 23845 - DNA, 28 bp, synthetic construct
  source 1..28: mol_type = other DNA
aacagctcctccctatggtcctggctgg

SEQ ID NO: 23846 - DNA, 28 bp, synthetic construct
  source 1..28: mol_type = other DNA
acagctcctccctatggtcctggctggg

SEQ ID NO: 23847 - DNA, 28 bp, synthetic construct
  source 1..28: mol_type = other DNA
gttaggcccagccaggaccatagggagg

SEQ ID NO: 23848 - DNA, 28 bp, synthetic construct
  source 1..28: mol_type = other DNA
agggttaggcccagccaggaccataggg

SEQ ID NO: 23849 - DNA, 28 bp, synthetic construct
  source 1..28: mol_type = other DNA
cagggttaggcccagccaggaccatagg

SEQ ID NO: 23850 - DNA, 28 bp, synthetic construct
  source 1..28: mol_type = other DNA
tcctggctgggcctaaccctgccccagg

SEQ ID NO: 23851 - DNA, 28 bp, synthetic construct
  source 1..28: mol_type = other DNA
cctggctgggcctaaccctgccccaggg

SEQ ID NO: 23852 - DNA, 28 bp, synthetic construct
  source 1..28: mol_type = other DNA
tagggttaggccctggggcagggttagg

SEQ ID NO: 23853 - DNA, 28 bp, synthetic construct
  source 1..28: mol_type = other DNA
tcaggtagggttaggccctggggcaggg

SEQ ID NO: 23854 - DNA, 28 bp, synthetic construct
  source 1..28: mol_type = other DNA
ctcaggtagggttaggccctggggcagg

SEQ ID NO: 23855 - DNA, 28 bp, synthetic construct
  source 1..28: mol_type = other DNA
ctgccccagggcctaaccctacctgagg

SEQ ID NO: 23856 - DNA, 28 bp, synthetic construct
  source 1..28: mol_type = other DNA
gagcctcaggtagggttaggccctgggg

SEQ ID NO: 23857 - DNA, 28 bp, synthetic construct
  source 1..28: mol_type = other DNA
ggagcctcaggtagggttaggccctggg

SEQ ID NO: 23858 - DNA, 28 bp, synthetic construct
  source 1..28: mol_type = other DNA
aggagcctcaggtagggttaggccctgg

SEQ ID NO: 23859 - DNA, 28 bp, synthetic construct
  source 1..28: mol_type = other DNA
aaggggaggagcctcaggtagggttagg

SEQ ID NO: 23860 - DNA, 28 bp, synthetic construct
  source 1..28: mol_type = other DNA
gggggaaggggaggagcctcaggtaggg

SEQ ID NO: 23861 - DNA, 28 bp, synthetic construct
  source 1..28: mol_type = other DNA
cgggggaaggggaggagcctcaggtagg

SEQ ID NO: 23862 - DNA, 28 bp, synthetic construct
  source 1..28: mol_type = other DNA
ctacctgaggctcctccccttcccccgg

SEQ ID NO: 23863 - DNA, 28 bp, synthetic construct
  source 1..28: mol_type = other DNA
tacctgaggctcctccccttcccccggg

SEQ ID NO: 23864 - DNA, 28 bp, synthetic construct
  source 1..28: mol_type = other DNA
acctgaggctcctccccttcccccgggg

SEQ ID NO: 23865 - DNA, 28 bp, synthetic construct
  source 1..28: mol_type = other DNA
gccccgggggaaggggaggagcctcagg

SEQ ID NO: 23866 - DNA, 28 bp, synthetic construct
  source 1..28: mol_type = other DNA
gaggctcctccccttcccccggggcagg

SEQ ID NO: 23867 - DNA, 28 bp, synthetic construct
  source 1..28: mol_type = other DNA
tctcaacctgccccgggggaaggggagg

SEQ ID NO: 23868 - DNA, 28 bp, synthetic construct
  source 1..28: mol_type = other DNA
tccccttcccccggggcaggttgagagg

SEQ ID NO: 23869 - DNA, 28 bp, synthetic construct
  source 1..28: mol_type = other DNA
gcctctcaacctgccccgggggaagggg

SEQ ID NO: 23870 - DNA, 28 bp, synthetic construct
  source 1..28: mol_type = other DNA
agcctctcaacctgccccgggggaaggg

SEQ ID NO: 23871 - DNA, 28 bp, synthetic construct
  source 1..28: mol_type = other DNA
cagcctctcaacctgccccgggggaagg

SEQ ID NO: 23872 - DNA, 28 bp, synthetic construct
  source 1..28: mol_type = other DNA
cttcccccggggcaggttgagaggctgg

SEQ ID NO: 23873 - DNA, 28 bp, synthetic construct
  source 1..28: mol_type = other DNA
actccagcctctcaacctgccccggggg

SEQ ID NO: 23874 - DNA, 28 bp, synthetic construct
  source 1..28: mol_type = other DNA
cactccagcctctcaacctgccccgggg

SEQ ID NO: 23875 - DNA, 28 bp, synthetic construct
  source 1..28: mol_type = other DNA
cccggggcaggttgagaggctggagtgg

SEQ ID NO: 23876 - DNA, 28 bp, synthetic construct
  source 1..28: mol_type = other DNA
ccggggcaggttgagaggctggagtggg

SEQ ID NO: 23877 - DNA, 28 bp, synthetic construct
  source 1..28: mol_type = other DNA
ggctggagtgggtccctcagcgccctgg

SEQ ID NO: 23878 - DNA, 28 bp, synthetic construct
  source 1..28: mol_type = other DNA
gctggagtgggtccctcagcgccctggg

SEQ ID NO: 23879 - DNA, 28 bp, synthetic construct
  source 1..28: mol_type = other DNA
ggagtgggtccctcagcgccctgggtgg

SEQ ID NO: 23880 - DNA, 28 bp, synthetic construct
  source 1..28: mol_type = other DNA
gagtgggtccctcagcgccctgggtggg

SEQ ID NO: 23881 - DNA, 28 bp, synthetic construct
  source 1..28: mol_type = other DNA
tgggtccctcagcgccctgggtgggtgg

SEQ ID NO: 23882 - DNA, 28 bp, synthetic construct
  source 1..28: mol_type = other DNA
gggtccctcagcgccctgggtgggtggg

SEQ ID NO: 23883 - DNA, 28 bp, synthetic construct
  source 1..28: mol_type = other DNA
caggcccacccacccagggcgctgaggg

SEQ ID NO: 23884 - DNA, 28 bp, synthetic construct
  source 1..28: mol_type = other DNA
gcaggcccacccacccagggcgctgagg

SEQ ID NO: 23885 - DNA, 28 bp, synthetic construct
  source 1..28: mol_type = other DNA
gcgccctgggtgggtgggcctgcacagg

SEQ ID NO: 23886 - DNA, 28 bp, synthetic construct
  source 1..28: mol_type = other DNA
cgccctgggtgggtgggcctgcacaggg

SEQ ID NO: 23887 - DNA, 28 bp, synthetic construct
  source 1..28: mol_type = other DNA
gccctgggtgggtgggcctgcacagggg

SEQ ID NO: 23888 - DNA, 28 bp, synthetic construct
  source 1..28: mol_type = other DNA
ccctgggtgggtgggcctgcacaggggg

SEQ ID NO: 23889 - DNA, 28 bp, synthetic construct
  source 1..28: mol_type = other DNA
accccctgtgcaggcccacccacccagg

SEQ ID NO: 23890 - DNA, 28 bp, synthetic construct
  source 1..28: mol_type = other DNA
tcagagaaggaggtaccccctgtgcagg

SEQ ID NO: 23891 - DNA, 28 bp, synthetic construct
  source 1..28: mol_type = other DNA
tgcacagggggtacctccttctctgagg

SEQ ID NO: 23892 - DNA, 28 bp, synthetic construct
  source 1..28: mol_type = other DNA
gggggtacctccttctctgaggaactgg

SEQ ID NO: 23893 - DNA, 28 bp, synthetic construct
  source 1..28: mol_type = other DNA
ggggtacctccttctctgaggaactggg

SEQ ID NO: 23894 - DNA, 28 bp, synthetic construct
  source 1..28: mol_type = other DNA
taacagcccagttcctcagagaaggagg

SEQ ID NO: 23895 - DNA, 28 bp, synthetic construct
  source 1..28: mol_type = other DNA
tccttctctgaggaactgggctgttagg

SEQ ID NO: 23896 - DNA, 28 bp, synthetic construct
  source 1..28: mol_type = other DNA
ccttctctgaggaactgggctgttaggg

SEQ ID NO: 23897 - DNA, 28 bp, synthetic construct
  source 1..28: mol_type = other DNA
aactgggctgttagggattttccttagg

SEQ ID NO: 23898 - DNA, 28 bp, synthetic construct
  source 1..28: mol_type = other DNA
tgttagggattttccttaggccctttgg

SEQ ID NO: 23899 - DNA, 28 bp, synthetic construct
  source 1..28: mol_type = other DNA
ccttaggccctttggtttccgcctacgg

SEQ ID NO: 23900 - DNA, 28 bp, synthetic construct
  source 1..28: mol_type = other DNA
ggccctttggtttccgcctacggagagg

SEQ ID NO: 23901 - DNA, 28 bp, synthetic construct
  source 1..28: mol_type = other DNA
aacctctccgtaggcggaaaccaaaggg

SEQ ID NO: 23902 - DNA, 28 bp, synthetic construct
  source 1..28: mol_type = other DNA
aaacctctccgtaggcggaaaccaaagg

SEQ ID NO: 23903 - DNA, 28 bp, synthetic construct
  source 1..28: mol_type = other DNA
ccgcctacggagaggtttcccccattgg

SEQ ID NO: 23904 - DNA, 28 bp, synthetic construct
  source 1..28: mol_type = other DNA
caaccaatgggggaaacctctccgtagg

SEQ ID NO: 23905 - DNA, 28 bp, synthetic construct
  source 1..28: mol_type = other DNA
ctggctgaggaagagcaaccaatggggg

SEQ ID NO: 23906 - DNA, 28 bp, synthetic construct
  source 1..28: mol_type = other DNA
ccccattggttgctcttcctcagccagg

SEQ ID NO: 23907 - DNA, 28 bp, synthetic construct
  source 1..28: mol_type = other DNA
cccattggttgctcttcctcagccaggg

SEQ ID NO: 23908 - DNA, 28 bp, synthetic construct
  source 1..28: mol_type = other DNA
accctggctgaggaagagcaaccaatgg

SEQ ID NO: 23909 - DNA, 28 bp, synthetic construct
  source 1..28: mol_type = other DNA
ctcttcctcagccagggttacttcctgg

SEQ ID NO: 23910 - DNA, 28 bp, synthetic construct
  source 1..28: mol_type = other DNA
acagaccaggaagtaaccctggctgagg

SEQ ID NO: 23911 - DNA, 28 bp, synthetic construct
  source 1..28: mol_type = other DNA
aggggaacagaccaggaagtaaccctgg

SEQ ID NO: 23912 - DNA, 28 bp, synthetic construct
  source 1..28: mol_type = other DNA
ggggtattgggtaggggaacagaccagg

SEQ ID NO: 23913 - DNA, 28 bp, synthetic construct
  source 1..28: mol_type = other DNA
gacagagcggcggggtattgggtagggg

SEQ ID NO: 23914 - DNA, 28 bp, synthetic construct
  source 1..28: mol_type = other DNA
tgacagagcggcggggtattgggtaggg

SEQ ID NO: 23915 - DNA, 28 bp, synthetic construct
  source 1..28: mol_type = other DNA
ctgacagagcggcggggtattgggtagg

SEQ ID NO: 23916 - DNA, 28 bp, synthetic construct
  source 1..28: mol_type = other DNA
caagctgacagagcggcggggtattggg

SEQ ID NO: 23917 - DNA, 28 bp, synthetic construct
  source 1..28: mol_type = other DNA
tcaagctgacagagcggcggggtattgg

SEQ ID NO: 23918 - DNA, 28 bp, synthetic construct
  source 1..28: mol_type = other DNA
tggagctcaagctgacagagcggcgggg

SEQ ID NO: 23919 - DNA, 28 bp, synthetic construct
  source 1..28: mol_type = other DNA
ctggagctcaagctgacagagcggcggg

SEQ ID NO: 23920 - DNA, 28 bp, synthetic construct
  source 1..28: mol_type = other DNA
ccgccgctctgtcagcttgagctccagg

SEQ ID NO: 23921 - DNA, 28 bp, synthetic construct
  source 1..28: mol_type = other DNA
ccgctctgtcagcttgagctccaggtgg

SEQ ID NO: 23922 - DNA, 28 bp, synthetic construct
  source 1..28: mol_type = other DNA
cagcttgagctccaggtggagctccagg

SEQ ID NO: 23923 - DNA, 28 bp, synthetic construct
  source 1..28: mol_type = other DNA
cttgagctccaggtggagctccaggtgg

SEQ ID NO: 23924 - DNA, 28 bp, synthetic construct
  source 1..28: mol_type = other DNA
aggaggagccacctggagctccacctgg

SEQ ID NO: 23925 - DNA, 28 bp, synthetic construct
  source 1..28: mol_type = other DNA
gagctccaggtggctcctcctctcccgg

SEQ ID NO: 23926 - DNA, 28 bp, synthetic construct
  source 1..28: mol_type = other DNA
agctccaggtggctcctcctctcccggg

SEQ ID NO: 23927 - DNA, 28 bp, synthetic construct
  source 1..28: mol_type = other DNA
gctccaggtggctcctcctctcccgggg

SEQ ID NO: 23928 - DNA, 28 bp, synthetic construct
  source 1..28: mol_type = other DNA
ctccaggtggctcctcctctcccggggg

SEQ ID NO: 23929 - DNA, 28 bp, synthetic construct
  source 1..28: mol_type = other DNA
ttcccccgggagaggaggagccacctgg

SEQ ID NO: 23930 - DNA, 28 bp, synthetic construct
  source 1..28: mol_type = other DNA
aggtggctcctcctctcccgggggaagg

SEQ ID NO: 23931 - DNA, 28 bp, synthetic construct
  source 1..28: mol_type = other DNA
tggctcctcctctcccgggggaaggcgg

SEQ ID NO: 23932 - DNA, 28 bp, synthetic construct
  source 1..28: mol_type = other DNA
cagggccgccttcccccgggagaggagg

SEQ ID NO: 23933 - DNA, 28 bp, synthetic construct
  source 1..28: mol_type = other DNA
ctcctctcccgggggaaggcggccctgg

SEQ ID NO: 23934 - DNA, 28 bp, synthetic construct
  source 1..28: mol_type = other DNA
gtccagggccgccttcccccgggagagg

SEQ ID NO: 23935 - DNA, 28 bp, synthetic construct
  source 1..28: mol_type = other DNA
tgctggtccagggccgccttcccccggg

SEQ ID NO: 23936 - DNA, 28 bp, synthetic construct
  source 1..28: mol_type = other DNA
ctgctggtccagggccgccttcccccgg

SEQ ID NO: 23937 - DNA, 28 bp, synthetic construct
  source 1..28: mol_type = other DNA
cgggggaaggcggccctggaccagcagg

SEQ ID NO: 23938 - DNA, 28 bp, synthetic construct
  source 1..28: mol_type = other DNA
gggaaggcggccctggaccagcaggcgg

SEQ ID NO: 23939 - DNA, 28 bp, synthetic construct
  source 1..28: mol_type = other DNA
ggaaggcggccctggaccagcaggcggg

SEQ ID NO: 23940 - DNA, 28 bp, synthetic construct
  source 1..28: mol_type = other DNA
tacagcaggcccgcctgctggtccaggg

SEQ ID NO: 23941 - DNA, 28 bp, synthetic construct
  source 1..28: mol_type = other DNA
gtacagcaggcccgcctgctggtccagg

SEQ ID NO: 23942 - DNA, 28 bp, synthetic construct
  source 1..28: mol_type = other DNA
gcgggagtacagcaggcccgcctgctgg

SEQ ID NO: 23943 - DNA, 28 bp, synthetic construct
  source 1..28: mol_type = other DNA
aggcgggcctgctgtactcccgctttgg

SEQ ID NO: 23944 - DNA, 28 bp, synthetic construct
  source 1..28: mol_type = other DNA
ggcgggcctgctgtactcccgctttggg

SEQ ID NO: 23945 - DNA, 28 bp, synthetic construct
  source 1..28: mol_type = other DNA
gcgggcctgctgtactcccgctttgggg

SEQ ID NO: 23946 - DNA, 28 bp, synthetic construct
  source 1..28: mol_type = other DNA
tgcagccccaaagcgggagtacagcagg

SEQ ID NO: 23947 - DNA, 28 bp, synthetic construct
  source 1..28: mol_type = other DNA
tgctgtactcccgctttggggctgcagg

SEQ ID NO: 23948 - DNA, 28 bp, synthetic construct
  source 1..28: mol_type = other DNA
gctgtactcccgctttggggctgcaggg

SEQ ID NO: 23949 - DNA, 28 bp, synthetic construct
  source 1..28: mol_type = other DNA
tcccgctttggggctgcagggaagctgg

SEQ ID NO: 23950 - DNA, 28 bp, synthetic construct
  source 1..28: mol_type = other DNA
gccagcttccctgcagccccaaagcggg

SEQ ID NO: 23951 - DNA, 28 bp, synthetic construct
  source 1..28: mol_type = other DNA
ggccagcttccctgcagccccaaagcgg

SEQ ID NO: 23952 - DNA, 28 bp, synthetic construct
  source 1..28: mol_type = other DNA
ggggctgcagggaagctggccgctgtgg

SEQ ID NO: 23953 - DNA, 28 bp, synthetic construct
  source 1..28: mol_type = other DNA
gggctgcagggaagctggccgctgtggg

SEQ ID NO: 23954 - DNA, 28 bp, synthetic construct
  source 1..28: mol_type = other DNA
ctgcagggaagctggccgctgtgggcgg

SEQ ID NO: 23955 - DNA, 28 bp, synthetic construct
  source 1..28: mol_type = other DNA
ggaagctggccgctgtgggcggtctcgg

SEQ ID NO: 23956 - DNA, 28 bp, synthetic construct
  source 1..28: mol_type = other DNA
gaagctggccgctgtgggcggtctcggg

SEQ ID NO: 23957 - DNA, 28 bp, synthetic construct
  source 1..28: mol_type = other DNA
ggggctggcccgagaccgcccacagcgg

SEQ ID NO: 23958 - DNA, 28 bp, synthetic construct
  source 1..28: mol_type = other DNA
aggaaaaggacaggtggggcggggctgg

SEQ ID NO: 23959 - DNA, 28 bp, synthetic construct
  source 1..28: mol_type = other DNA
agccccgccccacctgtccttttcctgg

SEQ ID NO: 23960 - DNA, 28 bp, synthetic construct
  source 1..28: mol_type = other DNA
ctccaggaaaaggacaggtggggcgggg

SEQ ID NO: 23961 - DNA, 28 bp, synthetic construct
  source 1..28: mol_type = other DNA
tctccaggaaaaggacaggtggggcggg

SEQ ID NO: 23962 - DNA, 28 bp, synthetic construct
  source 1..28: mol_type = other DNA
gtctccaggaaaaggacaggtggggcgg

SEQ ID NO: 23963 - DNA, 28 bp, synthetic construct
  source 1..28: mol_type = other DNA
atagtctccaggaaaaggacaggtgggg

SEQ ID NO: 23964 - DNA, 28 bp, synthetic construct
  source 1..28: mol_type = other DNA
aatagtctccaggaaaaggacaggtggg

SEQ ID NO: 23965 - DNA, 28 bp, synthetic construct
  source 1..28: mol_type = other DNA
taatagtctccaggaaaaggacaggtgg

SEQ ID NO: 23966 - DNA, 28 bp, synthetic construct
  source 1..28: mol_type = other DNA
gactaatagtctccaggaaaaggacagg

SEQ ID NO: 23967 - DNA, 28 bp, synthetic construct
  source 1..28: mol_type = other DNA
tccttttcctggagactattagtccagg

SEQ ID NO: 23968 - DNA, 28 bp, synthetic construct
  source 1..28: mol_type = other DNA
ccttttcctggagactattagtccaggg

SEQ ID NO: 23969 - DNA, 28 bp, synthetic construct
  source 1..28: mol_type = other DNA
gacaaaccctggactaatagtctccagg

SEQ ID NO: 23970 - DNA, 28 bp, synthetic construct
  source 1..28: mol_type = other DNA
ccagggtttgtccctgcagtgccattgg

SEQ ID NO: 23971 - DNA, 28 bp, synthetic construct
  source 1..28: mol_type = other DNA
gtttgtccctgcagtgccattggcctgg

SEQ ID NO: 23972 - DNA, 28 bp, synthetic construct
  source 1..28: mol_type = other DNA
gtccctgcagtgccattggcctggcagg

SEQ ID NO: 23973 - DNA, 28 bp, synthetic construct
  source 1..28: mol_type = other DNA
tgcctgccaggccaatggcactgcaggg

SEQ ID NO: 23974 - DNA, 28 bp, synthetic construct
  source 1..28: mol_type = other DNA
ctgcctgccaggccaatggcactgcagg

SEQ ID NO: 23975 - DNA, 28 bp, synthetic construct
  source 1..28: mol_type = other DNA
ctgcagtgccattggcctggcaggcagg

SEQ ID NO: 23976 - DNA, 28 bp, synthetic construct
  source 1..28: mol_type = other DNA
gccattggcctggcaggcaggatcgagg

SEQ ID NO: 23977 - DNA, 28 bp, synthetic construct
  source 1..28: mol_type = other DNA
tcctcgatcctgcctgccaggccaatgg

SEQ ID NO: 23978 - DNA, 28 bp, synthetic construct
  source 1..28: mol_type = other DNA
attggcctggcaggcaggatcgaggagg

SEQ ID NO: 23979 - DNA, 28 bp, synthetic construct
  source 1..28: mol_type = other DNA
cacttcctcctcgatcctgcctgccagg

SEQ ID NO: 23980 - DNA, 28 bp, synthetic construct
  source 1..28: mol_type = other DNA
ctggcaggcaggatcgaggaggaagtgg

SEQ ID NO: 23981 - DNA, 28 bp, synthetic construct
  source 1..28: mol_type = other DNA
gaggaggaagtggctgattactgagcgg

SEQ ID NO: 23982 - DNA, 28 bp, synthetic construct
  source 1..28: mol_type = other DNA
gattactgagcggttcttcctcacctgg

SEQ ID NO: 23983 - DNA, 28 bp, synthetic construct
  source 1..28: mol_type = other DNA
ctgagcggttcttcctcacctggcttgg

SEQ ID NO: 23984 - DNA, 28 bp, synthetic construct
  source 1..28: mol_type = other DNA
tgagcggttcttcctcacctggcttggg

SEQ ID NO: 23985 - DNA, 28 bp, synthetic construct
  source 1..28: mol_type = other DNA
tgtgcacagtggcccaagccaggtgagg

SEQ ID NO: 23986 - DNA, 28 bp, synthetic construct
  source 1..28: mol_type = other DNA
acagctgtgcacagtggcccaagccagg

SEQ ID NO: 23987 - DNA, 28 bp, synthetic construct
  source 1..28: mol_type = other DNA
gggccactgtgcacagctgtgccgctgg

SEQ ID NO: 23988 - DNA, 28 bp, synthetic construct
  source 1..28: mol_type = other DNA
gagccagcggcacagctgtgcacagtgg

SEQ ID NO: 23989 - DNA, 28 bp, synthetic construct
  source 1..28: mol_type = other DNA
gccgctggctcagccccgccccctgcgg

SEQ ID NO: 23990 - DNA, 28 bp, synthetic construct
  source 1..28: mol_type = other DNA
gccgcagggggcggggctgagccagcgg

SEQ ID NO: 23991 - DNA, 28 bp, synthetic construct
  source 1..28: mol_type = other DNA
ccccgccccctgcggccctctgccgtgg

SEQ ID NO: 23992 - DNA, 28 bp, synthetic construct
  source 1..28: mol_type = other DNA
gccacggcagagggccgcagggggcggg

SEQ ID NO: 23993 - DNA, 28 bp, synthetic construct
  source 1..28: mol_type = other DNA
agccacggcagagggccgcagggggcgg

SEQ ID NO: 23994 - DNA, 28 bp, synthetic construct
  source 1..28: mol_type = other DNA
ggaagccacggcagagggccgcaggggg

SEQ ID NO: 23995 - DNA, 28 bp, synthetic construct
  source 1..28: mol_type = other DNA
gggaagccacggcagagggccgcagggg

SEQ ID NO: 23996 - DNA, 28 bp, synthetic construct
  source 1..28: mol_type = other DNA
ggggaagccacggcagagggccgcaggg

SEQ ID NO: 23997 - DNA, 28 bp, synthetic construct
  source 1..28: mol_type = other DNA
gggggaagccacggcagagggccgcagg

SEQ ID NO: 23998 - DNA, 28 bp, synthetic construct
  source 1..28: mol_type = other DNA
gtagggagggggaagccacggcagaggg

SEQ ID NO: 23999 - DNA, 28 bp, synthetic construct
  source 1..28: mol_type = other DNA
tgtagggagggggaagccacggcagagg

SEQ ID NO: 24000 - DNA, 28 bp, synthetic construct
  source 1..28: mol_type = other DNA
tctctctgtagggagggggaagccacgg

SEQ ID NO: 24001 - DNA, 28 bp, synthetic construct
  source 1..28: mol_type = other DNA
gggacagcatctctctgtagggaggggg

SEQ ID NO: 24002 - DNA, 28 bp, synthetic construct
  source 1..28: mol_type = other DNA
cgggacagcatctctctgtagggagggg

SEQ ID NO: 24003 - DNA, 28 bp, synthetic construct
  source 1..28: mol_type = other DNA
acgggacagcatctctctgtagggaggg

SEQ ID NO: 24004 - DNA, 28 bp, synthetic construct
  source 1..28: mol_type = other DNA
cacgggacagcatctctctgtagggagg

SEQ ID NO: 24005 - DNA, 28 bp, synthetic construct
  source 1..28: mol_type = other DNA
ctccctacagagagatgctgtcccgtgg

SEQ ID NO: 24006 - DNA, 28 bp, synthetic construct
  source 1..28: mol_type = other DNA
tccctacagagagatgctgtcccgtggg

SEQ ID NO: 24007 - DNA, 28 bp, synthetic construct
  source 1..28: mol_type = other DNA
acccacgggacagcatctctctgtaggg

SEQ ID NO: 24008 - DNA, 28 bp, synthetic construct
  source 1..28: mol_type = other DNA
tacccacgggacagcatctctctgtagg

SEQ ID NO: 24009 - DNA, 28 bp, synthetic construct
  source 1..28: mol_type = other DNA
gagatgctgtcccgtgggtaagtcccgg

SEQ ID NO: 24010 - DNA, 28 bp, synthetic construct
  source 1..28: mol_type = other DNA
agatgctgtcccgtgggtaagtcccggg

SEQ ID NO: 24011 - DNA, 28 bp, synthetic construct
  source 1..28: mol_type = other DNA
cccgtgggtaagtcccgggcaccatcgg

SEQ ID NO: 24012 - DNA, 28 bp, synthetic construct
  source 1..28: mol_type = other DNA
ccgtgggtaagtcccgggcaccatcggg

SEQ ID NO: 24013 - DNA, 28 bp, synthetic construct
  source 1..28: mol_type = other DNA
cgtgggtaagtcccgggcaccatcgggg

SEQ ID NO: 24014 - DNA, 28 bp, synthetic construct
  source 1..28: mol_type = other DNA
ctggcctggggcagccggcagggcgggg

SEQ ID NO: 24015 - DNA, 28 bp, synthetic construct
  source 1..28: mol_type = other DNA
actggcctggggcagccggcagggcggg

SEQ ID NO: 24016 - DNA, 28 bp, synthetic construct
  source 1..28: mol_type = other DNA
cactggcctggggcagccggcagggcgg

SEQ ID NO: 24017 - DNA, 28 bp, synthetic construct
  source 1..28: mol_type = other DNA
cgccctgccggctgccccaggccagtgg

SEQ ID NO: 24018 - DNA, 28 bp, synthetic construct
  source 1..28: mol_type = other DNA
ctccactggcctggggcagccggcaggg

SEQ ID NO: 24019 - DNA, 28 bp, synthetic construct
  source 1..28: mol_type = other DNA
actccactggcctggggcagccggcagg

SEQ ID NO: 24020 - DNA, 28 bp, synthetic construct
  source 1..28: mol_type = other DNA
tgccggctgccccaggccagtggagtgg

SEQ ID NO: 24021 - DNA, 28 bp, synthetic construct
  source 1..28: mol_type = other DNA
tgccactccactggcctggggcagccgg

SEQ ID NO: 24022 - DNA, 28 bp, synthetic construct
  source 1..28: mol_type = other DNA
ctggggctgccactccactggcctgggg

SEQ ID NO: 24023 - DNA, 28 bp, synthetic construct
  source 1..28: mol_type = other DNA
tctggggctgccactccactggcctggg

SEQ ID NO: 24024 - DNA, 28 bp, synthetic construct
  source 1..28: mol_type = other DNA
ttctggggctgccactccactggcctgg

SEQ ID NO: 24025 - DNA, 28 bp, synthetic construct
  source 1..28: mol_type = other DNA
gccagtggagtggcagccccagaactgg

SEQ ID NO: 24026 - DNA, 28 bp, synthetic construct
  source 1..28: mol_type = other DNA
ccagtggagtggcagccccagaactggg

SEQ ID NO: 24027 - DNA, 28 bp, synthetic construct
  source 1..28: mol_type = other DNA
gtggcagccccagaactgggaccaccgg

SEQ ID NO: 24028 - DNA, 28 bp, synthetic construct
  source 1..28: mol_type = other DNA
tggcagccccagaactgggaccaccggg

SEQ ID NO: 24029 - DNA, 28 bp, synthetic construct
  source 1..28: mol_type = other DNA
ggcagccccagaactgggaccaccgggg

SEQ ID NO: 24030 - DNA, 28 bp, synthetic construct
  source 1..28: mol_type = other DNA
gcagccccagaactgggaccaccggggg

SEQ ID NO: 24031 - DNA, 28 bp, synthetic construct
  source 1..28: mol_type = other DNA
gccccagaactgggaccaccgggggtgg

SEQ ID NO: 24032 - DNA, 28 bp, synthetic construct
  source 1..28: mol_type = other DNA
accacccccggtggtcccagttctgggg

SEQ ID NO: 24033 - DNA, 28 bp, synthetic construct
  source 1..28: mol_type = other DNA
caccacccccggtggtcccagttctggg

SEQ ID NO: 24034 - DNA, 28 bp, synthetic construct
  source 1..28: mol_type = other DNA
tcaccacccccggtggtcccagttctgg

SEQ ID NO: 24035 - DNA, 28 bp, synthetic construct
  source 1..28: mol_type = other DNA
agaactgggaccaccgggggtggtgagg

SEQ ID NO: 24036 - DNA, 28 bp, synthetic construct
  source 1..28: mol_type = other DNA
actgggaccaccgggggtggtgaggcgg

SEQ ID NO: 24037 - DNA, 28 bp, synthetic construct
  source 1..28: mol_type = other DNA
gaccaccgggggtggtgaggcggcccgg

SEQ ID NO: 24038 - DNA, 28 bp, synthetic construct
  source 1..28: mol_type = other DNA
tgccgggccgcctcaccacccccggtgg

SEQ ID NO: 24039 - DNA, 28 bp, synthetic construct
  source 1..28: mol_type = other DNA
cagtgccgggccgcctcaccacccccgg

SEQ ID NO: 24040 - DNA, 28 bp, synthetic construct
  source 1..28: mol_type = other DNA
cgggggtggtgaggcggcccggcactgg

SEQ ID NO: 24041 - DNA, 28 bp, synthetic construct
  source 1..28: mol_type = other DNA
gggggtggtgaggcggcccggcactggg

SEQ ID NO: 24042 - DNA, 28 bp, synthetic construct
  source 1..28: mol_type = other DNA
ggcccggcactgggagctgcatctgagg

SEQ ID NO: 24043 - DNA, 28 bp, synthetic construct
  source 1..28: mol_type = other DNA
agcctcagatgcagctcccagtgccggg

SEQ ID NO: 24044 - DNA, 28 bp, synthetic construct
  source 1..28: mol_type = other DNA
aagcctcagatgcagctcccagtgccgg

SEQ ID NO: 24045 - DNA, 28 bp, synthetic construct
  source 1..28: mol_type = other DNA
ctagtctgggcaggcagagagctcaggg

SEQ ID NO: 24046 - DNA, 28 bp, synthetic construct
  source 1..28: mol_type = other DNA
gctagtctgggcaggcagagagctcagg

SEQ ID NO: 24047 - DNA, 28 bp, synthetic construct
  source 1..28: mol_type = other DNA
atgaggaggtgcagctagtctgggcagg

SEQ ID NO: 24048 - DNA, 28 bp, synthetic construct
  source 1..28: mol_type = other DNA
gggaatgaggaggtgcagctagtctggg

SEQ ID NO: 24049 - DNA, 28 bp, synthetic construct
  source 1..28: mol_type = other DNA
agggaatgaggaggtgcagctagtctgg

SEQ ID NO: 24050 - DNA, 28 bp, synthetic construct
  source 1..28: mol_type = other DNA
gaggaagggggcgcagggaatgaggagg

SEQ ID NO: 24051 - DNA, 28 bp, synthetic construct
  source 1..28: mol_type = other DNA
ggagaggaagggggcgcagggaatgagg

SEQ ID NO: 24052 - DNA, 28 bp, synthetic construct
  source 1..28: mol_type = other DNA
tcattccctgcgcccccttcctctccgg

SEQ ID NO: 24053 - DNA, 28 bp, synthetic construct
  source 1..28: mol_type = other DNA
ggcttccggagaggaagggggcgcaggg

SEQ ID NO: 24054 - DNA, 28 bp, synthetic construct
  source 1..28: mol_type = other DNA
gggcttccggagaggaagggggcgcagg

SEQ ID NO: 24055 - DNA, 28 bp, synthetic construct
  source 1..28: mol_type = other DNA
gcccccttcctctccggaagcccccagg

SEQ ID NO: 24056 - DNA, 28 bp, synthetic construct
  source 1..28: mol_type = other DNA
tcctgggggcttccggagaggaaggggg

SEQ ID NO: 24057 - DNA, 28 bp, synthetic construct
  source 1..28: mol_type = other DNA
atcctgggggcttccggagaggaagggg

SEQ ID NO: 24058 - DNA, 28 bp, synthetic construct
  source 1..28: mol_type = other DNA
catcctgggggcttccggagaggaaggg

SEQ ID NO: 24059 - DNA, 28 bp, synthetic construct
  source 1..28: mol_type = other DNA
ccttcctctccggaagcccccaggatgg

SEQ ID NO: 24060 - DNA, 28 bp, synthetic construct
  source 1..28: mol_type = other DNA
ctcaccatcctgggggcttccggagagg

SEQ ID NO: 24061 - DNA, 28 bp, synthetic construct
  source 1..28: mol_type = other DNA
ctctccggaagcccccaggatggtgagg

SEQ ID NO: 24062 - DNA, 28 bp, synthetic construct
  source 1..28: mol_type = other DNA
cttacctcaccatcctgggggcttccgg

SEQ ID NO: 24063 - DNA, 28 bp, synthetic construct
  source 1..28: mol_type = other DNA
cggaagcccccaggatggtgaggtaagg

SEQ ID NO: 24064 - DNA, 28 bp, synthetic construct
  source 1..28: mol_type = other DNA
ggaagcccccaggatggtgaggtaaggg

SEQ ID NO: 24065 - DNA, 28 bp, synthetic construct
  source 1..28: mol_type = other DNA
gcaggcccttacctcaccatcctggggg

SEQ ID NO: 24066 - DNA, 28 bp, synthetic construct
  source 1..28: mol_type = other DNA
ggcaggcccttacctcaccatcctgggg

SEQ ID NO: 24067 - DNA, 28 bp, synthetic construct
  source 1..28: mol_type = other DNA
tggcaggcccttacctcaccatcctggg

SEQ ID NO: 24068 - DNA, 28 bp, synthetic construct
  source 1..28: mol_type = other DNA
gtggcaggcccttacctcaccatcctgg

SEQ ID NO: 24069 - DNA, 28 bp, synthetic construct
  source 1..28: mol_type = other DNA
tggtgaggtaagggcctgccacccacgg

SEQ ID NO: 24070 - DNA, 28 bp, synthetic construct
  source 1..28: mol_type = other DNA
cctcactgccctgcctgggccgcccagg

SEQ ID NO: 24071 - DNA, 28 bp, synthetic construct
  source 1..28: mol_type = other DNA
cactgccctgcctgggccgcccaggtgg

SEQ ID NO: 24072 - DNA, 28 bp, synthetic construct
  source 1..28: mol_type = other DNA
tgaaaccacctgggcggcccaggcaggg

SEQ ID NO: 24073 - DNA, 28 bp, synthetic construct
  source 1..28: mol_type = other DNA
gtgaaaccacctgggcggcccaggcagg

SEQ ID NO: 24074 - DNA, 28 bp, synthetic construct
  source 1..28: mol_type = other DNA
ctcggtgaaaccacctgggcggcccagg

SEQ ID NO: 24075 - DNA, 28 bp, synthetic construct
  source 1..28: mol_type = other DNA
tgaggtctcggtgaaaccacctgggcgg

SEQ ID NO: 24076 - DNA, 28 bp, synthetic construct
  source 1..28: mol_type = other DNA
cactgaggtctcggtgaaaccacctggg

SEQ ID NO: 24077 - DNA, 28 bp, synthetic construct
  source 1..28: mol_type = other DNA
ccaggtggtttcaccgagacctcagtgg

SEQ ID NO: 24078 - DNA, 28 bp, synthetic construct
  source 1..28: mol_type = other DNA
caggtggtttcaccgagacctcagtggg

SEQ ID NO: 24079 - DNA, 28 bp, synthetic construct
  source 1..28: mol_type = other DNA
tggtttcaccgagacctcagtgggctgg

SEQ ID NO: 24080 - DNA, 28 bp, synthetic construct
  source 1..28: mol_type = other DNA
ctctgcatccagcccactgaggtctcgg

SEQ ID NO: 24081 - DNA, 28 bp, synthetic construct
  source 1..28: mol_type = other DNA
cagggtctctgcatccagcccactgagg

SEQ ID NO: 24082 - DNA, 28 bp, synthetic construct
  source 1..28: mol_type = other DNA
gggctggatgcagagaccctgctcaagg

SEQ ID NO: 24083 - DNA, 28 bp, synthetic construct
  source 1..28: mol_type = other DNA
ggctggatgcagagaccctgctcaaggg

SEQ ID NO: 24084 - DNA, 28 bp, synthetic construct
  source 1..28: mol_type = other DNA
atgcagagaccctgctcaagggccgagg

SEQ ID NO: 24085 - DNA, 28 bp, synthetic construct
  source 1..28: mol_type = other DNA
ccctgctcaagggccgaggtgtccacgg

SEQ ID NO: 24086 - DNA, 28 bp, synthetic construct
  source 1..28: mol_type = other DNA
accgtggacacctcggcccttgagcagg

SEQ ID NO: 24087 - DNA, 28 bp, synthetic construct
  source 1..28: mol_type = other DNA
ggccgaggtgtccacggtagcttcctgg

SEQ ID NO: 24088 - DNA, 28 bp, synthetic construct
  source 1..28: mol_type = other DNA
agccaggaagctaccgtggacacctcgg

SEQ ID NO: 24089 - DNA, 28 bp, synthetic construct
  source 1..28: mol_type = other DNA
aggtgtccacggtagcttcctggctcgg

SEQ ID NO: 24090 - DNA, 28 bp, synthetic construct
  source 1..28: mol_type = other DNA
actgggccgagccaggaagctaccgtgg

SEQ ID NO: 24091 - DNA, 28 bp, synthetic construct
  source 1..28: mol_type = other DNA
ctggttcttgcgactgggccgagccagg

SEQ ID NO: 24092 - DNA, 28 bp, synthetic construct
  source 1..28: mol_type = other DNA
ctggctcggcccagtcgcaagaaccagg

SEQ ID NO: 24093 - DNA, 28 bp, synthetic construct
  source 1..28: mol_type = other DNA
tggctcggcccagtcgcaagaaccaggg

SEQ ID NO: 24094 - DNA, 28 bp, synthetic construct
  source 1..28: mol_type = other DNA
agaagtcaccctggttcttgcgactggg

SEQ ID NO: 24095 - DNA, 28 bp, synthetic construct
  source 1..28: mol_type = other DNA
gagaagtcaccctggttcttgcgactgg

SEQ ID NO: 24096 - DNA, 28 bp, synthetic construct
  source 1..28: mol_type = other DNA
ccagggtgacttctcgctctccgtcagg

SEQ ID NO: 24097 - DNA, 28 bp, synthetic construct
  source 1..28: mol_type = other DNA
ggtgacttctcgctctccgtcaggtagg

SEQ ID NO: 24098 - DNA, 28 bp, synthetic construct
  source 1..28: mol_type = other DNA
gacttctcgctctccgtcaggtaggtgg

SEQ ID NO: 24099 - DNA, 28 bp, synthetic construct
  source 1..28: mol_type = other DNA
acttctcgctctccgtcaggtaggtggg

SEQ ID NO: 24100 - DNA, 28 bp, synthetic construct
  source 1..28: mol_type = other DNA
ggttgcggggggcccacctacctgacgg

SEQ ID NO: 24101 - DNA, 28 bp, synthetic construct
  source 1..28: mol_type = other DNA
caggtaggtgggccccccgcaaccccgg

SEQ ID NO: 24102 - DNA, 28 bp, synthetic construct
  source 1..28: mol_type = other DNA
aggtaggtgggccccccgcaaccccggg

SEQ ID NO: 24103 - DNA, 28 bp, synthetic construct
  source 1..28: mol_type = other DNA
ctggcctcaccgcctggtgccctgcagg

SEQ ID NO: 24104 - DNA, 28 bp, synthetic construct
  source 1..28: mol_type = other DNA
tggcctcaccgcctggtgccctgcaggg

SEQ ID NO: 24105 - DNA, 28 bp, synthetic construct
  source 1..28: mol_type = other DNA
cctcaccgcctggtgccctgcagggtgg

SEQ ID NO: 24106 - DNA, 28 bp, synthetic construct
  source 1..28: mol_type = other DNA
ctcaccgcctggtgccctgcagggtggg

SEQ ID NO: 24107 - DNA, 28 bp, synthetic construct
  source 1..28: mol_type = other DNA
tcaccgcctggtgccctgcagggtgggg

SEQ ID NO: 24108 - DNA, 28 bp, synthetic construct
  source 1..28: mol_type = other DNA
caccgcctggtgccctgcagggtggggg

SEQ ID NO: 24109 - DNA, 28 bp, synthetic construct
  source 1..28: mol_type = other DNA
atcccccaccctgcagggcaccaggcgg

SEQ ID NO: 24110 - DNA, 28 bp, synthetic construct
  source 1..28: mol_type = other DNA
ctgatcccccaccctgcagggcaccagg

SEQ ID NO: 24111 - DNA, 28 bp, synthetic construct
  source 1..28: mol_type = other DNA
ctggtgccctgcagggtgggggatcagg

SEQ ID NO: 24112 - DNA, 28 bp, synthetic construct
  source 1..28: mol_type = other DNA
gggtcacctgatcccccaccctgcaggg

SEQ ID NO: 24113 - DNA, 28 bp, synthetic construct
  source 1..28: mol_type = other DNA
tgggtcacctgatcccccaccctgcagg

SEQ ID NO: 24114 - DNA, 28 bp, synthetic construct
  source 1..28: mol_type = other DNA
ggtgggggatcaggtgacccatattcgg

SEQ ID NO: 24115 - DNA, 28 bp, synthetic construct
  source 1..28: mol_type = other DNA
tgacccatattcggatccagaactcagg

SEQ ID NO: 24116 - DNA, 28 bp, synthetic construct
  source 1..28: mol_type = other DNA
gacccatattcggatccagaactcaggg

SEQ ID NO: 24117 - DNA, 28 bp, synthetic construct
  source 1..28: mol_type = other DNA
acccatattcggatccagaactcagggg

SEQ ID NO: 24118 - DNA, 28 bp, synthetic construct
  source 1..28: mol_type = other DNA
tcccctgagttctggatccgaatatggg

SEQ ID NO: 24119 - DNA, 28 bp, synthetic construct
  source 1..28: mol_type = other DNA
atcccctgagttctggatccgaatatgg

SEQ ID NO: 24120 - DNA, 28 bp, synthetic construct
  source 1..28: mol_type = other DNA
caggtcatagaaatcccctgagttctgg

SEQ ID NO: 24121 - DNA, 28 bp, synthetic construct
  source 1..28: mol_type = other DNA
actcaggggatttctatgacctgtatgg

SEQ ID NO: 24122 - DNA, 28 bp, synthetic construct
  source 1..28: mol_type = other DNA
caggggatttctatgacctgtatggagg

SEQ ID NO: 24123 - DNA, 28 bp, synthetic construct
  source 1..28: mol_type = other DNA
aggggatttctatgacctgtatggaggg

SEQ ID NO: 24124 - DNA, 28 bp, synthetic construct
  source 1..28: mol_type = other DNA
ggggatttctatgacctgtatggagggg

SEQ ID NO: 24125 - DNA, 28 bp, synthetic construct
  source 1..28: mol_type = other DNA
agtcgcaaacttctcccctccatacagg

SEQ ID NO: 24126 - DNA, 28 bp, synthetic construct
  source 1..28: mol_type = other DNA
gagaagtttgcgactctgacagagctgg

SEQ ID NO: 24127 - DNA, 28 bp, synthetic construct
  source 1..28: mol_type = other DNA
aagtttgcgactctgacagagctggtgg

SEQ ID NO: 24128 - DNA, 28 bp, synthetic construct
  source 1..28: mol_type = other DNA
ctggtggagtactacactcagcagcagg

SEQ ID NO: 24129 - DNA, 28 bp, synthetic construct
  source 1..28: mol_type = other DNA
tggtggagtactacactcagcagcaggg

SEQ ID NO: 24130 - DNA, 28 bp, synthetic construct
  source 1..28: mol_type = other DNA
tacactcagcagcagggtgtcctgcagg

SEQ ID NO: 24131 - DNA, 28 bp, synthetic construct
  source 1..28: mol_type = other DNA
agcagggtgtcctgcaggaccgcgacgg

SEQ ID NO: 24132 - DNA, 28 bp, synthetic construct
  source 1..28: mol_type = other DNA
gatgatggtgccgtcgcggtcctgcagg

SEQ ID NO: 24133 - DNA, 28 bp, synthetic construct
  source 1..28: mol_type = other DNA
cttgaggtggatgatggtgccgtcgcgg

SEQ ID NO: 24134 - DNA, 28 bp, synthetic construct
  source 1..28: mol_type = other DNA
ttcagcgggtacttgaggtggatgatgg

SEQ ID NO: 24135 - DNA, 28 bp, synthetic construct
  source 1..28: mol_type = other DNA
ggagcagttcagcgggtacttgaggtgg

SEQ ID NO: 24136 - DNA, 28 bp, synthetic construct
  source 1..28: mol_type = other DNA
atcggagcagttcagcgggtacttgagg

SEQ ID NO: 24137 - DNA, 28 bp, synthetic construct
  source 1..28: mol_type = other DNA
actagtgggatcggagcagttcagcggg

SEQ ID NO: 24138 - DNA, 28 bp, synthetic construct
  source 1..28: mol_type = other DNA
cactagtgggatcggagcagttcagcgg

SEQ ID NO: 24139 - DNA, 28 bp, synthetic construct
  source 1..28: mol_type = other DNA
gaactgctccgatcccactagtgagagg

SEQ ID NO: 24140 - DNA, 28 bp, synthetic construct
  source 1..28: mol_type = other DNA
gctccgatcccactagtgagaggtgagg

SEQ ID NO: 24141 - DNA, 28 bp, synthetic construct
  source 1..28: mol_type = other DNA
ctccgatcccactagtgagaggtgaggg

SEQ ID NO: 24142 - DNA, 28 bp, synthetic construct
  source 1..28: mol_type = other DNA
agccctcacctctcactagtgggatcgg

SEQ ID NO: 24143 - DNA, 28 bp, synthetic construct
  source 1..28: mol_type = other DNA
tgcggagccctcacctctcactagtggg

SEQ ID NO: 24144 - DNA, 28 bp, synthetic construct
  source 1..28: mol_type = other DNA
gtgcggagccctcacctctcactagtgg

SEQ ID NO: 24145 - DNA, 28 bp, synthetic construct
  source 1..28: mol_type = other DNA
taccttccctgacgctgccttctctagg

SEQ ID NO: 24146 - DNA, 28 bp, synthetic construct
  source 1..28: mol_type = other DNA
cacctagagaaggcagcgtcagggaagg

SEQ ID NO: 24147 - DNA, 28 bp, synthetic construct
  source 1..28: mol_type = other DNA
cttccctgacgctgccttctctaggtgg

SEQ ID NO: 24148 - DNA, 28 bp, synthetic construct
  source 1..28: mol_type = other DNA
gtaccacctagagaaggcagcgtcaggg

SEQ ID NO: 24149 - DNA, 28 bp, synthetic construct
  source 1..28: mol_type = other DNA
ggtaccacctagagaaggcagcgtcagg

SEQ ID NO: 24150 - DNA, 28 bp, synthetic construct
  source 1..28: mol_type = other DNA
acgctgccttctctaggtggtaccatgg

SEQ ID NO: 24151 - DNA, 28 bp, synthetic construct
  source 1..28: mol_type = other DNA
atgtggccatggtaccacctagagaagg

SEQ ID NO: 24152 - DNA, 28 bp, synthetic construct
  source 1..28: mol_type = other DNA
ctaggtggtaccatggccacatgtctgg

SEQ ID NO: 24153 - DNA, 28 bp, synthetic construct
  source 1..28: mol_type = other DNA
ggtggtaccatggccacatgtctggcgg

SEQ ID NO: 24154 - DNA, 28 bp, synthetic construct
  source 1..28: mol_type = other DNA
gtggtaccatggccacatgtctggcggg

SEQ ID NO: 24155 - DNA, 28 bp, synthetic construct
  source 1..28: mol_type = other DNA
taccatggccacatgtctggcgggcagg

SEQ ID NO: 24156 - DNA, 28 bp, synthetic construct
  source 1..28: mol_type = other DNA
tgcctgcccgccagacatgtggccatgg

SEQ ID NO: 24157 - DNA, 28 bp, synthetic construct
  source 1..28: mol_type = other DNA
cgtctctgcctgcccgccagacatgtgg

SEQ ID NO: 24158 - DNA, 28 bp, synthetic construct
  source 1..28: mol_type = other DNA
ggcgggcaggcagagacgctgctgcagg

SEQ ID NO: 24159 - DNA, 28 bp, synthetic construct
  source 1..28: mol_type = other DNA
caggcagagacgctgctgcaggccaagg

SEQ ID NO: 24160 - DNA, 28 bp, synthetic construct
  source 1..28: mol_type = other DNA
aggcagagacgctgctgcaggccaaggg

SEQ ID NO: 24161 - DNA, 28 bp, synthetic construct
  source 1..28: mol_type = other DNA
gctgctgcaggccaagggcgagccctgg

SEQ ID NO: 24162 - DNA, 28 bp, synthetic construct
  source 1..28: mol_type = other DNA
acaagaaacgtccagggctcgcccttgg

SEQ ID NO: 24163 - DNA, 28 bp, synthetic construct
  source 1..28: mol_type = other DNA
ggctctcacgcacaagaaacgtccaggg

SEQ ID NO: 24164 - DNA, 28 bp, synthetic construct
  source 1..28: mol_type = other DNA
aggctctcacgcacaagaaacgtccagg

SEQ ID NO: 24165 - DNA, 28 bp, synthetic construct
  source 1..28: mol_type = other DNA
ttgtgcgtgagagcctcagccagcctgg

SEQ ID NO: 24166 - DNA, 28 bp, synthetic construct
  source 1..28: mol_type = other DNA
aagcacgaagtctccaggctggctgagg

SEQ ID NO: 24167 - DNA, 28 bp, synthetic construct
  source 1..28: mol_type = other DNA
cacagaaagcacgaagtctccaggctgg

SEQ ID NO: 24168 - DNA, 28 bp, synthetic construct
  source 1..28: mol_type = other DNA
tgagcacagaaagcacgaagtctccagg

SEQ ID NO: 24169 - DNA, 28 bp, synthetic construct
  source 1..28: mol_type = other DNA
ctttctgtgctcagtgaccagcccaagg

SEQ ID NO: 24170 - DNA, 28 bp, synthetic construct
  source 1..28: mol_type = other DNA
ctgtgctcagtgaccagcccaaggctgg

SEQ ID NO: 24171 - DNA, 28 bp, synthetic construct
  source 1..28: mol_type = other DNA
tcagtgaccagcccaaggctggcccagg

SEQ ID NO: 24172 - DNA, 28 bp, synthetic construct
  source 1..28: mol_type = other DNA
cggggagcctgggccagccttgggctgg

SEQ ID NO: 24173 - DNA, 28 bp, synthetic construct
  source 1..28: mol_type = other DNA
tgagcggggagcctgggccagccttggg

SEQ ID NO: 24174 - DNA, 28 bp, synthetic construct
  source 1..28: mol_type = other DNA
ctgagcggggagcctgggccagccttgg

SEQ ID NO: 24175 - DNA, 28 bp, synthetic construct
  source 1..28: mol_type = other DNA
caaggctggcccaggctccccgctcagg

SEQ ID NO: 24176 - DNA, 28 bp, synthetic construct
  source 1..28: mol_type = other DNA
aaggctggcccaggctccccgctcaggg

SEQ ID NO: 24177 - DNA, 28 bp, synthetic construct
  source 1..28: mol_type = other DNA
gtgggtgaccctgagcggggagcctggg

SEQ ID NO: 24178 - DNA, 28 bp, synthetic construct
  source 1..28: mol_type = other DNA
tgtgggtgaccctgagcggggagcctgg

SEQ ID NO: 24179 - DNA, 28 bp, synthetic construct
  source 1..28: mol_type = other DNA
tccccgctcagggtcacccacatcaagg

SEQ ID NO: 24180 - DNA, 28 bp, synthetic construct
  source 1..28: mol_type = other DNA
accttgatgtgggtgaccctgagcgggg

SEQ ID NO: 24181 - DNA, 28 bp, synthetic construct
  source 1..28: mol_type = other DNA
gaccttgatgtgggtgaccctgagcggg

SEQ ID NO: 24182 - DNA, 28 bp, synthetic construct
  source 1..28: mol_type = other DNA
tgaccttgatgtgggtgaccctgagcgg

SEQ ID NO: 24183 - DNA, 28 bp, synthetic construct
  source 1..28: mol_type = other DNA
gtcacccacatcaaggtcatgtgcgagg

SEQ ID NO: 24184 - DNA, 28 bp, synthetic construct
  source 1..28: mol_type = other DNA
cttacctcgcacatgaccttgatgtggg

SEQ ID NO: 24185 - DNA, 28 bp, synthetic construct
  source 1..28: mol_type = other DNA
ccacatcaaggtcatgtgcgaggtaagg

SEQ ID NO: 24186 - DNA, 28 bp, synthetic construct
  source 1..28: mol_type = other DNA
aggtcatgtgcgaggtaaggcagccagg

SEQ ID NO: 24187 - DNA, 28 bp, synthetic construct
  source 1..28: mol_type = other DNA
tcatgtgcgaggtaaggcagccaggcgg

SEQ ID NO: 24188 - DNA, 28 bp, synthetic construct
  source 1..28: mol_type = other DNA
tgtgcgaggtaaggcagccaggcggcgg

SEQ ID NO: 24189 - DNA, 28 bp, synthetic construct
  source 1..28: mol_type = other DNA
gtgcgaggtaaggcagccaggcggcggg

SEQ ID NO: 24190 - DNA, 28 bp, synthetic construct
  source 1..28: mol_type = other DNA
tgcgaggtaaggcagccaggcggcgggg

SEQ ID NO: 24191 - DNA, 28 bp, synthetic construct
  source 1..28: mol_type = other DNA
gcgaggtaaggcagccaggcggcggggg

SEQ ID NO: 24192 - DNA, 28 bp, synthetic construct
  source 1..28: mol_type = other DNA
tgaatggcctaatttggctccccccagg

SEQ ID NO: 24193 - DNA, 28 bp, synthetic construct
  source 1..28: mol_type = other DNA
gaatggcctaatttggctccccccaggg

SEQ ID NO: 24194 - DNA, 28 bp, synthetic construct
  source 1..28: mol_type = other DNA
tggcctaatttggctccccccagggtgg

SEQ ID NO: 24195 - DNA, 28 bp, synthetic construct
  source 1..28: mol_type = other DNA
cgtccaccctggggggagccaaattagg

SEQ ID NO: 24196 - DNA, 28 bp, synthetic construct
  source 1..28: mol_type = other DNA
tccccccagggtggacgctacacagtgg

SEQ ID NO: 24197 - DNA, 28 bp, synthetic construct
  source 1..28: mol_type = other DNA
ccccccagggtggacgctacacagtggg

SEQ ID NO: 24198 - DNA, 28 bp, synthetic construct
  source 1..28: mol_type = other DNA
acccactgtgtagcgtccaccctggggg

SEQ ID NO: 24199 - DNA, 28 bp, synthetic construct
  source 1..28: mol_type = other DNA
cacccactgtgtagcgtccaccctgggg

SEQ ID NO: 24200 - DNA, 28 bp, synthetic construct
  source 1..28: mol_type = other DNA
cccagggtggacgctacacagtgggtgg

SEQ ID NO: 24201 - DNA, 28 bp, synthetic construct
  source 1..28: mol_type = other DNA
accacccactgtgtagcgtccaccctgg

SEQ ID NO: 24202 - DNA, 28 bp, synthetic construct
  source 1..28: mol_type = other DNA
ggtggacgctacacagtgggtggtttgg

SEQ ID NO: 24203 - DNA, 28 bp, synthetic construct
  source 1..28: mol_type = other DNA
ggtttggagaccttcgacagcctcacgg

SEQ ID NO: 24204 - DNA, 28 bp, synthetic construct
  source 1..28: mol_type = other DNA
gagaccttcgacagcctcacggacctgg

SEQ ID NO: 24205 - DNA, 28 bp, synthetic construct
  source 1..28: mol_type = other DNA
accttcgacagcctcacggacctggtgg

SEQ ID NO: 24206 - DNA, 28 bp, synthetic construct
  source 1..28: mol_type = other DNA
tccaccaggtccgtgaggctgtcgaagg

SEQ ID NO: 24207 - DNA, 28 bp, synthetic construct
  source 1..28: mol_type = other DNA
cttgaaatgctccaccaggtccgtgagg

SEQ ID NO: 24208 - DNA, 28 bp, synthetic construct
  source 1..28: mol_type = other DNA
gacctggtggagcatttcaagaagacgg

SEQ ID NO: 24209 - DNA, 28 bp, synthetic construct
  source 1..28: mol_type = other DNA
acctggtggagcatttcaagaagacggg

SEQ ID NO: 24210 - DNA, 28 bp, synthetic construct
  source 1..28: mol_type = other DNA
cctggtggagcatttcaagaagacgggg

SEQ ID NO: 24211 - DNA, 28 bp, synthetic construct
  source 1..28: mol_type = other DNA
gagcatttcaagaagacggggattgagg

SEQ ID NO: 24212 - DNA, 28 bp, synthetic construct
  source 1..28: mol_type = other DNA
catttcaagaagacggggattgaggagg

SEQ ID NO: 24213 - DNA, 28 bp, synthetic construct
  source 1..28: mol_type = other DNA
agaagacggggattgaggaggcctcagg

SEQ ID NO: 24214 - DNA, 28 bp, synthetic construct
  source 1..28: mol_type = other DNA
ggcctcaggcgcctttgtctacctgcgg

SEQ ID NO: 24215 - DNA, 28 bp, synthetic construct
  source 1..28: mol_type = other DNA
tgccgcaggtagacaaaggcgcctgagg

SEQ ID NO: 24216 - DNA, 28 bp, synthetic construct
  source 1..28: mol_type = other DNA
tcaggcgcctttgtctacctgcggcagg

SEQ ID NO: 24217 - DNA, 28 bp, synthetic construct
  source 1..28: mol_type = other DNA
cgcctttgtctacctgcggcaggtcagg

SEQ ID NO: 24218 - DNA, 28 bp, synthetic construct
  source 1..28: mol_type = other DNA
gcctttgtctacctgcggcaggtcaggg

SEQ ID NO: 24219 - DNA, 28 bp, synthetic construct
  source 1..28: mol_type = other DNA
cctttgtctacctgcggcaggtcagggg

SEQ ID NO: 24220 - DNA, 28 bp, synthetic construct
  source 1..28: mol_type = other DNA
ttgtctacctgcggcaggtcaggggtgg

SEQ ID NO: 24221 - DNA, 28 bp, synthetic construct
  source 1..28: mol_type = other DNA
tgtctacctgcggcaggtcaggggtggg

SEQ ID NO: 24222 - DNA, 28 bp, synthetic construct
  source 1..28: mol_type = other DNA
gctgggcccacccctgacctgccgcagg

SEQ ID NO: 24223 - DNA, 28 bp, synthetic construct
  source 1..28: mol_type = other DNA
ctcgtggcatagtacggctggggtgggg

SEQ ID NO: 24224 - DNA, 28 bp, synthetic construct
  source 1..28: mol_type = other DNA
cccaccccagccgtactatgccacgagg

SEQ ID NO: 24225 - DNA, 28 bp, synthetic construct
  source 1..28: mol_type = other DNA
ccaccccagccgtactatgccacgaggg

SEQ ID NO: 24226 - DNA, 28 bp, synthetic construct
  source 1..28: mol_type = other DNA
tcaccctcgtggcatagtacggctgggg

SEQ ID NO: 24227 - DNA, 28 bp, synthetic construct
  source 1..28: mol_type = other DNA
ttcaccctcgtggcatagtacggctggg

SEQ ID NO: 24228 - DNA, 28 bp, synthetic construct
  source 1..28: mol_type = other DNA
attcaccctcgtggcatagtacggctgg

SEQ ID NO: 24229 - DNA, 28 bp, synthetic construct
  source 1..28: mol_type = other DNA
ccgtactatgccacgagggtgaatgcgg

SEQ ID NO: 24230 - DNA, 28 bp, synthetic construct
  source 1..28: mol_type = other DNA
tcaatgtcagccgcattcaccctcgtgg

SEQ ID NO: 24231 - DNA, 28 bp, synthetic construct
  source 1..28: mol_type = other DNA
gcggctgacattgagaaccgagtgttgg

SEQ ID NO: 24232 - DNA, 28 bp, synthetic construct
  source 1..28: mol_type = other DNA
ctgcttcttgttcagttccaacactcgg

SEQ ID NO: 24233 - DNA, 28 bp, synthetic construct
  source 1..28: mol_type = other DNA
cgagtgttggaactgaacaagaagcagg

SEQ ID NO: 24234 - DNA, 28 bp, synthetic construct
  source 1..28: mol_type = other DNA
gaactgaacaagaagcaggagtccgagg

SEQ ID NO: 24235 - DNA, 28 bp, synthetic construct
  source 1..28: mol_type = other DNA
aagcaggagtccgaggatacagccaagg

SEQ ID NO: 24236 - DNA, 28 bp, synthetic construct
  source 1..28: mol_type = other DNA
aggagtccgaggatacagccaaggctgg

SEQ ID NO: 24237 - DNA, 28 bp, synthetic construct
  source 1..28: mol_type = other DNA
cagaagccagccttggctgtatcctcgg

SEQ ID NO: 24238 - DNA, 28 bp, synthetic construct
  source 1..28: mol_type = other DNA
cgaggatacagccaaggctggcttctgg

SEQ ID NO: 24239 - DNA, 28 bp, synthetic construct
  source 1..28: mol_type = other DNA
gaggatacagccaaggctggcttctggg

SEQ ID NO: 24240 - DNA, 28 bp, synthetic construct
  source 1..28: mol_type = other DNA
gatacagccaaggctggcttctgggagg

SEQ ID NO: 24241 - DNA, 28 bp, synthetic construct
  source 1..28: mol_type = other DNA
tcaaactcctcccagaagccagccttgg

SEQ ID NO: 24242 - DNA, 28 bp, synthetic construct
  source 1..28: mol_type = other DNA
aaggctggcttctgggaggagtttgagg

SEQ ID NO: 24243 - DNA, 28 bp, synthetic construct
  source 1..28: mol_type = other DNA
gcttctgggaggagtttgaggtgcatgg

SEQ ID NO: 24244 - DNA, 28 bp, synthetic construct
  source 1..28: mol_type = other DNA
tctgggaggagtttgaggtgcatggtgg

SEQ ID NO: 24245 - DNA, 28 bp, synthetic construct
  source 1..28: mol_type = other DNA
ctgggaggagtttgaggtgcatggtggg

SEQ ID NO: 24246 - DNA, 28 bp, synthetic construct
  source 1..28: mol_type = other DNA
tgggaggagtttgaggtgcatggtgggg

SEQ ID NO: 24247 - DNA, 28 bp, synthetic construct
  source 1..28: mol_type = other DNA
ggagtttgaggtgcatggtggggaccgg

SEQ ID NO: 24248 - DNA, 28 bp, synthetic construct
  source 1..28: mol_type = other DNA
tttgaggtgcatggtggggaccggcagg

SEQ ID NO: 24249 - DNA, 28 bp, synthetic construct
  source 1..28: mol_type = other DNA
ttgaggtgcatggtggggaccggcaggg

SEQ ID NO: 24250 - DNA, 28 bp, synthetic construct
  source 1..28: mol_type = other DNA
ggtgcatggtggggaccggcagggctgg

SEQ ID NO: 24251 - DNA, 28 bp, synthetic construct
  source 1..28: mol_type = other DNA
ttctgcaaactctgagatgtgggtgggg

SEQ ID NO: 24252 - DNA, 28 bp, synthetic construct
  source 1..28: mol_type = other DNA
cttctgcaaactctgagatgtgggtggg

SEQ ID NO: 24253 - DNA, 28 bp, synthetic construct
  source 1..28: mol_type = other DNA
gcttctgcaaactctgagatgtgggtgg

SEQ ID NO: 24254 - DNA, 28 bp, synthetic construct
  source 1..28: mol_type = other DNA
cccacatctcagagtttgcagaagcagg

SEQ ID NO: 24255 - DNA, 28 bp, synthetic construct
  source 1..28: mol_type = other DNA
tcctgcttctgcaaactctgagatgtgg

SEQ ID NO: 24256 - DNA, 28 bp, synthetic construct
  source 1..28: mol_type = other DNA
acatctcagagtttgcagaagcaggagg

SEQ ID NO: 24257 - DNA, 28 bp, synthetic construct
  source 1..28: mol_type = other DNA
gaggtgaagaacttgcaccagcgtctgg

SEQ ID NO: 24258 - DNA, 28 bp, synthetic construct
  source 1..28: mol_type = other DNA
tgaagaacttgcaccagcgtctggaagg

SEQ ID NO: 24259 - DNA, 28 bp, synthetic construct
  source 1..28: mol_type = other DNA
gaagaacttgcaccagcgtctggaaggg

SEQ ID NO: 24260 - DNA, 28 bp, synthetic construct
  source 1..28: mol_type = other DNA
cttgcaccagcgtctggaagggcagcgg

SEQ ID NO: 24261 - DNA, 28 bp, synthetic construct
  source 1..28: mol_type = other DNA
ctctggccgctgcccttccagacgctgg

SEQ ID NO: 24262 - DNA, 28 bp, synthetic construct
  source 1..28: mol_type = other DNA
ctggaagggcagcggccagagaacaagg

SEQ ID NO: 24263 - DNA, 28 bp, synthetic construct
  source 1..28: mol_type = other DNA
tggaagggcagcggccagagaacaaggg

SEQ ID NO: 24264 - DNA, 28 bp, synthetic construct
  source 1..28: mol_type = other DNA
tgtagcggttcttgcccttgttctctgg

SEQ ID NO: 24265 - DNA, 28 bp, synthetic construct
  source 1..28: mol_type = other DNA
ctcacaggggagaatgttcttgtagcgg

SEQ ID NO: 24266 - DNA, 28 bp, synthetic construct
  source 1..28: mol_type = other DNA
agaacattctcccctgtgagcacccagg

SEQ ID NO: 24267 - DNA, 28 bp, synthetic construct
  source 1..28: mol_type = other DNA
aatggggcagcctgggtgctcacagggg

SEQ ID NO: 24268 - DNA, 28 bp, synthetic construct
  source 1..28: mol_type = other DNA
gaatggggcagcctgggtgctcacaggg

SEQ ID NO: 24269 - DNA, 28 bp, synthetic construct
  source 1..28: mol_type = other DNA
tgaatggggcagcctgggtgctcacagg

SEQ ID NO: 24270 - DNA, 28 bp, synthetic construct
  source 1..28: mol_type = other DNA
ggtcaactgggagtgggcggagaggagg

SEQ ID NO: 24271 - DNA, 28 bp, synthetic construct
  source 1..28: mol_type = other DNA
tgtggtcaactgggagtgggcggagagg

SEQ ID NO: 24272 - DNA, 28 bp, synthetic construct
  source 1..28: mol_type = other DNA
tcggctgtggtcaactgggagtgggcgg

SEQ ID NO: 24273 - DNA, 28 bp, synthetic construct
  source 1..28: mol_type = other DNA
cactcggctgtggtcaactgggagtggg

SEQ ID NO: 24274 - DNA, 28 bp, synthetic construct
  source 1..28: mol_type = other DNA
tcactcggctgtggtcaactgggagtgg

SEQ ID NO: 24275 - DNA, 28 bp, synthetic construct
  source 1..28: mol_type = other DNA
caggatcactcggctgtggtcaactggg

SEQ ID NO: 24276 - DNA, 28 bp, synthetic construct
  source 1..28: mol_type = other DNA
gcaggatcactcggctgtggtcaactgg

SEQ ID NO: 24277 - DNA, 28 bp, synthetic construct
  source 1..28: mol_type = other DNA
gttgaccacagccgagtgatcctgcagg

SEQ ID NO: 24278 - DNA, 28 bp, synthetic construct
  source 1..28: mol_type = other DNA
ttgaccacagccgagtgatcctgcaggg

SEQ ID NO: 24279 - DNA, 28 bp, synthetic construct
  source 1..28: mol_type = other DNA
ccacagccgagtgatcctgcagggacgg

SEQ ID NO: 24280 - DNA, 28 bp, synthetic construct
  source 1..28: mol_type = other DNA
cacagccgagtgatcctgcagggacggg

SEQ ID NO: 24281 - DNA, 28 bp, synthetic construct
  source 1..28: mol_type = other DNA
actgtcccgtccctgcaggatcactcgg

SEQ ID NO: 24282 - DNA, 28 bp, synthetic construct
  source 1..28: mol_type = other DNA
ggggatgttactgtcccgtccctgcagg

SEQ ID NO: 24283 - DNA, 28 bp, synthetic construct
  source 1..28: mol_type = other DNA
tgcagggacgggacagtaacatccccgg

SEQ ID NO: 24284 - DNA, 28 bp, synthetic construct
  source 1..28: mol_type = other DNA
gcagggacgggacagtaacatccccggg

SEQ ID NO: 24285 - DNA, 28 bp, synthetic construct
  source 1..28: mol_type = other DNA
gttggcattgatgtagtcggacccgggg

SEQ ID NO: 24286 - DNA, 28 bp, synthetic construct
  source 1..28: mol_type = other DNA
agttggcattgatgtagtcggacccggg

SEQ ID NO: 24287 - DNA, 28 bp, synthetic construct
  source 1..28: mol_type = other DNA
tagttggcattgatgtagtcggacccgg

SEQ ID NO: 24288 - DNA, 28 bp, synthetic construct
  source 1..28: mol_type = other DNA
ttgatgtagttggcattgatgtagtcgg

SEQ ID NO: 24289 - DNA, 28 bp, synthetic construct
  source 1..28: mol_type = other DNA
gactacatcaatgccaactacatcaagg

SEQ ID NO: 24290 - DNA, 28 bp, synthetic construct
  source 1..28: mol_type = other DNA
gccaactacatcaaggtcagcagtgtgg

SEQ ID NO: 24291 - DNA, 28 bp, synthetic construct
  source 1..28: mol_type = other DNA
ccaactacatcaaggtcagcagtgtggg

SEQ ID NO: 24292 - DNA, 28 bp, synthetic construct
  source 1..28: mol_type = other DNA
atcaaggtcagcagtgtgggccacgtgg

SEQ ID NO: 24293 - DNA, 28 bp, synthetic construct
  source 1..28: mol_type = other DNA
tcaaggtcagcagtgtgggccacgtggg

SEQ ID NO: 24294 - DNA, 28 bp, synthetic construct
  source 1..28: mol_type = other DNA
aggtcagcagtgtgggccacgtgggagg

SEQ ID NO: 24295 - DNA, 28 bp, synthetic construct
  source 1..28: mol_type = other DNA
tagcagctggttctggacgcaagcgtgg

SEQ ID NO: 24296 - DNA, 28 bp, synthetic construct
  source 1..28: mol_type = other DNA
acgcttgcgtccagaaccagctgctagg

SEQ ID NO: 24297 - DNA, 28 bp, synthetic construct
  source 1..28: mol_type = other DNA
ctcatcagggcctagcagctggttctgg

SEQ ID NO: 24298 - DNA, 28 bp, synthetic construct
  source 1..28: mol_type = other DNA
agcgttctcatcagggcctagcagctgg

SEQ ID NO: 24299 - DNA, 28 bp, synthetic construct
  source 1..28: mol_type = other DNA
gatgtaggtcttagcgttctcatcaggg

SEQ ID NO: 24300 - DNA, 28 bp, synthetic construct
  source 1..28: mol_type = other DNA
cgatgtaggtcttagcgttctcatcagg

SEQ ID NO: 24301 - DNA, 28 bp, synthetic construct
  source 1..28: mol_type = other DNA
aacgctaagacctacatcgccagccagg

SEQ ID NO: 24302 - DNA, 28 bp, synthetic construct
  source 1..28: mol_type = other DNA
acgctaagacctacatcgccagccaggg

SEQ ID NO: 24303 - DNA, 28 bp, synthetic construct
  source 1..28: mol_type = other DNA
acctacatcgccagccagggttgtctgg

SEQ ID NO: 24304 - DNA, 28 bp, synthetic construct
  source 1..28: mol_type = other DNA
tccagacaaccctggctggcgatgtagg

SEQ ID NO: 24305 - DNA, 28 bp, synthetic construct
  source 1..28: mol_type = other DNA
tacatcgccagccagggttgtctggagg

SEQ ID NO: 24306 - DNA, 28 bp, synthetic construct
  source 1..28: mol_type = other DNA
gccagccagggttgtctggaggccacgg

SEQ ID NO: 24307 - DNA, 28 bp, synthetic construct
  source 1..28: mol_type = other DNA
accgtggcctccagacaaccctggctgg

SEQ ID NO: 24308 - DNA, 28 bp, synthetic construct
  source 1..28: mol_type = other DNA
attgaccgtggcctccagacaaccctgg

SEQ ID NO: 24309 - DNA, 28 bp, synthetic construct
  source 1..28: mol_type = other DNA
tctggaggccacggtcaatgacttctgg

SEQ ID NO: 24310 - DNA, 28 bp, synthetic construct
  source 1..28: mol_type = other DNA
gccacggtcaatgacttctggcagatgg

SEQ ID NO: 24311 - DNA, 28 bp, synthetic construct
  source 1..28: mol_type = other DNA
gccatctgccagaagtcattgaccgtgg

SEQ ID NO: 24312 - DNA, 28 bp, synthetic construct
  source 1..28: mol_type = other DNA
ggtcaatgacttctggcagatggcgtgg

SEQ ID NO: 24313 - DNA, 28 bp, synthetic construct
  source 1..28: mol_type = other DNA
aatgacttctggcagatggcgtggcagg

SEQ ID NO: 24314 - DNA, 28 bp, synthetic construct
  source 1..28: mol_type = other DNA
ctctcgggtggtcatgacgatgacacgg

SEQ ID NO: 24315 - DNA, 28 bp, synthetic construct
  source 1..28: mol_type = other DNA
cgtgtcatcgtcatgaccacccgagagg

SEQ ID NO: 24316 - DNA, 28 bp, synthetic construct
  source 1..28: mol_type = other DNA
gtcatcgtcatgaccacccgagaggtgg

SEQ ID NO: 24317 - DNA, 28 bp, synthetic construct
  source 1..28: mol_type = other DNA
tcatgaccacccgagaggtggagaaagg

SEQ ID NO: 24318 - DNA, 28 bp, synthetic construct
  source 1..28: mol_type = other DNA
gaccacccgagaggtggagaaaggccgg

SEQ ID NO: 24319 - DNA, 28 bp, synthetic construct
  source 1..28: mol_type = other DNA
accacccgagaggtggagaaaggccggg

SEQ ID NO: 24320 - DNA, 28 bp, synthetic construct
  source 1..28: mol_type = other DNA
acccggcctttctccacctctcgggtgg

SEQ ID NO: 24321 - DNA, 28 bp, synthetic construct
  source 1..28: mol_type = other DNA
cccgagaggtggagaaaggccgggtagg

SEQ ID NO: 24322 - DNA, 28 bp, synthetic construct
  source 1..28: mol_type = other DNA
ccgagaggtggagaaaggccgggtaggg

SEQ ID NO: 24323 - DNA, 28 bp, synthetic construct
  source 1..28: mol_type = other DNA
tgcggggaagggggggcgccctacccgg

SEQ ID NO: 24324 - DNA, 28 bp, synthetic construct
  source 1..28: mol_type = other DNA
tgttctggaaagggagggtcgggtgggg

SEQ ID NO: 24325 - DNA, 28 bp, synthetic construct
  source 1..28: mol_type = other DNA
ttgttctggaaagggagggtcgggtggg

SEQ ID NO: 24326 - DNA, 28 bp, synthetic construct
  source 1..28: mol_type = other DNA
tttgttctggaaagggagggtcgggtgg

SEQ ID NO: 24327 - DNA, 28 bp, synthetic construct
  source 1..28: mol_type = other DNA
gcatttgttctggaaagggagggtcggg

SEQ ID NO: 24328 - DNA, 28 bp, synthetic construct
  source 1..28: mol_type = other DNA
cgcatttgttctggaaagggagggtcgg

SEQ ID NO: 24329 - DNA, 28 bp, synthetic construct
  source 1..28: mol_type = other DNA
gggacgcatttgttctggaaagggaggg

SEQ ID NO: 24330 - DNA, 28 bp, synthetic construct
  source 1..28: mol_type = other DNA
tgggacgcatttgttctggaaagggagg

SEQ ID NO: 24331 - DNA, 28 bp, synthetic construct
  source 1..28: mol_type = other DNA
gtatgggacgcatttgttctggaaaggg

SEQ ID NO: 24332 - DNA, 28 bp, synthetic construct
  source 1..28: mol_type = other DNA
agtatgggacgcatttgttctggaaagg

SEQ ID NO: 24333 - DNA, 28 bp, synthetic construct
  source 1..28: mol_type = other DNA
tttccagaacaaatgcgtcccatactgg

SEQ ID NO: 24334 - DNA, 28 bp, synthetic construct
  source 1..28: mol_type = other DNA
gggccagtatgggacgcatttgttctgg

SEQ ID NO: 24335 - DNA, 28 bp, synthetic construct
  source 1..28: mol_type = other DNA
aacaaatgcgtcccatactggcccgagg

SEQ ID NO: 24336 - DNA, 28 bp, synthetic construct
  source 1..28: mol_type = other DNA
aaatgcgtcccatactggcccgaggtgg

SEQ ID NO: 24337 - DNA, 28 bp, synthetic construct
  source 1..28: mol_type = other DNA
aatgcgtcccatactggcccgaggtggg

SEQ ID NO: 24338 - DNA, 28 bp, synthetic construct
  source 1..28: mol_type = other DNA
ctgcatgcccacctcgggccagtatggg

SEQ ID NO: 24339 - DNA, 28 bp, synthetic construct
  source 1..28: mol_type = other DNA
gctgcatgcccacctcgggccagtatgg

SEQ ID NO: 24340 - DNA, 28 bp, synthetic construct
  source 1..28: mol_type = other DNA
cataagcacgctgcatgcccacctcggg

SEQ ID NO: 24341 - DNA, 28 bp, synthetic construct
  source 1..28: mol_type = other DNA
ccgaggtgggcatgcagcgtgcttatgg

SEQ ID NO: 24342 - DNA, 28 bp, synthetic construct
  source 1..28: mol_type = other DNA
cgaggtgggcatgcagcgtgcttatggg

SEQ ID NO: 24343 - DNA, 28 bp, synthetic construct
  source 1..28: mol_type = other DNA
atgggccctactctgtgaccaactgcgg

SEQ ID NO: 24344 - DNA, 28 bp, synthetic construct
  source 1..28: mol_type = other DNA
tgggccctactctgtgaccaactgcggg

SEQ ID NO: 24345 - DNA, 28 bp, synthetic construct
  source 1..28: mol_type = other DNA
gggccctactctgtgaccaactgcgggg

SEQ ID NO: 24346 - DNA, 28 bp, synthetic construct
  source 1..28: mol_type = other DNA
gctccccgcagttggtcacagagtaggg

SEQ ID NO: 24347 - DNA, 28 bp, synthetic construct
  source 1..28: mol_type = other DNA
tgctccccgcagttggtcacagagtagg

SEQ ID NO: 24348 - DNA, 28 bp, synthetic construct
  source 1..28: mol_type = other DNA
tcggttgtgtcatgctccccgcagttgg

SEQ ID NO: 24349 - DNA, 28 bp, synthetic construct
  source 1..28: mol_type = other DNA
accgaatacaaactccgtaccttacagg

SEQ ID NO: 24350 - DNA, 28 bp, synthetic construct
  source 1..28: mol_type = other DNA
acctgtaaggtacggagtttgtattcgg

SEQ ID NO: 24351 - DNA, 28 bp, synthetic construct
  source 1..28: mol_type = other DNA
ctccgtaccttacaggtctccccgctgg

SEQ ID NO: 24352 - DNA, 28 bp, synthetic construct
  source 1..28: mol_type = other DNA
gtccagcggggagacctgtaaggtacgg

SEQ ID NO: 24353 - DNA, 28 bp, synthetic construct
  source 1..28: mol_type = other DNA
acattgtccagcggggagacctgtaagg

SEQ ID NO: 24354 - DNA, 28 bp, synthetic construct
  source 1..28: mol_type = other DNA
aggtctccccgctggacaatgtgagtgg

SEQ ID NO: 24355 - DNA, 28 bp, synthetic construct
  source 1..28: mol_type = other DNA
tgggggccactcacattgtccagcgggg

SEQ ID NO: 24356 - DNA, 28 bp, synthetic construct
  source 1..28: mol_type = other DNA
gtgggggccactcacattgtccagcggg

SEQ ID NO: 24357 - DNA, 28 bp, synthetic construct
  source 1..28: mol_type = other DNA
cgtgggggccactcacattgtccagcgg

SEQ ID NO: 24358 - DNA, 28 bp, synthetic construct
  source 1..28: mol_type = other DNA
ggcactgaccctatgtcctcggcttagg

SEQ ID NO: 24359 - DNA, 28 bp, synthetic construct
  source 1..28: mol_type = other DNA
gcactgaccctatgtcctcggcttaggg

SEQ ID NO: 24360 - DNA, 28 bp, synthetic construct
  source 1..28: mol_type = other DNA
caggtctccctaagccgaggacataggg

SEQ ID NO: 24361 - DNA, 28 bp, synthetic construct
  source 1..28: mol_type = other DNA
tcaggtctccctaagccgaggacatagg

SEQ ID NO: 24362 - DNA, 28 bp, synthetic construct
  source 1..28: mol_type = other DNA
gtcctcggcttagggagacctgattcgg

SEQ ID NO: 24363 - DNA, 28 bp, synthetic construct
  source 1..28: mol_type = other DNA
tcctcggcttagggagacctgattcggg

SEQ ID NO: 24364 - DNA, 28 bp, synthetic construct
  source 1..28: mol_type = other DNA
tcccgaatcaggtctccctaagccgagg

SEQ ID NO: 24365 - DNA, 28 bp, synthetic construct
  source 1..28: mol_type = other DNA
ttagggagacctgattcgggagatctgg

SEQ ID NO: 24366 - DNA, 28 bp, synthetic construct
  source 1..28: mol_type = other DNA
ctggtaatgccagatctcccgaatcagg

SEQ ID NO: 24367 - DNA, 28 bp, synthetic construct
  source 1..28: mol_type = other DNA
gatctggcattaccagtacctgagctgg

SEQ ID NO: 24368 - DNA, 28 bp, synthetic construct
  source 1..28: mol_type = other DNA
accagtacctgagctggcccgaccatgg

SEQ ID NO: 24369 - DNA, 28 bp, synthetic construct
  source 1..28: mol_type = other DNA
ccagtacctgagctggcccgaccatggg

SEQ ID NO: 24370 - DNA, 28 bp, synthetic construct
  source 1..28: mol_type = other DNA
cagtacctgagctggcccgaccatgggg

SEQ ID NO: 24371 - DNA, 28 bp, synthetic construct
  source 1..28: mol_type = other DNA
ggggaccccatggtcgggccagctcagg

SEQ ID NO: 24372 - DNA, 28 bp, synthetic construct
  source 1..28: mol_type = other DNA
caggctcactggggaccccatggtcggg

SEQ ID NO: 24373 - DNA, 28 bp, synthetic construct
  source 1..28: mol_type = other DNA
ccgaccatggggtccccagtgagcctgg

SEQ ID NO: 24374 - DNA, 28 bp, synthetic construct
  source 1..28: mol_type = other DNA
cgaccatggggtccccagtgagcctggg

SEQ ID NO: 24375 - DNA, 28 bp, synthetic construct
  source 1..28: mol_type = other DNA
gaccatggggtccccagtgagcctgggg

SEQ ID NO: 24376 - DNA, 28 bp, synthetic construct
  source 1..28: mol_type = other DNA
accatggggtccccagtgagcctggggg

SEQ ID NO: 24377 - DNA, 28 bp, synthetic construct
  source 1..28: mol_type = other DNA
acccccaggctcactggggaccccatgg

SEQ ID NO: 24378 - DNA, 28 bp, synthetic construct
  source 1..28: mol_type = other DNA
gctgaggacacccccaggctcactgggg

SEQ ID NO: 24379 - DNA, 28 bp, synthetic construct
  source 1..28: mol_type = other DNA
agctgaggacacccccaggctcactggg

SEQ ID NO: 24380 - DNA, 28 bp, synthetic construct
  source 1..28: mol_type = other DNA
aagctgaggacacccccaggctcactgg

SEQ ID NO: 24381 - DNA, 28 bp, synthetic construct
  source 1..28: mol_type = other DNA
gagcctgggggtgtcctcagcttcctgg

SEQ ID NO: 24382 - DNA, 28 bp, synthetic construct
  source 1..28: mol_type = other DNA
ggtccaggaagctgaggacacccccagg

SEQ ID NO: 24383 - DNA, 28 bp, synthetic construct
  source 1..28: mol_type = other DNA
ctggttgatctggtccaggaagctgagg

SEQ ID NO: 24384 - DNA, 28 bp, synthetic construct
  source 1..28: mol_type = other DNA
cagcttcctggaccagatcaaccagcgg

SEQ ID NO: 24385 - DNA, 28 bp, synthetic construct
  source 1..28: mol_type = other DNA
ttcctggaccagatcaaccagcggcagg

SEQ ID NO: 24386 - DNA, 28 bp, synthetic construct
  source 1..28: mol_type = other DNA
ttcctgccgctggttgatctggtccagg

SEQ ID NO: 24387 - DNA, 28 bp, synthetic construct
  source 1..28: mol_type = other DNA
cagactttcctgccgctggttgatctgg

SEQ ID NO: 24388 - DNA, 28 bp, synthetic construct
  source 1..28: mol_type = other DNA
tgcgtgaggcagactttcctgccgctgg

SEQ ID NO: 24389 - DNA, 28 bp, synthetic construct
  source 1..28: mol_type = other DNA
agcggcaggaaagtctgcctcacgcagg

SEQ ID NO: 24390 - DNA, 28 bp, synthetic construct
  source 1..28: mol_type = other DNA
gcggcaggaaagtctgcctcacgcaggg

SEQ ID NO: 24391 - DNA, 28 bp, synthetic construct
  source 1..28: mol_type = other DNA
agtgcacgatgatgggccctgcgtgagg

SEQ ID NO: 24392 - DNA, 28 bp, synthetic construct
  source 1..28: mol_type = other DNA
cgcagggcccatcatcgtgcactgcagg

SEQ ID NO: 24393 - DNA, 28 bp, synthetic construct
  source 1..28: mol_type = other DNA
ggcccatcatcgtgcactgcaggtgagg

SEQ ID NO: 24394 - DNA, 28 bp, synthetic construct
  source 1..28: mol_type = other DNA
atcctcacctgcagtgcacgatgatggg

SEQ ID NO: 24395 - DNA, 28 bp, synthetic construct
  source 1..28: mol_type = other DNA
catcctcacctgcagtgcacgatgatgg

SEQ ID NO: 24396 - DNA, 28 bp, synthetic construct
  source 1..28: mol_type = other DNA
ctgcaggtgaggatgataatcctgatgg

SEQ ID NO: 24397 - DNA, 28 bp, synthetic construct
  source 1..28: mol_type = other DNA
tggcacccccgtctttccccagcgccgg

SEQ ID NO: 24398 - DNA, 28 bp, synthetic construct
  source 1..28: mol_type = other DNA
cgatgccggcgctggggaaagacggggg

SEQ ID NO: 24399 - DNA, 28 bp, synthetic construct
  source 1..28: mol_type = other DNA
ccccgtctttccccagcgccggcatcgg

SEQ ID NO: 24400 - DNA, 28 bp, synthetic construct
  source 1..28: mol_type = other DNA
gccgatgccggcgctggggaaagacggg

SEQ ID NO: 24401 - DNA, 28 bp, synthetic construct
  source 1..28: mol_type = other DNA
ggccgatgccggcgctggggaaagacgg

SEQ ID NO: 24402 - DNA, 28 bp, synthetic construct
  source 1..28: mol_type = other DNA
tccccagcgccggcatcggccgcacagg

SEQ ID NO: 24403 - DNA, 28 bp, synthetic construct
  source 1..28: mol_type = other DNA
gcctgtgcggccgatgccggcgctgggg

SEQ ID NO: 24404 - DNA, 28 bp, synthetic construct
  source 1..28: mol_type = other DNA
tgcctgtgcggccgatgccggcgctggg

SEQ ID NO: 24405 - DNA, 28 bp, synthetic construct
  source 1..28: mol_type = other DNA
gtgcctgtgcggccgatgccggcgctgg

SEQ ID NO: 24406 - DNA, 28 bp, synthetic construct
  source 1..28: mol_type = other DNA
atgatggtgcctgtgcggccgatgccgg

SEQ ID NO: 24407 - DNA, 28 bp, synthetic construct
  source 1..28: mol_type = other DNA
gtcgatgacaatgatggtgcctgtgcgg

SEQ ID NO: 24408 - DNA, 28 bp, synthetic construct
  source 1..28: mol_type = other DNA
accatcattgtcatcgacatgctcatgg

SEQ ID NO: 24409 - DNA, 28 bp, synthetic construct
  source 1..28: mol_type = other DNA
tccatgagcatgtcgatgacaatgatgg

SEQ ID NO: 24410 - DNA, 28 bp, synthetic construct
  source 1..28: mol_type = other DNA
atgctcatggagaacatctccaccaagg

SEQ ID NO: 24411 - DNA, 28 bp, synthetic construct
  source 1..28: mol_type = other DNA
tgctcatggagaacatctccaccaaggg

SEQ ID NO: 24412 - DNA, 28 bp, synthetic construct
  source 1..28: mol_type = other DNA
atggagaacatctccaccaagggtgagg

SEQ ID NO: 24413 - DNA, 28 bp, synthetic construct
  source 1..28: mol_type = other DNA
tggagaacatctccaccaagggtgaggg

SEQ ID NO: 24414 - DNA, 28 bp, synthetic construct
  source 1..28: mol_type = other DNA
ggagaacatctccaccaagggtgagggg

SEQ ID NO: 24415 - DNA, 28 bp, synthetic construct
  source 1..28: mol_type = other DNA
atctccaccaagggtgaggggcacctgg

SEQ ID NO: 24416 - DNA, 28 bp, synthetic construct
  source 1..28: mol_type = other DNA
tctccaccaagggtgaggggcacctggg

SEQ ID NO: 24417 - DNA, 28 bp, synthetic construct
  source 1..28: mol_type = other DNA
ctccaccaagggtgaggggcacctgggg

SEQ ID NO: 24418 - DNA, 28 bp, synthetic construct
  source 1..28: mol_type = other DNA
tccaccaagggtgaggggcacctggggg

SEQ ID NO: 24419 - DNA, 28 bp, synthetic construct
  source 1..28: mol_type = other DNA
acccccaggtgcccctcacccttggtgg

SEQ ID NO: 24420 - DNA, 28 bp, synthetic construct
  source 1..28: mol_type = other DNA
caaacccccaggtgcccctcacccttgg

SEQ ID NO: 24421 - DNA, 28 bp, synthetic construct
  source 1..28: mol_type = other DNA
caagggtgaggggcacctgggggtttgg

SEQ ID NO: 24422 - DNA, 28 bp, synthetic construct
  source 1..28: mol_type = other DNA
aagggtgaggggcacctgggggtttggg

SEQ ID NO: 24423 - DNA, 28 bp, synthetic construct
  source 1..28: mol_type = other DNA
agggtgaggggcacctgggggtttgggg

SEQ ID NO: 24424 - DNA, 28 bp, synthetic construct
  source 1..28: mol_type = other DNA
gggtgaggggcacctgggggtttggggg

SEQ ID NO: 24425 - DNA, 28 bp, synthetic construct
  source 1..28: mol_type = other DNA
cctgaggtttgactgccccccacccagg

SEQ ID NO: 24426 - DNA, 28 bp, synthetic construct
  source 1..28: mol_type = other DNA
ggtttgactgccccccacccaggcctgg

SEQ ID NO: 24427 - DNA, 28 bp, synthetic construct
  source 1..28: mol_type = other DNA
atgtcacagtccaggcctgggtgggggg

SEQ ID NO: 24428 - DNA, 28 bp, synthetic construct
  source 1..28: mol_type = other DNA
aatgtcacagtccaggcctgggtggggg

SEQ ID NO: 24429 - DNA, 28 bp, synthetic construct
  source 1..28: mol_type = other DNA
caatgtcacagtccaggcctgggtgggg

SEQ ID NO: 24430 - DNA, 28 bp, synthetic construct
  source 1..28: mol_type = other DNA
tcaatgtcacagtccaggcctgggtggg

SEQ ID NO: 24431 - DNA, 28 bp, synthetic construct
  source 1..28: mol_type = other DNA
gtcaatgtcacagtccaggcctgggtgg

SEQ ID NO: 24432 - DNA, 28 bp, synthetic construct
  source 1..28: mol_type = other DNA
gatgtcaatgtcacagtccaggcctggg

SEQ ID NO: 24433 - DNA, 28 bp, synthetic construct
  source 1..28: mol_type = other DNA
ggatgtcaatgtcacagtccaggcctgg

SEQ ID NO: 24434 - DNA, 28 bp, synthetic construct
  source 1..28: mol_type = other DNA
cttctggatgtcaatgtcacagtccagg

SEQ ID NO: 24435 - DNA, 28 bp, synthetic construct
  source 1..28: mol_type = other DNA
attgacatccagaagaccatccagatgg

SEQ ID NO: 24436 - DNA, 28 bp, synthetic construct
  source 1..28: mol_type = other DNA
catccagaagaccatccagatggtgcgg

SEQ ID NO: 24437 - DNA, 28 bp, synthetic construct
  source 1..28: mol_type = other DNA
atccagaagaccatccagatggtgcggg

SEQ ID NO: 24438 - DNA, 28 bp, synthetic construct
  source 1..28: mol_type = other DNA
cgcccgcaccatctggatggtcttctgg

SEQ ID NO: 24439 - DNA, 28 bp, synthetic construct
  source 1..28: mol_type = other DNA
gagcgctgcgcccgcaccatctggatgg

SEQ ID NO: 24440 - DNA, 28 bp, synthetic construct
  source 1..28: mol_type = other DNA
atccagatggtgcgggcgcagcgctcgg

SEQ ID NO: 24441 - DNA, 28 bp, synthetic construct
  source 1..28: mol_type = other DNA
tccagatggtgcgggcgcagcgctcggg

SEQ ID NO: 24442 - DNA, 28 bp, synthetic construct
  source 1..28: mol_type = other DNA
gcccgagcgctgcgcccgcaccatctgg

SEQ ID NO: 24443 - DNA, 28 bp, synthetic construct
  source 1..28: mol_type = other DNA
atggtgcgggcgcagcgctcgggcatgg

SEQ ID NO: 24444 - DNA, 28 bp, synthetic construct
  source 1..28: mol_type = other DNA
gcgcagcgctcgggcatggtgcagacgg

SEQ ID NO: 24445 - DNA, 28 bp, synthetic construct
  source 1..28: mol_type = other DNA
cagcgctcgggcatggtgcagacggagg

SEQ ID NO: 24446 - DNA, 28 bp, synthetic construct
  source 1..28: mol_type = other DNA
gaggcgcagtacaagttcatctacgtgg

SEQ ID NO: 24447 - DNA, 28 bp, synthetic construct
  source 1..28: mol_type = other DNA
ttagtggtttcaatgaactgggcgatgg

SEQ ID NO: 24448 - DNA, 28 bp, synthetic construct
  source 1..28: mol_type = other DNA
ttcttcttagtggtttcaatgaactggg

SEQ ID NO: 24449 - DNA, 28 bp, synthetic construct
  source 1..28: mol_type = other DNA
cttcttcttagtggtttcaatgaactgg

SEQ ID NO: 24450 - DNA, 28 bp, synthetic construct
  source 1..28: mol_type = other DNA
ttcattgaaaccactaagaagaagctgg

SEQ ID NO: 24451 - DNA, 28 bp, synthetic construct
  source 1..28: mol_type = other DNA
attgaaaccactaagaagaagctggagg

SEQ ID NO: 24452 - DNA, 28 bp, synthetic construct
  source 1..28: mol_type = other DNA
tgcaggacctccagcttcttcttagtgg

SEQ ID NO: 24453 - DNA, 28 bp, synthetic construct
  source 1..28: mol_type = other DNA
actaagaagaagctggaggtcctgcagg

SEQ ID NO: 24454 - DNA, 28 bp, synthetic construct
  source 1..28: mol_type = other DNA
gaggtcctgcaggtgcgtgcagagcagg

SEQ ID NO: 24455 - DNA, 28 bp, synthetic construct
  source 1..28: mol_type = other DNA
aggtcctgcaggtgcgtgcagagcaggg

SEQ ID NO: 24456 - DNA, 28 bp, synthetic construct
  source 1..28: mol_type = other DNA
caggccctgctctgcacgcacctgcagg

SEQ ID NO: 24457 - DNA, 28 bp, synthetic construct
  source 1..28: mol_type = other DNA
ctgcaggtgcgtgcagagcagggcctgg

SEQ ID NO: 24458 - DNA, 28 bp, synthetic construct
  source 1..28: mol_type = other DNA
tgcaggtgcgtgcagagcagggcctggg

SEQ ID NO: 24459 - DNA, 28 bp, synthetic construct
  source 1..28: mol_type = other DNA
gcaggtgcgtgcagagcagggcctgggg

SEQ ID NO: 24460 - DNA, 28 bp, synthetic construct
  source 1..28: mol_type = other DNA
caggtgcgtgcagagcagggcctggggg

SEQ ID NO: 24461 - DNA, 28 bp, synthetic construct
  source 1..28: mol_type = other DNA
aggtgcgtgcagagcagggcctgggggg

SEQ ID NO: 24462 - DNA, 28 bp, synthetic construct
  source 1..28: mol_type = other DNA
ggtgcgtgcagagcagggcctggggggg

SEQ ID NO: 24463 - DNA, 28 bp, synthetic construct
  source 1..28: mol_type = other DNA
gactgtgggcagagggacagtgggaagg

SEQ ID NO: 24464 - DNA, 28 bp, synthetic construct
  source 1..28: mol_type = other DNA
ctgcgactgtgggcagagggacagtggg

SEQ ID NO: 24465 - DNA, 28 bp, synthetic construct
  source 1..28: mol_type = other DNA
tctgcgactgtgggcagagggacagtgg

SEQ ID NO: 24466 - DNA, 28 bp, synthetic construct
  source 1..28: mol_type = other DNA
ctgtccctctgcccacagtcgcagaagg

SEQ ID NO: 24467 - DNA, 28 bp, synthetic construct
  source 1..28: mol_type = other DNA
tgtccctctgcccacagtcgcagaaggg

SEQ ID NO: 24468 - DNA, 28 bp, synthetic construct
  source 1..28: mol_type = other DNA
tggcccttctgcgactgtgggcagaggg

SEQ ID NO: 24469 - DNA, 28 bp, synthetic construct
  source 1..28: mol_type = other DNA
ctggcccttctgcgactgtgggcagagg

SEQ ID NO: 24470 - DNA, 28 bp, synthetic construct
  source 1..28: mol_type = other DNA
ctctgcccacagtcgcagaagggccagg

SEQ ID NO: 24471 - DNA, 28 bp, synthetic construct
  source 1..28: mol_type = other DNA
cgactcctggcccttctgcgactgtggg

SEQ ID NO: 24472 - DNA, 28 bp, synthetic construct
  source 1..28: mol_type = other DNA
ccacagtcgcagaagggccaggagtcgg

SEQ ID NO: 24473 - DNA, 28 bp, synthetic construct
  source 1..28: mol_type = other DNA
cgcagaagggccaggagtcggagtacgg

SEQ ID NO: 24474 - DNA, 28 bp, synthetic construct
  source 1..28: mol_type = other DNA
gcagaagggccaggagtcggagtacggg

SEQ ID NO: 24475 - DNA, 28 bp, synthetic construct
  source 1..28: mol_type = other DNA
ggtgatgttcccgtactccgactcctgg

SEQ ID NO: 24476 - DNA, 28 bp, synthetic construct
  source 1..28: mol_type = other DNA
tgggcattcttcatggctgggggatagg

SEQ ID NO: 24477 - DNA, 28 bp, synthetic construct
  source 1..28: mol_type = other DNA
tggcatgggcattcttcatggctggggg

SEQ ID NO: 24478 - DNA, 28 bp, synthetic construct
  source 1..28: mol_type = other DNA
ttggcatgggcattcttcatggctgggg

SEQ ID NO: 24479 - DNA, 28 bp, synthetic construct
  source 1..28: mol_type = other DNA
cttggcatgggcattcttcatggctggg

SEQ ID NO: 24480 - DNA, 28 bp, synthetic construct
  source 1..28: mol_type = other DNA
ccagccatgaagaatgcccatgccaagg

SEQ ID NO: 24481 - DNA, 28 bp, synthetic construct
  source 1..28: mol_type = other DNA
gaggccttggcatgggcattcttcatgg

SEQ ID NO: 24482 - DNA, 28 bp, synthetic construct
  source 1..28: mol_type = other DNA
gacgaggtgcgggaggccttggcatggg

SEQ ID NO: 24483 - DNA, 28 bp, synthetic construct
  source 1..28: mol_type = other DNA
ggacgaggtgcgggaggccttggcatgg

SEQ ID NO: 24484 - DNA, 28 bp, synthetic construct
  source 1..28: mol_type = other DNA
cacttggacgaggtgcgggaggccttgg

SEQ ID NO: 24485 - DNA, 28 bp, synthetic construct
  source 1..28: mol_type = other DNA
gcctcccgcacctcgtccaagtgagtgg

SEQ ID NO: 24486 - DNA, 28 bp, synthetic construct
  source 1..28: mol_type = other DNA
gccactcacttggacgaggtgcgggagg

SEQ ID NO: 24487 - DNA, 28 bp, synthetic construct
  source 1..28: mol_type = other DNA
agggccactcacttggacgaggtgcggg

SEQ ID NO: 24488 - DNA, 28 bp, synthetic construct
  source 1..28: mol_type = other DNA
cagggccactcacttggacgaggtgcgg

SEQ ID NO: 24489 - DNA, 28 bp, synthetic construct
  source 1..28: mol_type = other DNA
gcagtcagggccactcacttggacgagg

SEQ ID NO: 24490 - DNA, 28 bp, synthetic construct
  source 1..28: mol_type = other DNA
gcagtggcagtcagggccactcacttgg

SEQ ID NO: 24491 - DNA, 28 bp, synthetic construct
  source 1..28: mol_type = other DNA
gtatgagatgtagcctctgtcctctagg

SEQ ID NO: 24492 - DNA, 28 bp, synthetic construct
  source 1..28: mol_type = other DNA
atgtagcctctgtcctctaggagcttgg

SEQ ID NO: 24493 - DNA, 28 bp, synthetic construct
  source 1..28: mol_type = other DNA
tagactccaagctcctagaggacagagg

SEQ ID NO: 24494 - DNA, 28 bp, synthetic construct
  source 1..28: mol_type = other DNA
cctctaggagcttggagtctagtgcagg

SEQ ID NO: 24495 - DNA, 28 bp, synthetic construct
  source 1..28: mol_type = other DNA
ctctaggagcttggagtctagtgcaggg

SEQ ID NO: 24496 - DNA, 28 bp, synthetic construct
  source 1..28: mol_type = other DNA
agcttggagtctagtgcagggaccgtgg

SEQ ID NO: 24497 - DNA, 28 bp, synthetic construct
  source 1..28: mol_type = other DNA
gaccgtggctgcgtcacctgtgagacgg

SEQ ID NO: 24498 - DNA, 28 bp, synthetic construct
  source 1..28: mol_type = other DNA
accgtggctgcgtcacctgtgagacggg

SEQ ID NO: 24499 - DNA, 28 bp, synthetic construct
  source 1..28: mol_type = other DNA
ccgtggctgcgtcacctgtgagacgggg

SEQ ID NO: 24500 - DNA, 28 bp, synthetic construct
  source 1..28: mol_type = other DNA
tggctgcgtcacctgtgagacggggtgg

SEQ ID NO: 24501 - DNA, 28 bp, synthetic construct
  source 1..28: mol_type = other DNA
gtcacctgtgagacggggtggccagagg

SEQ ID NO: 24502 - DNA, 28 bp, synthetic construct
  source 1..28: mol_type = other DNA
tcacctgtgagacggggtggccagaggg

SEQ ID NO: 24503 - DNA, 28 bp, synthetic construct
  source 1..28: mol_type = other DNA
cacctgtgagacggggtggccagagggg

SEQ ID NO: 24504 - DNA, 28 bp, synthetic construct
  source 1..28: mol_type = other DNA
gtcccctctggccaccccgtctcacagg

SEQ ID NO: 24505 - DNA, 28 bp, synthetic construct
  source 1..28: mol_type = other DNA
ggtggccagaggggactgccagtgccgg

SEQ ID NO: 24506 - DNA, 28 bp, synthetic construct
  source 1..28: mol_type = other DNA
gtggccagaggggactgccagtgccggg

SEQ ID NO: 24507 - DNA, 28 bp, synthetic construct
  source 1..28: mol_type = other DNA
gggacccggcactggcagtcccctctgg

SEQ ID NO: 24508 - DNA, 28 bp, synthetic construct
  source 1..28: mol_type = other DNA
gagacagcacagggggacccggcactgg

SEQ ID NO: 24509 - DNA, 28 bp, synthetic construct
  source 1..28: mol_type = other DNA
ggtcaggagacagcacagggggacccgg

SEQ ID NO: 24510 - DNA, 28 bp, synthetic construct
  source 1..28: mol_type = other DNA
ggtgcaggtcaggagacagcacaggggg

SEQ ID NO: 24511 - DNA, 28 bp, synthetic construct
  source 1..28: mol_type = other DNA
tggtgcaggtcaggagacagcacagggg

SEQ ID NO: 24512 - DNA, 28 bp, synthetic construct
  source 1..28: mol_type = other DNA
ttggtgcaggtcaggagacagcacaggg

SEQ ID NO: 24513 - DNA, 28 bp, synthetic construct
  source 1..28: mol_type = other DNA
gttggtgcaggtcaggagacagcacagg

SEQ ID NO: 24514 - DNA, 28 bp, synthetic construct
  source 1..28: mol_type = other DNA
caagtacaggcagttggtgcaggtcagg

SEQ ID NO: 24515 - DNA, 28 bp, synthetic construct
  source 1..28: mol_type = other DNA
gggggcaagtacaggcagttggtgcagg

SEQ ID NO: 24516 - DNA, 28 bp, synthetic construct
  source 1..28: mol_type = other DNA
gtgcaggggggcaagtacaggcagttgg

SEQ ID NO: 24517 - DNA, 28 bp, synthetic construct
  source 1..28: mol_type = other DNA
ctgcctgtacttgcccccctgcacccgg

SEQ ID NO: 24518 - DNA, 28 bp, synthetic construct
  source 1..28: mol_type = other DNA
cagccgggtgcaggggggcaagtacagg

SEQ ID NO: 24519 - DNA, 28 bp, synthetic construct
  source 1..28: mol_type = other DNA
cttgtgtctgcagccgggtgcagggggg

SEQ ID NO: 24520 - DNA, 28 bp, synthetic construct
  source 1..28: mol_type = other DNA
ccccctgcacccggctgcagacacaagg

SEQ ID NO: 24521 - DNA, 28 bp, synthetic construct
  source 1..28: mol_type = other DNA
tccttgtgtctgcagccgggtgcagggg

SEQ ID NO: 24522 - DNA, 28 bp, synthetic construct
  source 1..28: mol_type = other DNA
ctccttgtgtctgcagccgggtgcaggg

SEQ ID NO: 24523 - DNA, 28 bp, synthetic construct
  source 1..28: mol_type = other DNA
cctgcacccggctgcagacacaaggagg

SEQ ID NO: 24524 - DNA, 28 bp, synthetic construct
  source 1..28: mol_type = other DNA
acacatcctccttgtgtctgcagccggg

SEQ ID NO: 24525 - DNA, 28 bp, synthetic construct
  source 1..28: mol_type = other DNA
tacacatcctccttgtgtctgcagccgg

SEQ ID NO: 24526 - DNA, 28 bp, synthetic construct
  source 1..28: mol_type = other DNA
tgagaacctgcacactaagaacaagagg

SEQ ID NO: 24527 - DNA, 28 bp, synthetic construct
  source 1..28: mol_type = other DNA
gagaacctgcacactaagaacaagaggg

SEQ ID NO: 24528 - DNA, 28 bp, synthetic construct
  source 1..28: mol_type = other DNA
aacctgcacactaagaacaagagggagg

SEQ ID NO: 24529 - DNA, 28 bp, synthetic construct
  source 1..28: mol_type = other DNA
ctcctccctcttgttcttagtgtgcagg

SEQ ID NO: 24530 - DNA, 28 bp, synthetic construct
  source 1..28: mol_type = other DNA
gagggaggagaaagtgaagaagcagcgg

SEQ ID NO: 24531 - DNA, 28 bp, synthetic construct
  source 1..28: mol_type = other DNA
gtgaagaagcagcggtcagcagacaagg

SEQ ID NO: 24532 - DNA, 28 bp, synthetic construct
  source 1..28: mol_type = other DNA
cggtcagcagacaaggagaagagcaagg

SEQ ID NO: 24533 - DNA, 28 bp, synthetic construct
  source 1..28: mol_type = other DNA
ggtcagcagacaaggagaagagcaaggg

SEQ ID NO: 24534 - DNA, 28 bp, synthetic construct
  source 1..28: mol_type = other DNA
ggagaagagcaagggttccctcaagagg

SEQ ID NO: 24535 - DNA, 28 bp, synthetic construct
  source 1..28: mol_type = other DNA
aagggttccctcaagaggaagtgagcgg

SEQ ID NO: 24536 - DNA, 28 bp, synthetic construct
  source 1..28: mol_type = other DNA
gacagcaccgctcacttcctcttgaggg

SEQ ID NO: 24537 - DNA, 28 bp, synthetic construct
  source 1..28: mol_type = other DNA
ggacagcaccgctcacttcctcttgagg

SEQ ID NO: 24538 - DNA, 28 bp, synthetic construct
  source 1..28: mol_type = other DNA
agaggaagtgagcggtgctgtcctcagg

SEQ ID NO: 24539 - DNA, 28 bp, synthetic construct
  source 1..28: mol_type = other DNA
ggaagtgagcggtgctgtcctcaggtgg

SEQ ID NO: 24540 - DNA, 28 bp, synthetic construct
  source 1..28: mol_type = other DNA
gagcggtgctgtcctcaggtggccatgg

SEQ ID NO: 24541 - DNA, 28 bp, synthetic construct
  source 1..28: mol_type = other DNA
agaagagctgtaccatggccacctgagg

SEQ ID NO: 24542 - DNA, 28 bp, synthetic construct
  source 1..28: mol_type = other DNA
gtggccatggtacagctcttctgcctgg

SEQ ID NO: 24543 - DNA, 28 bp, synthetic construct
  source 1..28: mol_type = other DNA
tggccatggtacagctcttctgcctggg

SEQ ID NO: 24544 - DNA, 28 bp, synthetic construct
  source 1..28: mol_type = other DNA
acacccaggcagaagagctgtaccatgg

SEQ ID NO: 24545 - DNA, 28 bp, synthetic construct
  source 1..28: mol_type = other DNA
tgaggctgccaagagaagggagtgaggg

SEQ ID NO: 24546 - DNA, 28 bp, synthetic construct
  source 1..28: mol_type = other DNA
ctgaggctgccaagagaagggagtgagg

SEQ ID NO: 24547 - DNA, 28 bp, synthetic construct
  source 1..28: mol_type = other DNA
gtcagggctgaggctgccaagagaaggg

SEQ ID NO: 24548 - DNA, 28 bp, synthetic construct
  source 1..28: mol_type = other DNA
ggtcagggctgaggctgccaagagaagg

SEQ ID NO: 24549 - DNA, 28 bp, synthetic construct
  source 1..28: mol_type = other DNA
cttggcagcctcagccctgaccctgtgg

SEQ ID NO: 24550 - DNA, 28 bp, synthetic construct
  source 1..28: mol_type = other DNA
aaatgcttccacagggtcagggctgagg

SEQ ID NO: 24551 - DNA, 28 bp, synthetic construct
  source 1..28: mol_type = other DNA
atcgcgaaatgcttccacagggtcaggg

SEQ ID NO: 24552 - DNA, 28 bp, synthetic construct
  source 1..28: mol_type = other DNA
catcgcgaaatgcttccacagggtcagg

SEQ ID NO: 24553 - DNA, 28 bp, synthetic construct
  source 1..28: mol_type = other DNA
ctgaccctgtggaagcatttcgcgatgg

SEQ ID NO: 24554 - DNA, 28 bp, synthetic construct
  source 1..28: mol_type = other DNA
ctgtccatcgcgaaatgcttccacaggg

SEQ ID NO: 24555 - DNA, 28 bp, synthetic construct
  source 1..28: mol_type = other DNA
tctgtccatcgcgaaatgcttccacagg

SEQ ID NO: 24556 - DNA, 28 bp, synthetic construct
  source 1..28: mol_type = other DNA
atggacagactcacaacctgaacctagg

SEQ ID NO: 24557 - DNA, 28 bp, synthetic construct
  source 1..28: mol_type = other DNA
aaaagaatggggcactcctaggttcagg

SEQ ID NO: 24558 - DNA, 28 bp, synthetic construct
  source 1..28: mol_type = other DNA
aattacaaaagaatggggcactcctagg

SEQ ID NO: 24559 - DNA, 28 bp, synthetic construct
  source 1..28: mol_type = other DNA
gtgccccattcttttgtaatttaaatgg

SEQ ID NO: 24560 - DNA, 28 bp, synthetic construct
  source 1..28: mol_type = other DNA
cagccatttaaattacaaaagaatgggg

SEQ ID NO: 24561 - DNA, 28 bp, synthetic construct
  source 1..28: mol_type = other DNA
gcagccatttaaattacaaaagaatggg

SEQ ID NO: 24562 - DNA, 28 bp, synthetic construct
  source 1..28: mol_type = other DNA
tgcagccatttaaattacaaaagaatgg

SEQ ID NO: 24563 - DNA, 28 bp, synthetic construct
  source 1..28: mol_type = other DNA
tatacagggtcagggagaggtggggggg

SEQ ID NO: 24564 - DNA, 28 bp, synthetic construct
  source 1..28: mol_type = other DNA
atatacagggtcagggagaggtgggggg

SEQ ID NO: 24565 - DNA, 28 bp, synthetic construct
  source 1..28: mol_type = other DNA
tatatacagggtcagggagaggtggggg

SEQ ID NO: 24566 - DNA, 28 bp, synthetic construct
  source 1..28: mol_type = other DNA
ctatatacagggtcagggagaggtgggg

SEQ ID NO: 24567 - DNA, 28 bp, synthetic construct
  source 1..28: mol_type = other DNA
gctatatacagggtcagggagaggtggg

SEQ ID NO: 24568 - DNA, 28 bp, synthetic construct
  source 1..28: mol_type = other DNA
ggctatatacagggtcagggagaggtgg

SEQ ID NO: 24569 - DNA, 28 bp, synthetic construct
  source 1..28: mol_type = other DNA
ctgggctatatacagggtcagggagagg

SEQ ID NO: 24570 - DNA, 28 bp, synthetic construct
  source 1..28: mol_type = other DNA
ccctgaccctgtatatagcccagccagg

SEQ ID NO: 24571 - DNA, 28 bp, synthetic construct
  source 1..28: mol_type = other DNA
gcctggctgggctatatacagggtcagg

SEQ ID NO: 24572 - DNA, 28 bp, synthetic construct
  source 1..28: mol_type = other DNA
ctggggcctggctgggctatatacaggg

SEQ ID NO: 24573 - DNA, 28 bp, synthetic construct
  source 1..28: mol_type = other DNA
cctgtatatagcccagccaggccccagg

SEQ ID NO: 24574 - DNA, 28 bp, synthetic construct
  source 1..28: mol_type = other DNA
tatatagcccagccaggccccaggcagg

SEQ ID NO: 24575 - DNA, 28 bp, synthetic construct
  source 1..28: mol_type = other DNA
atatagcccagccaggccccaggcaggg

SEQ ID NO: 24576 - DNA, 28 bp, synthetic construct
  source 1..28: mol_type = other DNA
ggttggccctgcctggggcctggctggg

SEQ ID NO: 24577 - DNA, 28 bp, synthetic construct
  source 1..28: mol_type = other DNA
gggttggccctgcctggggcctggctgg

SEQ ID NO: 24578 - DNA, 28 bp, synthetic construct
  source 1..28: mol_type = other DNA
agaagggttggccctgcctggggcctgg

SEQ ID NO: 24579 - DNA, 28 bp, synthetic construct
  source 1..28: mol_type = other DNA
agaggagaagggttggccctgcctgggg

SEQ ID NO: 24580 - DNA, 28 bp, synthetic construct
  source 1..28: mol_type = other DNA
aagaggagaagggttggccctgcctggg

SEQ ID NO: 24581 - DNA, 28 bp, synthetic construct
  source 1..28: mol_type = other DNA
caagaggagaagggttggccctgcctgg

SEQ ID NO: 24582 - DNA, 28 bp, synthetic construct
  source 1..28: mol_type = other DNA
gctttatttacaagaggagaagggttgg

SEQ ID NO: 24583 - DNA, 28 bp, synthetic construct
  source 1..28: mol_type = other DNA
cagggctttatttacaagaggagaaggg

SEQ ID NO: 24584 - DNA, 28 bp, synthetic construct
  source 1..28: mol_type = other DNA
ccttctcctcttgtaaataaagccctgg

SEQ ID NO: 24585 - DNA, 28 bp, synthetic construct
  source 1..28: mol_type = other DNA
cttctcctcttgtaaataaagccctggg

SEQ ID NO: 24586 - DNA, 28 bp, synthetic construct
  source 1..28: mol_type = other DNA
gtgatcccagggctttatttacaagagg

SEQ ID NO: 24587 - DNA, 28 bp, synthetic construct
  source 1..28: mol_type = other DNA
tcagaggcgacacacagtgatcccaggg

SEQ ID NO: 24588 - DNA, 28 bp, synthetic construct
  source 1..28: mol_type = other DNA
ctcagaggcgacacacagtgatcccagg

SEQ ID NO: 24589 - RNA, 20 nt, synthetic construct
  source 1..20: mol_type = other RNA
aatgttgatcttcttcaact

SEQ ID NO: 24590 - RNA, 20 nt, synthetic construct
  source 1..20: mol_type = other RNA
attcgtgcaaatagctatcc

SEQ ID NO: 24591 - RNA, 20 nt, synthetic construct
  source 1..20: mol_type = other RNA
ttcgtgcaaatagctatcca

SEQ ID NO: 24592 - RNA, 20 nt, synthetic construct
  source 1..20: mol_type = other RNA
tgcaaatagctatccaggga

SEQ ID NO: 24593 - RNA, 20 nt, synthetic construct
  source 1..20: mol_type = other RNA
gatggacagccaccctaatc

SEQ ID NO: 24594 - RNA, 20 nt, synthetic construct
  source 1..20: mol_type = other RNA
atggacagccaccctaatct

SEQ ID NO: 24595 - RNA, 20 nt, synthetic construct
  source 1..20: mol_type = other RNA
gccaccctaatctgggcttc

SEQ ID NO: 24596 - RNA, 20 nt, synthetic construct
  source 1..20: mol_type = other RNA
gccagaagcccagattaggg

SEQ ID NO: 24597 - RNA, 20 nt, synthetic construct
  source 1..20: mol_type = other RNA
atctgggcttctggcaccac

SEQ ID NO: 24598 - RNA, 20 nt, synthetic construct
  source 1..20: mol_type = other RNA
tggtgccagaagcccagatt

SEQ ID NO: 24599 - RNA, 20 nt, synthetic construct
  source 1..20: mol_type = other RNA
gcaccacaggcctccagcta

SEQ ID NO: 24600 - RNA, 20 nt, synthetic construct
  source 1..20: mol_type = other RNA
caccacaggcctccagctat

SEQ ID NO: 24601 - RNA, 20 nt, synthetic construct
  source 1..20: mol_type = other RNA
accacaggcctccagctatg

SEQ ID NO: 24602 - RNA, 20 nt, synthetic construct
  source 1..20: mol_type = other RNA
ggcctccagctatggggtcc

SEQ ID NO: 24603 - RNA, 20 nt, synthetic construct
  source 1..20: mol_type = other RNA
gcctccagctatggggtcca

SEQ ID NO: 24604 - RNA, 20 nt, synthetic construct
  source 1..20: mol_type = other RNA
accctggaccccatagctgg

SEQ ID NO: 24605 - RNA, 20 nt, synthetic construct
  source 1..20: mol_type = other RNA
cagaccctggaccccatagc

SEQ ID NO: 24606 - RNA, 20 nt, synthetic construct
  source 1..20: mol_type = other RNA
gggtccagggtctgaacctc

SEQ ID NO: 24607 - RNA, 20 nt, synthetic construct
  source 1..20: mol_type = other RNA
ggtccagggtctgaacctca

SEQ ID NO: 24608 - RNA, 20 nt, synthetic construct
  source 1..20: mol_type = other RNA
agggtctgaacctcagggcc

SEQ ID NO: 24609 - RNA, 20 nt, synthetic construct
  source 1..20: mol_type = other RNA
aggccctgaggttcagaccc

SEQ ID NO: 24610 - RNA, 20 nt, synthetic construct
  source 1..20: mol_type = other RNA
cctcagggcctggcagcttc

SEQ ID NO: 24611 - RNA, 20 nt, synthetic construct
  source 1..20: mol_type = other RNA
agggcctggcagcttcaggc

SEQ ID NO: 24612 - RNA, 20 nt, synthetic construct
  source 1..20: mol_type = other RNA
cctgaagctgccaggccctg

SEQ ID NO: 24613 - RNA, 20 nt, synthetic construct
  source 1..20: mol_type = other RNA
ggcgccagcctgaagctgcc

SEQ ID NO: 24614 - RNA, 20 nt, synthetic construct
  source 1..20: mol_type = other RNA
agcttcaggctggcgcccct

SEQ ID NO: 24615 - RNA, 20 nt, synthetic construct
  source 1..20: mol_type = other RNA
ttcaggctggcgcccctcgg

SEQ ID NO: 24616 - RNA, 20 nt, synthetic construct
  source 1..20: mol_type = other RNA
ctggcgcccctcggcggacg

SEQ ID NO: 24617 - RNA, 20 nt, synthetic construct
  source 1..20: mol_type = other RNA
cgcccctcggcggacgtggc

SEQ ID NO: 24618 - RNA, 20 nt, synthetic construct
  source 1..20: mol_type = other RNA
ctcggcggacgtggctggca

SEQ ID NO: 24619 - RNA, 20 nt, synthetic construct
  source 1..20: mol_type = other RNA
tgccagccacgtccgccgag

SEQ ID NO: 24620 - RNA, 20 nt, synthetic construct
  source 1..20: mol_type = other RNA
atgccagccacgtccgccga

SEQ ID NO: 24621 - RNA, 20 nt, synthetic construct
  source 1..20: mol_type = other RNA
catgccagccacgtccgccg

SEQ ID NO: 24622 - RNA, 20 nt, synthetic construct
  source 1..20: mol_type = other RNA
tggccttctcccatctgtga

SEQ ID NO: 24623 - RNA, 20 nt, synthetic construct
  source 1..20: mol_type = other RNA
aagccatcacagatgggaga

SEQ ID NO: 24624 - RNA, 20 nt, synthetic construct
  source 1..20: mol_type = other RNA
catctgtgatggcttcagca

SEQ ID NO: 24625 - RNA, 20 nt, synthetic construct
  source 1..20: mol_type = other RNA
ttgctgaagccatcacagat

SEQ ID NO: 24626 - RNA, 20 nt, synthetic construct
  source 1..20: mol_type = other RNA
cttgctgaagccatcacaga

SEQ ID NO: 24627 - RNA, 20 nt, synthetic construct
  source 1..20: mol_type = other RNA
ttcagcaaggctactgtgag

SEQ ID NO: 24628 - RNA, 20 nt, synthetic construct
  source 1..20: mol_type = other RNA
agcaaggctactgtgagtgg

SEQ ID NO: 24629 - RNA, 20 nt, synthetic construct
  source 1..20: mol_type = other RNA
aaggctactgtgagtggtgg

SEQ ID NO: 24630 - RNA, 20 nt, synthetic construct
  source 1..20: mol_type = other RNA
tactgtgagtggtggtggag

SEQ ID NO: 24631 - RNA, 20 nt, synthetic construct
  source 1..20: mol_type = other RNA
actgtgagtggtggtggaga

SEQ ID NO: 24632 - RNA, 20 nt, synthetic construct
  source 1..20: mol_type = other RNA
tgatggatattctggctctg

SEQ ID NO: 24633 - RNA, 20 nt, synthetic construct
  source 1..20: mol_type = other RNA
atgatggatattctggctct

SEQ ID NO: 24634 - RNA, 20 nt, synthetic construct
  source 1..20: mol_type = other RNA
aatgatggatattctggctc

SEQ ID NO: 24635 - RNA, 20 nt, synthetic construct
  source 1..20: mol_type = other RNA
gaagagaatgatggatattc

SEQ ID NO: 24636 - RNA, 20 nt, synthetic construct
  source 1..20: mol_type = other RNA
tccatcattctcttctgttc

SEQ ID NO: 24637 - RNA, 20 nt, synthetic construct
  source 1..20: mol_type = other RNA
tccagaacagaagagaatga

SEQ ID NO: 24638 - RNA, 20 nt, synthetic construct
  source 1..20: mol_type = other RNA
tgaggagctgtgggaagtgt

SEQ ID NO: 24639 - RNA, 20 nt, synthetic construct
  source 1..20: mol_type = other RNA
cttcccacagctcctcacag

SEQ ID NO: 24640 - RNA, 20 nt, synthetic construct
  source 1..20: mol_type = other RNA
ttcccacagctcctcacaga

SEQ ID NO: 24641 - RNA, 20 nt, synthetic construct
  source 1..20: mol_type = other RNA
tcccacagctcctcacagag

SEQ ID NO: 24642 - RNA, 20 nt, synthetic construct
  source 1..20: mol_type = other RNA
acagctcctcacagaggggt

SEQ ID NO: 24643 - RNA, 20 nt, synthetic construct
  source 1..20: mol_type = other RNA
cagctcctcacagaggggta

SEQ ID NO: 24644 - RNA, 20 nt, synthetic construct
  source 1..20: mol_type = other RNA
agctcctcacagaggggtag

SEQ ID NO: 24645 - RNA, 20 nt, synthetic construct
  source 1..20: mol_type = other RNA
tacccctctgtgaggagctg

SEQ ID NO: 24646 - RNA, 20 nt, synthetic construct
  source 1..20: mol_type = other RNA
cagaggggtaggggtgtgcg

SEQ ID NO: 24647 - RNA, 20 nt, synthetic construct
  source 1..20: mol_type = other RNA
agaggggtaggggtgtgcgt

SEQ ID NO: 24648 - RNA, 20 nt, synthetic construct
  source 1..20: mol_type = other RNA
gaggggtaggggtgtgcgtg

SEQ ID NO: 24649 - RNA, 20 nt, synthetic construct
  source 1..20: mol_type = other RNA
ggtaggggtgtgcgtggggc

SEQ ID NO: 24650 - RNA, 20 nt, synthetic construct
  source 1..20: mol_type = other RNA
tttgcttcaagctctgtagc

SEQ ID NO: 24651 - RNA, 20 nt, synthetic construct
  source 1..20: mol_type = other RNA
aattaaacacacacacaaat

SEQ ID NO: 24652 - RNA, 20 nt, synthetic construct
  source 1..20: mol_type = other RNA
acacacacacaaattggtca

SEQ ID NO: 24653 - RNA, 20 nt, synthetic construct
  source 1..20: mol_type = other RNA
aaattggtcatggcaactag

SEQ ID NO: 24654 - RNA, 20 nt, synthetic construct
  source 1..20: mol_type = other RNA
aattggtcatggcaactaga

SEQ ID NO: 24655 - RNA, 20 nt, synthetic construct
  source 1..20: mol_type = other RNA
agagggcctgaaaccacttc

SEQ ID NO: 24656 - RNA, 20 nt, synthetic construct
  source 1..20: mol_type = other RNA
gagggcctgaaaccacttcc

SEQ ID NO: 24657 - RNA, 20 nt, synthetic construct
  source 1..20: mol_type = other RNA
ggcctgaaaccacttccggg

SEQ ID NO: 24658 - RNA, 20 nt, synthetic construct
  source 1..20: mol_type = other RNA
aacctcccggaagtggtttc

SEQ ID NO: 24659 - RNA, 20 nt, synthetic construct
  source 1..20: mol_type = other RNA
ccacttccgggaggttttga

SEQ ID NO: 24660 - RNA, 20 nt, synthetic construct
  source 1..20: mol_type = other RNA
ttccgggaggttttgaagga

SEQ ID NO: 24661 - RNA, 20 nt, synthetic construct
  source 1..20: mol_type = other RNA
tccgggaggttttgaaggaa

SEQ ID NO: 24662 - RNA, 20 nt, synthetic construct
  source 1..20: mol_type = other RNA
ccgggaggttttgaaggaag

SEQ ID NO: 24663 - RNA, 20 nt, synthetic construct
  source 1..20: mol_type = other RNA
cgggaggttttgaaggaagg

SEQ ID NO: 24664 - RNA, 20 nt, synthetic construct
  source 1..20: mol_type = other RNA
ccccttccttcaaaacctcc

SEQ ID NO: 24665 - RNA, 20 nt, synthetic construct
  source 1..20: mol_type = other RNA
gttttgaaggaagggggtct

SEQ ID NO: 24666 - RNA, 20 nt, synthetic construct
  source 1..20: mol_type = other RNA
cttggctgcctcccactctt

SEQ ID NO: 24667 - RNA, 20 nt, synthetic construct
  source 1..20: mol_type = other RNA
gcagcaatcctaagagtggg

SEQ ID NO: 24668 - RNA, 20 nt, synthetic construct
  source 1..20: mol_type = other RNA
actcttaggattgctgctcc

SEQ ID NO: 24669 - RNA, 20 nt, synthetic construct
  source 1..20: mol_type = other RNA
ggagcagcaatcctaagagt

SEQ ID NO: 24670 - RNA, 20 nt, synthetic construct
  source 1..20: mol_type = other RNA
cttaggattgctgctcctgg

SEQ ID NO: 24671 - RNA, 20 nt, synthetic construct
  source 1..20: mol_type = other RNA
gctcctggaggcttctgcaa

SEQ ID NO: 24672 - RNA, 20 nt, synthetic construct
  source 1..20: mol_type = other RNA
ctggaggcttctgcaacgga

SEQ ID NO: 24673 - RNA, 20 nt, synthetic construct
  source 1..20: mol_type = other RNA
gaggcttctgcaacggatgg

SEQ ID NO: 24674 - RNA, 20 nt, synthetic construct
  source 1..20: mol_type = other RNA
aggcttctgcaacggatggt

SEQ ID NO: 24675 - RNA, 20 nt, synthetic construct
  source 1..20: mol_type = other RNA
aacggatggtgggtcaaagc

SEQ ID NO: 24676 - RNA, 20 nt, synthetic construct
  source 1..20: mol_type = other RNA
tggtgggtcaaagccggatg

SEQ ID NO: 24677 - RNA, 20 nt, synthetic construct
  source 1..20: mol_type = other RNA
gagtggagagaggcctcatc

SEQ ID NO: 24678 - RNA, 20 nt, synthetic construct
  source 1..20: mol_type = other RNA
gcctctctccactcagcagc

SEQ ID NO: 24679 - RNA, 20 nt, synthetic construct
  source 1..20: mol_type = other RNA
cctctctccactcagcagca

SEQ ID NO: 24680 - RNA, 20 nt, synthetic construct
  source 1..20: mol_type = other RNA
tctccactcagcagcaggga

SEQ ID NO: 24681 - RNA, 20 nt, synthetic construct
  source 1..20: mol_type = other RNA
ccctgctgctgagtggagag

SEQ ID NO: 24682 - RNA, 20 nt, synthetic construct
  source 1..20: mol_type = other RNA
actccttccctgctgctgag

SEQ ID NO: 24683 - RNA, 20 nt, synthetic construct
  source 1..20: mol_type = other RNA
gtactctgctgggagtgact

SEQ ID NO: 24684 - RNA, 20 nt, synthetic construct
  source 1..20: mol_type = other RNA
tgtactctgctgggagtgac

SEQ ID NO: 24685 - RNA, 20 nt, synthetic construct
  source 1..20: mol_type = other RNA
gctttcatttgtactctgct

SEQ ID NO: 24686 - RNA, 20 nt, synthetic construct
  source 1..20: mol_type = other RNA
ggctttcatttgtactctgc

SEQ ID NO: 24687 - RNA, 20 nt, synthetic construct
  source 1..20: mol_type = other RNA
gagtacaaatgaaagccttc

SEQ ID NO: 24688 - RNA, 20 nt, synthetic construct
  source 1..20: mol_type = other RNA
agtacaaatgaaagccttct

SEQ ID NO: 24689 - RNA, 20 nt, synthetic construct
  source 1..20: mol_type = other RNA
acaaatgaaagccttctggg

SEQ ID NO: 24690 - RNA, 20 nt, synthetic construct
  source 1..20: mol_type = other RNA
ctggggaggctccacccaga

SEQ ID NO: 24691 - RNA, 20 nt, synthetic construct
  source 1..20: mol_type = other RNA
agctgtttacaggactgggg

SEQ ID NO: 24692 - RNA, 20 nt, synthetic construct
  source 1..20: mol_type = other RNA
ctgagctgtttacaggactg

SEQ ID NO: 24693 - RNA, 20 nt, synthetic construct
  source 1..20: mol_type = other RNA
tcctgtaaacagctcagttc

SEQ ID NO: 24694 - RNA, 20 nt, synthetic construct
  source 1..20: mol_type = other RNA
cctgtaaacagctcagttca

SEQ ID NO: 24695 - RNA, 20 nt, synthetic construct
  source 1..20: mol_type = other RNA
aaacagctcagttcagggac

SEQ ID NO: 24696 - RNA, 20 nt, synthetic construct
  source 1..20: mol_type = other RNA
tcagggactggtgtacaagc

SEQ ID NO: 24697 - RNA, 20 nt, synthetic construct
  source 1..20: mol_type = other RNA
ggatgagaggctgagatggg

SEQ ID NO: 24698 - RNA, 20 nt, synthetic construct
  source 1..20: mol_type = other RNA
ctcagcctctcatccagctg

SEQ ID NO: 24699 - RNA, 20 nt, synthetic construct
  source 1..20: mol_type = other RNA
agctggatgagaggctgaga

SEQ ID NO: 24700 - RNA, 20 nt, synthetic construct
  source 1..20: mol_type = other RNA
ctctcatccagctgaggctc

SEQ ID NO: 24701 - RNA, 20 nt, synthetic construct
  source 1..20: mol_type = other RNA
cagagcctcagctggatgag

SEQ ID NO: 24702 - RNA, 20 nt, synthetic construct
  source 1..20: mol_type = other RNA
ggtgtggccagagcctcagc

SEQ ID NO: 24703 - RNA, 20 nt, synthetic construct
  source 1..20: mol_type = other RNA
ctctggccacaccgtgcaag

SEQ ID NO: 24704 - RNA, 20 nt, synthetic construct
  source 1..20: mol_type = other RNA
tagaagccacttgcacggtg

SEQ ID NO: 24705 - RNA, 20 nt, synthetic construct
  source 1..20: mol_type = other RNA
gcaagtggcttctagtttct

SEQ ID NO: 24706 - RNA, 20 nt, synthetic construct
  source 1..20: mol_type = other RNA
gaaactagaagccacttgca

SEQ ID NO: 24707 - RNA, 20 nt, synthetic construct
  source 1..20: mol_type = other RNA
cttggcaatctgagatcagc

SEQ ID NO: 24708 - RNA, 20 nt, synthetic construct
  source 1..20: mol_type = other RNA
cagctggctctgcaagatga

SEQ ID NO: 24709 - RNA, 20 nt, synthetic construct
  source 1..20: mol_type = other RNA
ctggctctgcaagatgaagg

SEQ ID NO: 24710 - RNA, 20 nt, synthetic construct
  source 1..20: mol_type = other RNA
tggagccaaatgacacaatc

SEQ ID NO: 24711 - RNA, 20 nt, synthetic construct
  source 1..20: mol_type = other RNA
tgagaccagattgtgtcatt

SEQ ID NO: 24712 - RNA, 20 nt, synthetic construct
  source 1..20: mol_type = other RNA
gacacaatctggtctcactg

SEQ ID NO: 24713 - RNA, 20 nt, synthetic construct
  source 1..20: mol_type = other RNA
ggtctcactgaggcccctca

SEQ ID NO: 24714 - RNA, 20 nt, synthetic construct
  source 1..20: mol_type = other RNA
ggcccctcacggtcattttt

SEQ ID NO: 24715 - RNA, 20 nt, synthetic construct
  source 1..20: mol_type = other RNA
ctccaaaaaatgaccgtgag

SEQ ID NO: 24716 - RNA, 20 nt, synthetic construct
  source 1..20: mol_type = other RNA
tctccaaaaaatgaccgtga

SEQ ID NO: 24717 - RNA, 20 nt, synthetic construct
  source 1..20: mol_type = other RNA
gtctccaaaaaatgaccgtg

SEQ ID NO: 24718 - RNA, 20 nt, synthetic construct
  source 1..20: mol_type = other RNA
ctaaataaacaaaaattttg

SEQ ID NO: 24719 - RNA, 20 nt, synthetic construct
  source 1..20: mol_type = other RNA
gagcccctaatactgagtct

SEQ ID NO: 24720 - RNA, 20 nt, synthetic construct
  source 1..20: mol_type = other RNA
ctcagtattaggggctcacc

SEQ ID NO: 24721 - RNA, 20 nt, synthetic construct
  source 1..20: mol_type = other RNA
aggggctcacctggttctgt

SEQ ID NO: 24722 - RNA, 20 nt, synthetic construct
  source 1..20: mol_type = other RNA
ctcacctggttctgtaggcc

SEQ ID NO: 24723 - RNA, 20 nt, synthetic construct
  source 1..20: mol_type = other RNA
tggttctgtaggcctggctg

SEQ ID NO: 24724 - RNA, 20 nt, synthetic construct
  source 1..20: mol_type = other RNA
ggttctgtaggcctggctgt

SEQ ID NO: 24725 - RNA, 20 nt, synthetic construct
  source 1..20: mol_type = other RNA
acagccaggcctacagaacc

SEQ ID NO: 24726 - RNA, 20 nt, synthetic construct
  source 1..20: mol_type = other RNA
tctgtaggcctggctgtggg

SEQ ID NO: 24727 - RNA, 20 nt, synthetic construct
  source 1..20: mol_type = other RNA
ctgtaggcctggctgtggga

SEQ ID NO: 24728 - RNA, 20 nt, synthetic construct
  source 1..20: mol_type = other RNA
ctgtgggagggtccatcact

SEQ ID NO: 24729 - RNA, 20 nt, synthetic construct
  source 1..20: mol_type = other RNA
tgtgggagggtccatcactt

SEQ ID NO: 24730 - RNA, 20 nt, synthetic construct
  source 1..20: mol_type = other RNA
atcacttgggagctctgatt

SEQ ID NO: 24731 - RNA, 20 nt, synthetic construct
  source 1..20: mol_type = other RNA
aaatcagagctcccaagtga

SEQ ID NO: 24732 - RNA, 20 nt, synthetic construct
  source 1..20: mol_type = other RNA
tggatttcgaacccctccac

SEQ ID NO: 24733 - RNA, 20 nt, synthetic construct
  source 1..20: mol_type = other RNA
ggatttcgaacccctccaca

SEQ ID NO: 24734 - RNA, 20 nt, synthetic construct
  source 1..20: mol_type = other RNA
ccctccacagggtagacgcc

SEQ ID NO: 24735 - RNA, 20 nt, synthetic construct
  source 1..20: mol_type = other RNA
ctggcgtctaccctgtggag

SEQ ID NO: 24736 - RNA, 20 nt, synthetic construct
  source 1..20: mol_type = other RNA
cctggcgtctaccctgtgga

SEQ ID NO: 24737 - RNA, 20 nt, synthetic construct
  source 1..20: mol_type = other RNA
acctggcgtctaccctgtgg

SEQ ID NO: 24738 - RNA, 20 nt, synthetic construct
  source 1..20: mol_type = other RNA
tacacctggcgtctaccctg

SEQ ID NO: 24739 - RNA, 20 nt, synthetic construct
  source 1..20: mol_type = other RNA
ggtagacgccaggtgtattc

SEQ ID NO: 24740 - RNA, 20 nt, synthetic construct
  source 1..20: mol_type = other RNA
tgtcgcagccggaatacacc

SEQ ID NO: 24741 - RNA, 20 nt, synthetic construct
  source 1..20: mol_type = other RNA
tattccggctgcgacaaaac

SEQ ID NO: 24742 - RNA, 20 nt, synthetic construct
  source 1..20: mol_type = other RNA
agcaccagttttgtcgcagc

SEQ ID NO: 24743 - RNA, 20 nt, synthetic construct
  source 1..20: mol_type = other RNA
agggacacagactcaccaga

SEQ ID NO: 24744 - RNA, 20 nt, synthetic construct
  source 1..20: mol_type = other RNA
acagactcaccagatggaag

SEQ ID NO: 24745 - RNA, 20 nt, synthetic construct
  source 1..20: mol_type = other RNA
cagatggaagaggcgcgagt

SEQ ID NO: 24746 - RNA, 20 nt, synthetic construct
  source 1..20: mol_type = other RNA
agatggaagaggcgcgagtt

SEQ ID NO: 24747 - RNA, 20 nt, synthetic construct
  source 1..20: mol_type = other RNA
gatggaagaggcgcgagttg

SEQ ID NO: 24748 - RNA, 20 nt, synthetic construct
  source 1..20: mol_type = other RNA
caactcgcgcctcttccatc

SEQ ID NO: 24749 - RNA, 20 nt, synthetic construct
  source 1..20: mol_type = other RNA
aagaggcgcgagttggggag

SEQ ID NO: 24750 - RNA, 20 nt, synthetic construct
  source 1..20: mol_type = other RNA
agaggcgcgagttggggagt

SEQ ID NO: 24751 - RNA, 20 nt, synthetic construct
  source 1..20: mol_type = other RNA
gaggcgcgagttggggagtg

SEQ ID NO: 24752 - RNA, 20 nt, synthetic construct
  source 1..20: mol_type = other RNA
aggcgcgagttggggagtgg

SEQ ID NO: 24753 - RNA, 20 nt, synthetic construct
  source 1..20: mol_type = other RNA
cgcgagttggggagtggggg

SEQ ID NO: 24754 - RNA, 20 nt, synthetic construct
  source 1..20: mol_type = other RNA
gcgagttggggagtgggggc

SEQ ID NO: 24755 - RNA, 20 nt, synthetic construct
  source 1..20: mol_type = other RNA
gagtgggggcgggtgctcca

SEQ ID NO: 24756 - RNA, 20 nt, synthetic construct
  source 1..20: mol_type = other RNA
gggcgggtgctccatggcca

SEQ ID NO: 24757 - RNA, 20 nt, synthetic construct
  source 1..20: mol_type = other RNA
ggcgggtgctccatggccat

SEQ ID NO: 24758 - RNA, 20 nt, synthetic construct
  source 1..20: mol_type = other RNA
gcgggtgctccatggccatg

SEQ ID NO: 24759 - RNA, 20 nt, synthetic construct
  source 1..20: mol_type = other RNA
cgggtgctccatggccatgg

SEQ ID NO: 24760 - RNA, 20 nt, synthetic construct
  source 1..20: mol_type = other RNA
gggtgctccatggccatggg

SEQ ID NO: 24761 - RNA, 20 nt, synthetic construct
  source 1..20: mol_type = other RNA
tgctccatggccatgggggg

SEQ ID NO: 24762 - RNA, 20 nt, synthetic construct
  source 1..20: mol_type = other RNA
gctccatggccatgggggga

SEQ ID NO: 24763 - RNA, 20 nt, synthetic construct
  source 1..20: mol_type = other RNA
ctccatggccatggggggag

SEQ ID NO: 24764 - RNA, 20 nt, synthetic construct
  source 1..20: mol_type = other RNA
tccatggccatggggggagg

SEQ ID NO: 24765 - RNA, 20 nt, synthetic construct
  source 1..20: mol_type = other RNA
ccatggccatggggggaggg

SEQ ID NO: 24766 - RNA, 20 nt, synthetic construct
  source 1..20: mol_type = other RNA
cccccctccccccatggcca

SEQ ID NO: 24767 - RNA, 20 nt, synthetic construct
  source 1..20: mol_type = other RNA
ccatggggggaggggggtag

SEQ ID NO: 24768 - RNA, 20 nt, synthetic construct
  source 1..20: mol_type = other RNA
ccgctacccccctcccccca

SEQ ID NO: 24769 - RNA, 20 nt, synthetic construct
  source 1..20: mol_type = other RNA
ggggaggggggtagcggatc

SEQ ID NO: 24770 - RNA, 20 nt, synthetic construct
  source 1..20: mol_type = other RNA
gggaggggggtagcggatct

SEQ ID NO: 24771 - RNA, 20 nt, synthetic construct
  source 1..20: mol_type = other RNA
gggaccagtcctcgaagcca

SEQ ID NO: 24772 - RNA, 20 nt, synthetic construct
  source 1..20: mol_type = other RNA
cagtcctcgaagccatggtg

SEQ ID NO: 24773 - RNA, 20 nt, synthetic construct
  source 1..20: mol_type = other RNA
cacaccatggcttcgaggac

SEQ ID NO: 24774 - RNA, 20 nt, synthetic construct
  source 1..20: mol_type = other RNA
gaagccatggtgtggcacca

SEQ ID NO: 24775 - RNA, 20 nt, synthetic construct
  source 1..20: mol_type = other RNA
ggtgccacaccatggcttcg

SEQ ID NO: 24776 - RNA, 20 nt, synthetic construct
  source 1..20: mol_type = other RNA
ccatggtgtggcaccatggc

SEQ ID NO: 24777 - RNA, 20 nt, synthetic construct
  source 1..20: mol_type = other RNA
gtgtggcaccatggctggca

SEQ ID NO: 24778 - RNA, 20 nt, synthetic construct
  source 1..20: mol_type = other RNA
tgtggcaccatggctggcat

SEQ ID NO: 24779 - RNA, 20 nt, synthetic construct
  source 1..20: mol_type = other RNA
ggcaccatggctggcatggg

SEQ ID NO: 24780 - RNA, 20 nt, synthetic construct
  source 1..20: mol_type = other RNA
gcaccatggctggcatgggc

SEQ ID NO: 24781 - RNA, 20 nt, synthetic construct
  source 1..20: mol_type = other RNA
catggctggcatgggcgggt

SEQ ID NO: 24782 - RNA, 20 nt, synthetic construct
  source 1..20: mol_type = other RNA
ctacccgcccatgccagcca

SEQ ID NO: 24783 - RNA, 20 nt, synthetic construct
  source 1..20: mol_type = other RNA
tggcatgggcgggtaggcgt

SEQ ID NO: 24784 - RNA, 20 nt, synthetic construct
  source 1..20: mol_type = other RNA
ggcatgggcgggtaggcgta

SEQ ID NO: 24785 - RNA, 20 nt, synthetic construct
  source 1..20: mol_type = other RNA
gcatgggcgggtaggcgtag

SEQ ID NO: 24786 - RNA, 20 nt, synthetic construct
  source 1..20: mol_type = other RNA
gggcgggtaggcgtaggggt

SEQ ID NO: 24787 - RNA, 20 nt, synthetic construct
  source 1..20: mol_type = other RNA
taggccccgcagagatgttc

SEQ ID NO: 24788 - RNA, 20 nt, synthetic construct
  source 1..20: mol_type = other RNA
aggccccgcagagatgttct

SEQ ID NO: 24789 - RNA, 20 nt, synthetic construct
  source 1..20: mol_type = other RNA
ccccgcagagatgttctggg

SEQ ID NO: 24790 - RNA, 20 nt, synthetic construct
  source 1..20: mol_type = other RNA
cccgcagagatgttctgggt

SEQ ID NO: 24791 - RNA, 20 nt, synthetic construct
  source 1..20: mol_type = other RNA
ccgcagagatgttctgggtg

SEQ ID NO: 24792 - RNA, 20 nt, synthetic construct
  source 1..20: mol_type = other RNA
ccacccagaacatctctgcg

SEQ ID NO: 24793 - RNA, 20 nt, synthetic construct
  source 1..20: mol_type = other RNA
cccacccagaacatctctgc

SEQ ID NO: 24794 - RNA, 20 nt, synthetic construct
  source 1..20: mol_type = other RNA
ccccacccagaacatctctg

SEQ ID NO: 24795 - RNA, 20 nt, synthetic construct
  source 1..20: mol_type = other RNA
gttctgggtggggctccaca

SEQ ID NO: 24796 - RNA, 20 nt, synthetic construct
  source 1..20: mol_type = other RNA
cacatggtaacgctctcctg

SEQ ID NO: 24797 - RNA, 20 nt, synthetic construct
  source 1..20: mol_type = other RNA
ctcaggagagcgttaccatg

SEQ ID NO: 24798 - RNA, 20 nt, synthetic construct
  source 1..20: mol_type = other RNA
tctcctgaggcctgcaagaa

SEQ ID NO: 24799 - RNA, 20 nt, synthetic construct
  source 1..20: mol_type = other RNA
cagcctttcttgcaggcctc

SEQ ID NO: 24800 - RNA, 20 nt, synthetic construct
  source 1..20: mol_type = other RNA
ctgcaagaaaggctgacgtc

SEQ ID NO: 24801 - RNA, 20 nt, synthetic construct
  source 1..20: mol_type = other RNA
cagacgtcagcctttcttgc

SEQ ID NO: 24802 - RNA, 20 nt, synthetic construct
  source 1..20: mol_type = other RNA
aaggtgaggaggcttgaggg

SEQ ID NO: 24803 - RNA, 20 nt, synthetic construct
  source 1..20: mol_type = other RNA
gcaaaggtgaggaggcttga

SEQ ID NO: 24804 - RNA, 20 nt, synthetic construct
  source 1..20: mol_type = other RNA
agcaaaggtgaggaggcttg

SEQ ID NO: 24805 - RNA, 20 nt, synthetic construct
  source 1..20: mol_type = other RNA
agaggaaagcaaaggtgagg

SEQ ID NO: 24806 - RNA, 20 nt, synthetic construct
  source 1..20: mol_type = other RNA
agaagaggaaagcaaaggtg

SEQ ID NO: 24807 - RNA, 20 nt, synthetic construct
  source 1..20: mol_type = other RNA
acagcagaagaggaaagcaa

SEQ ID NO: 24808 - RNA, 20 nt, synthetic construct
  source 1..20: mol_type = other RNA
ctttcctcttctgctgtctg

SEQ ID NO: 24809 - RNA, 20 nt, synthetic construct
  source 1..20: mol_type = other RNA
tttcctcttctgctgtctga

SEQ ID NO: 24810 - RNA, 20 nt, synthetic construct
  source 1..20: mol_type = other RNA
aagccctcagacagcagaag

SEQ ID NO: 24811 - RNA, 20 nt, synthetic construct
  source 1..20: mol_type = other RNA
agcattcaaagatgaggaga

SEQ ID NO: 24812 - RNA, 20 nt, synthetic construct
  source 1..20: mol_type = other RNA
gctaaaagcattcaaagatg

SEQ ID NO: 24813 - RNA, 20 nt, synthetic construct
  source 1..20: mol_type = other RNA
tgcttttagctgagagaaga

SEQ ID NO: 24814 - RNA, 20 nt, synthetic construct
  source 1..20: mol_type = other RNA
gcttttagctgagagaagaa

SEQ ID NO: 24815 - RNA, 20 nt, synthetic construct
  source 1..20: mol_type = other RNA
tttagctgagagaagaaggg

SEQ ID NO: 24816 - RNA, 20 nt, synthetic construct
  source 1..20: mol_type = other RNA
ttagctgagagaagaaggga

SEQ ID NO: 24817 - RNA, 20 nt, synthetic construct
  source 1..20: mol_type = other RNA
agagtgactggacccaggaa

SEQ ID NO: 24818 - RNA, 20 nt, synthetic construct
  source 1..20: mol_type = other RNA
aagagtgactggacccagga

SEQ ID NO: 24819 - RNA, 20 nt, synthetic construct
  source 1..20: mol_type = other RNA
tgggtccagtcactcttacc

SEQ ID NO: 24820 - RNA, 20 nt, synthetic construct
  source 1..20: mol_type = other RNA
gggtccagtcactcttacct

SEQ ID NO: 24821 - RNA, 20 nt, synthetic construct
  source 1..20: mol_type = other RNA
aggtaagagtgactggaccc

SEQ ID NO: 24822 - RNA, 20 nt, synthetic construct
  source 1..20: mol_type = other RNA
aatgcccaggtaagagtgac

SEQ ID NO: 24823 - RNA, 20 nt, synthetic construct
  source 1..20: mol_type = other RNA
ctcttacctgggcatttgac

SEQ ID NO: 24824 - RNA, 20 nt, synthetic construct
  source 1..20: mol_type = other RNA
tcttacctgggcatttgaca

SEQ ID NO: 24825 - RNA, 20 nt, synthetic construct
  source 1..20: mol_type = other RNA
gggcatttgacagggtgacc

SEQ ID NO: 24826 - RNA, 20 nt, synthetic construct
  source 1..20: mol_type = other RNA
ggcatttgacagggtgacct

SEQ ID NO: 24827 - RNA, 20 nt, synthetic construct
  source 1..20: mol_type = other RNA
ggtcaccctgtcaaatgccc

SEQ ID NO: 24828 - RNA, 20 nt, synthetic construct
  source 1..20: mol_type = other RNA
agtggagaagctgcaggccc

SEQ ID NO: 24829 - RNA, 20 nt, synthetic construct
  source 1..20: mol_type = other RNA
gaagcaagtggagaagctgc

SEQ ID NO: 24830 - RNA, 20 nt, synthetic construct
  source 1..20: mol_type = other RNA
ggaagagctgaagaagcaag

SEQ ID NO: 24831 - RNA, 20 nt, synthetic construct
  source 1..20: mol_type = other RNA
tgagcgcatgaatgaggaga

SEQ ID NO: 24832 - RNA, 20 nt, synthetic construct
  source 1..20: mol_type = other RNA
tgatcgtgagcgcatgaatg

SEQ ID NO: 24833 - RNA, 20 nt, synthetic construct
  source 1..20: mol_type = other RNA
cacgatcactgcgctccctc

SEQ ID NO: 24834 - RNA, 20 nt, synthetic construct
  source 1..20: mol_type = other RNA
cttcgaggaggacttccaga

SEQ ID NO: 24835 - RNA, 20 nt, synthetic construct
  source 1..20: mol_type = other RNA
tcttcgaggaggacttccag

SEQ ID NO: 24836 - RNA, 20 nt, synthetic construct
  source 1..20: mol_type = other RNA
cctcctcgaagatcttcacc

SEQ ID NO: 24837 - RNA, 20 nt, synthetic construct
  source 1..20: mol_type = other RNA
tcgaagatcttcacctggtg

SEQ ID NO: 24838 - RNA, 20 nt, synthetic construct
  source 1..20: mol_type = other RNA
aagatcttcacctggtgtgg

SEQ ID NO: 24839 - RNA, 20 nt, synthetic construct
  source 1..20: mol_type = other RNA
agatcttcacctggtgtgga

SEQ ID NO: 24840 - RNA, 20 nt, synthetic construct
  source 1..20: mol_type = other RNA
tcttcacctggtgtggaggg

SEQ ID NO: 24841 - RNA, 20 nt, synthetic construct
  source 1..20: mol_type = other RNA
cttcacctggtgtggaggga

SEQ ID NO: 24842 - RNA, 20 nt, synthetic construct
  source 1..20: mol_type = other RNA
tgtggagggagggtgaagag

SEQ ID NO: 24843 - RNA, 20 nt, synthetic construct
  source 1..20: mol_type = other RNA
gaggcttccgggaggaaatc

SEQ ID NO: 24844 - RNA, 20 nt, synthetic construct
  source 1..20: mol_type = other RNA
cagcaggtgaggcttccggg

SEQ ID NO: 24845 - RNA, 20 nt, synthetic construct
  source 1..20: mol_type = other RNA
aaacagcaggtgaggcttcc

SEQ ID NO: 24846 - RNA, 20 nt, synthetic construct
  source 1..20: mol_type = other RNA
gaaacagcaggtgaggcttc

SEQ ID NO: 24847 - RNA, 20 nt, synthetic construct
  source 1..20: mol_type = other RNA
agttgctgaaacagcaggtg

SEQ ID NO: 24848 - RNA, 20 nt, synthetic construct
  source 1..20: mol_type = other RNA
gaatgagttgctgaaacagc

SEQ ID NO: 24849 - RNA, 20 nt, synthetic construct
  source 1..20: mol_type = other RNA
tgaccagctcctgtttcctt

SEQ ID NO: 24850 - RNA, 20 nt, synthetic construct
  source 1..20: mol_type = other RNA
ccagctcctgtttccttagg

SEQ ID NO: 24851 - RNA, 20 nt, synthetic construct
  source 1..20: mol_type = other RNA
cagctcctgtttccttagga

SEQ ID NO: 24852 - RNA, 20 nt, synthetic construct
  source 1..20: mol_type = other RNA
cctcctaaggaaacaggagc

SEQ ID NO: 24853 - RNA, 20 nt, synthetic construct
  source 1..20: mol_type = other RNA
aggggccctcctaaggaaac

SEQ ID NO: 24854 - RNA, 20 nt, synthetic construct
  source 1..20: mol_type = other RNA
aggagggcccctgctccttc

SEQ ID NO: 24855 - RNA, 20 nt, synthetic construct
  source 1..20: mol_type = other RNA
ggagggcccctgctccttct

SEQ ID NO: 24856 - RNA, 20 nt, synthetic construct
  source 1..20: mol_type = other RNA
tgggagcccagaaggagcag

SEQ ID NO: 24857 - RNA, 20 nt, synthetic construct
  source 1..20: mol_type = other RNA
ttgggagcccagaaggagca

SEQ ID NO: 24858 - RNA, 20 nt, synthetic construct
  source 1..20: mol_type = other RNA
tttgggagcccagaaggagc

SEQ ID NO: 24859 - RNA, 20 nt, synthetic construct
  source 1..20: mol_type = other RNA
tctgggctcccaaatgctgt

SEQ ID NO: 24860 - RNA, 20 nt, synthetic construct
  source 1..20: mol_type = other RNA
acagcatttgggagcccaga

SEQ ID NO: 24861 - RNA, 20 nt, synthetic construct
  source 1..20: mol_type = other RNA
gggctcccaaatgctgttgg

SEQ ID NO: 24862 - RNA, 20 nt, synthetic construct
  source 1..20: mol_type = other RNA
aatgctgttggtggagatga

SEQ ID NO: 24863 - RNA, 20 nt, synthetic construct
  source 1..20: mol_type = other RNA
catctccaccaacagcattt

SEQ ID NO: 24864 - RNA, 20 nt, synthetic construct
  source 1..20: mol_type = other RNA
tcatctccaccaacagcatt

SEQ ID NO: 24865 - RNA, 20 nt, synthetic construct
  source 1..20: mol_type = other RNA
gctgttggtggagatgatgg

SEQ ID NO: 24866 - RNA, 20 nt, synthetic construct
  source 1..20: mol_type = other RNA
ctgttggtggagatgatggc

SEQ ID NO: 24867 - RNA, 20 nt, synthetic construct
  source 1..20: mol_type = other RNA
tgttggtggagatgatggcg

SEQ ID NO: 24868 - RNA, 20 nt, synthetic construct
  source 1..20: mol_type = other RNA
gtggagatgatggcggggtt

SEQ ID NO: 24869 - RNA, 20 nt, synthetic construct
  source 1..20: mol_type = other RNA
ggatgctcagtgcttcctcc

SEQ ID NO: 24870 - RNA, 20 nt, synthetic construct
  source 1..20: mol_type = other RNA
gatgctcagtgcttcctcca

SEQ ID NO: 24871 - RNA, 20 nt, synthetic construct
  source 1..20: mol_type = other RNA
tcagtgcttcctccagggcc

SEQ ID NO: 24872 - RNA, 20 nt, synthetic construct
  source 1..20: mol_type = other RNA
ttcctccagggcctggaatc

SEQ ID NO: 24873 - RNA, 20 nt, synthetic construct
  source 1..20: mol_type = other RNA
ttcctgattccaggccctgg

SEQ ID NO: 24874 - RNA, 20 nt, synthetic construct
  source 1..20: mol_type = other RNA
ggcctggaatcaggaaaaga

SEQ ID NO: 24875 - RNA, 20 nt, synthetic construct
  source 1..20: mol_type = other RNA
gcctggaatcaggaaaagat

SEQ ID NO: 24876 - RNA, 20 nt, synthetic construct
  source 1..20: mol_type = other RNA
tcccatcttttcctgattcc

SEQ ID NO: 24877 - RNA, 20 nt, synthetic construct
  source 1..20: mol_type = other RNA
gtgccttggcccgggtccct

SEQ ID NO: 24878 - RNA, 20 nt, synthetic construct
  source 1..20: mol_type = other RNA
caaggtgggtgccttggccc

SEQ ID NO: 24879 - RNA, 20 nt, synthetic construct
  source 1..20: mol_type = other RNA
acaaggtgggtgccttggcc

SEQ ID NO: 24880 - RNA, 20 nt, synthetic construct
  source 1..20: mol_type = other RNA
gctcaacaaggtgggtgcct

SEQ ID NO: 24881 - RNA, 20 nt, synthetic construct
  source 1..20: mol_type = other RNA
cacccaccttgttgagccgc

SEQ ID NO: 24882 - RNA, 20 nt, synthetic construct
  source 1..20: mol_type = other RNA
atccagcggctcaacaaggt

SEQ ID NO: 24883 - RNA, 20 nt, synthetic construct
  source 1..20: mol_type = other RNA
gatccagcggctcaacaagg

SEQ ID NO: 24884 - RNA, 20 nt, synthetic construct
  source 1..20: mol_type = other RNA
ggagatccagcggctcaaca

SEQ ID NO: 24885 - RNA, 20 nt, synthetic construct
  source 1..20: mol_type = other RNA
gccgctggatctccttttcc

SEQ ID NO: 24886 - RNA, 20 nt, synthetic construct
  source 1..20: mol_type = other RNA
accaggaaaaggagatccag

SEQ ID NO: 24887 - RNA, 20 nt, synthetic construct
  source 1..20: mol_type = other RNA
tttcctggtactcacgctgt

SEQ ID NO: 24888 - RNA, 20 nt, synthetic construct
  source 1..20: mol_type = other RNA
ttcctggtactcacgctgtc

SEQ ID NO: 24889 - RNA, 20 nt, synthetic construct
  source 1..20: mol_type = other RNA
acagcgtgagtaccaggaaa

SEQ ID NO: 24890 - RNA, 20 nt, synthetic construct
  source 1..20: mol_type = other RNA
tactcacgctgtcgggtgag

SEQ ID NO: 24891 - RNA, 20 nt, synthetic construct
  source 1..20: mol_type = other RNA
actcacgctgtcgggtgagt

SEQ ID NO: 24892 - RNA, 20 nt, synthetic construct
  source 1..20: mol_type = other RNA
gtgggctcagctgatcctgc

SEQ ID NO: 24893 - RNA, 20 nt, synthetic construct
  source 1..20: mol_type = other RNA
cctgcaggtacttgaccttt

SEQ ID NO: 24894 - RNA, 20 nt, synthetic construct
  source 1..20: mol_type = other RNA
ccaaaaggtcaagtacctgc

SEQ ID NO: 24895 - RNA, 20 nt, synthetic construct
  source 1..20: mol_type = other RNA
gaccttttggcgcagctcct

SEQ ID NO: 24896 - RNA, 20 nt, synthetic construct
  source 1..20: mol_type = other RNA
ggccaaggagctgcgccaaa

SEQ ID NO: 24897 - RNA, 20 nt, synthetic construct
  source 1..20: mol_type = other RNA
gcagctgacagcagaggcca

SEQ ID NO: 24898 - RNA, 20 nt, synthetic construct
  source 1..20: mol_type = other RNA
tgctgtcagctgctccttgt

SEQ ID NO: 24899 - RNA, 20 nt, synthetic construct
  source 1..20: mol_type = other RNA
caaggagcagctgacagcag

SEQ ID NO: 24900 - RNA, 20 nt, synthetic construct
  source 1..20: mol_type = other RNA
gctgctccttgtcggtctgc

SEQ ID NO: 24901 - RNA, 20 nt, synthetic construct
  source 1..20: mol_type = other RNA
ctgctccttgtcggtctgca

SEQ ID NO: 24902 - RNA, 20 nt, synthetic construct
  source 1..20: mol_type = other RNA
gtcggtctgcagggaataca

SEQ ID NO: 24903 - RNA, 20 nt, synthetic construct
  source 1..20: mol_type = other RNA
gtattccctgcagaccgaca

SEQ ID NO: 24904 - RNA, 20 nt, synthetic construct
  source 1..20: mol_type = other RNA
gtctgcagggaatacaaggt

SEQ ID NO: 24905 - RNA, 20 nt, synthetic construct
  source 1..20: mol_type = other RNA
gaggaggcaagtgtgactgc

SEQ ID NO: 24906 - RNA, 20 nt, synthetic construct
  source 1..20: mol_type = other RNA
tgcctcctccatttcaatct

SEQ ID NO: 24907 - RNA, 20 nt, synthetic construct
  source 1..20: mol_type = other RNA
ctccatttcaatcttggact

SEQ ID NO: 24908 - RNA, 20 nt, synthetic construct
  source 1..20: mol_type = other RNA
gtccaagattgaaatggagg

SEQ ID NO: 24909 - RNA, 20 nt, synthetic construct
  source 1..20: mol_type = other RNA
caagtccaagattgaaatgg

SEQ ID NO: 24910 - RNA, 20 nt, synthetic construct
  source 1..20: mol_type = other RNA
tttcaatcttggacttggcc

SEQ ID NO: 24911 - RNA, 20 nt, synthetic construct
  source 1..20: mol_type = other RNA
ggccaagtccaagattgaaa

SEQ ID NO: 24912 - RNA, 20 nt, synthetic construct
  source 1..20: mol_type = other RNA
caatcttggacttggccagg

SEQ ID NO: 24913 - RNA, 20 nt, synthetic construct
  source 1..20: mol_type = other RNA
acttggccaggaggagcttg

SEQ ID NO: 24914 - RNA, 20 nt, synthetic construct
  source 1..20: mol_type = other RNA
ctttgaccgcaagctcctcc

SEQ ID NO: 24915 - RNA, 20 nt, synthetic construct
  source 1..20: mol_type = other RNA
acgctgcttctgctcccgct

SEQ ID NO: 24916 - RNA, 20 nt, synthetic construct
  source 1..20: mol_type = other RNA
tctgctcccgctcggcctcc

SEQ ID NO: 24917 - RNA, 20 nt, synthetic construct
  source 1..20: mol_type = other RNA
gactgacctggaggccgagc

SEQ ID NO: 24918 - RNA, 20 nt, synthetic construct
  source 1..20: mol_type = other RNA
tgactgacctggaggccgag

SEQ ID NO: 24919 - RNA, 20 nt, synthetic construct
  source 1..20: mol_type = other RNA
gaagcaggtgactgacctgg

SEQ ID NO: 24920 - RNA, 20 nt, synthetic construct
  source 1..20: mol_type = other RNA
gcagaagcaggtgactgacc

SEQ ID NO: 24921 - RNA, 20 nt, synthetic construct
  source 1..20: mol_type = other RNA
gctggctgatttgcagaagc

SEQ ID NO: 24922 - RNA, 20 nt, synthetic construct
  source 1..20: mol_type = other RNA
cactgagctgcgtcagaagc

SEQ ID NO: 24923 - RNA, 20 nt, synthetic construct
  source 1..20: mol_type = other RNA
tctgacgcagctcagtgatc

SEQ ID NO: 24924 - RNA, 20 nt, synthetic construct
  source 1..20: mol_type = other RNA
ctgacgcagctcagtgatct

SEQ ID NO: 24925 - RNA, 20 nt, synthetic construct
  source 1..20: mol_type = other RNA
gctcagtgatctgggttcag

SEQ ID NO: 24926 - RNA, 20 nt, synthetic construct
  source 1..20: mol_type = other RNA
atctgggttcagaggcagag

SEQ ID NO: 24927 - RNA, 20 nt, synthetic construct
  source 1..20: mol_type = other RNA
agaaggtaatgtggggttcc

SEQ ID NO: 24928 - RNA, 20 nt, synthetic construct
  source 1..20: mol_type = other RNA
tatgagcagaaggtaatgtg

SEQ ID NO: 24929 - RNA, 20 nt, synthetic construct
  source 1..20: mol_type = other RNA
gtatgagcagaaggtaatgt

SEQ ID NO: 24930 - RNA, 20 nt, synthetic construct
  source 1..20: mol_type = other RNA
agtatgagcagaaggtaatg

SEQ ID NO: 24931 - RNA, 20 nt, synthetic construct
  source 1..20: mol_type = other RNA
ctgctcatactgctgcttca

SEQ ID NO: 24932 - RNA, 20 nt, synthetic construct
  source 1..20: mol_type = other RNA
gaagcagcagtatgagcaga

SEQ ID NO: 24933 - RNA, 20 nt, synthetic construct
  source 1..20: mol_type = other RNA
catactgctgcttcatggac

SEQ ID NO: 24934 - RNA, 20 nt, synthetic construct
  source 1..20: mol_type = other RNA
gcttcatggaccggaaatgc

SEQ ID NO: 24935 - RNA, 20 nt, synthetic construct
  source 1..20: mol_type = other RNA
agcagtgggaccagcatttc

SEQ ID NO: 24936 - RNA, 20 nt, synthetic construct
  source 1..20: mol_type = other RNA
gctggaagtgaacaagcagt

SEQ ID NO: 24937 - RNA, 20 nt, synthetic construct
  source 1..20: mol_type = other RNA
tgctggaagtgaacaagcag

SEQ ID NO: 24938 - RNA, 20 nt, synthetic construct
  source 1..20: mol_type = other RNA
ttgttcacttccagcagctg

SEQ ID NO: 24939 - RNA, 20 nt, synthetic construct
  source 1..20: mol_type = other RNA
tgttcacttccagcagctgt

SEQ ID NO: 24940 - RNA, 20 nt, synthetic construct
  source 1..20: mol_type = other RNA
gttcacttccagcagctgtg

SEQ ID NO: 24941 - RNA, 20 nt, synthetic construct
  source 1..20: mol_type = other RNA
cagcagctgtggggagagac

SEQ ID NO: 24942 - RNA, 20 nt, synthetic construct
  source 1..20: mol_type = other RNA
cagtctctccccacagctgc

SEQ ID NO: 24943 - RNA, 20 nt, synthetic construct
  source 1..20: mol_type = other RNA
ggggagagactggagttagc

SEQ ID NO: 24944 - RNA, 20 nt, synthetic construct
  source 1..20: mol_type = other RNA
gtggccgaggtggcagtagt

SEQ ID NO: 24945 - RNA, 20 nt, synthetic construct
  source 1..20: mol_type = other RNA
ggtggccgaggtggcagtag

SEQ ID NO: 24946 - RNA, 20 nt, synthetic construct
  source 1..20: mol_type = other RNA
agtgaggtaggtggccgagg

SEQ ID NO: 24947 - RNA, 20 nt, synthetic construct
  source 1..20: mol_type = other RNA
cgcagtgaggtaggtggccg

SEQ ID NO: 24948 - RNA, 20 nt, synthetic construct
  source 1..20: mol_type = other RNA
cagcagcgcagtgaggtagg

SEQ ID NO: 24949 - RNA, 20 nt, synthetic construct
  source 1..20: mol_type = other RNA
gagcagcagcgcagtgaggt

SEQ ID NO: 24950 - RNA, 20 nt, synthetic construct
  source 1..20: mol_type = other RNA
gctggagcagcagcgcagtg

SEQ ID NO: 24951 - RNA, 20 nt, synthetic construct
  source 1..20: mol_type = other RNA
cagcatcttcaccttcttct

SEQ ID NO: 24952 - RNA, 20 nt, synthetic construct
  source 1..20: mol_type = other RNA
cgagaagaaggtgaagatgc

SEQ ID NO: 24953 - RNA, 20 nt, synthetic construct
  source 1..20: mol_type = other RNA
cttcttctcggctgcgccca

SEQ ID NO: 24954 - RNA, 20 nt, synthetic construct
  source 1..20: mol_type = other RNA
cttgggcgcagccgagaaga

SEQ ID NO: 24955 - RNA, 20 nt, synthetic construct
  source 1..20: mol_type = other RNA
gcgcccaaggccaccacctc

SEQ ID NO: 24956 - RNA, 20 nt, synthetic construct
  source 1..20: mol_type = other RNA
cgcccaaggccaccacctct

SEQ ID NO: 24957 - RNA, 20 nt, synthetic construct
  source 1..20: mol_type = other RNA
gtcccagaggtggtggcctt

SEQ ID NO: 24958 - RNA, 20 nt, synthetic construct
  source 1..20: mol_type = other RNA
ggtcccagaggtggtggcct

SEQ ID NO: 24959 - RNA, 20 nt, synthetic construct
  source 1..20: mol_type = other RNA
aggtaaggtcccagaggtgg

SEQ ID NO: 24960 - RNA, 20 nt, synthetic construct
  source 1..20: mol_type = other RNA
ggcaggtaaggtcccagagg

SEQ ID NO: 24961 - RNA, 20 nt, synthetic construct
  source 1..20: mol_type = other RNA
gacggcaggtaaggtcccag

SEQ ID NO: 24962 - RNA, 20 nt, synthetic construct
  source 1..20: mol_type = other RNA
tacctgccgtcacactagcc

SEQ ID NO: 24963 - RNA, 20 nt, synthetic construct
  source 1..20: mol_type = other RNA
acctgccgtcacactagcct

SEQ ID NO: 24964 - RNA, 20 nt, synthetic construct
  source 1..20: mol_type = other RNA
cctgccgtcacactagcctg

SEQ ID NO: 24965 - RNA, 20 nt, synthetic construct
  source 1..20: mol_type = other RNA
ccccaggctagtgtgacggc

SEQ ID NO: 24966 - RNA, 20 nt, synthetic construct
  source 1..20: mol_type = other RNA
ttctccccaggctagtgtga

SEQ ID NO: 24967 - RNA, 20 nt, synthetic construct
  source 1..20: mol_type = other RNA
tagcctggggagaagcacag

SEQ ID NO: 24968 - RNA, 20 nt, synthetic construct
  source 1..20: mol_type = other RNA
gctcctctgtgcttctcccc

SEQ ID NO: 24969 - RNA, 20 nt, synthetic construct
  source 1..20: mol_type = other RNA
gctggacagcagcaggtatg

SEQ ID NO: 24970 - RNA, 20 nt, synthetic construct
  source 1..20: mol_type = other RNA
ggcagtggctggacagcagc

SEQ ID NO: 24971 - RNA, 20 nt, synthetic construct
  source 1..20: mol_type = other RNA
acaggcaagaaggcagtggc

SEQ ID NO: 24972 - RNA, 20 nt, synthetic construct
  source 1..20: mol_type = other RNA
agggacaggcaagaaggcag

SEQ ID NO: 24973 - RNA, 20 nt, synthetic construct
  source 1..20: mol_type = other RNA
ttgcctgtcccttccatctt

SEQ ID NO: 24974 - RNA, 20 nt, synthetic construct
  source 1..20: mol_type = other RNA
tcaccgaagatggaagggac

SEQ ID NO: 24975 - RNA, 20 nt, synthetic construct
  source 1..20: mol_type = other RNA
ccttccatcttcggtgagcc

SEQ ID NO: 24976 - RNA, 20 nt, synthetic construct
  source 1..20: mol_type = other RNA
caggctcaccgaagatggaa

SEQ ID NO: 24977 - RNA, 20 nt, synthetic construct
  source 1..20: mol_type = other RNA
ccaggctcaccgaagatgga

SEQ ID NO: 24978 - RNA, 20 nt, synthetic construct
  source 1..20: mol_type = other RNA
gcggccaggctcaccgaaga

SEQ ID NO: 24979 - RNA, 20 nt, synthetic construct
  source 1..20: mol_type = other RNA
gagggtgcgtctgggcggcc

SEQ ID NO: 24980 - RNA, 20 nt, synthetic construct
  source 1..20: mol_type = other RNA
acaaagagggtgcgtctggg

SEQ ID NO: 24981 - RNA, 20 nt, synthetic construct
  source 1..20: mol_type = other RNA
gcaacaaagagggtgcgtct

SEQ ID NO: 24982 - RNA, 20 nt, synthetic construct
  source 1..20: mol_type = other RNA
ggcaacaaagagggtgcgtc

SEQ ID NO: 24983 - RNA, 20 nt, synthetic construct
  source 1..20: mol_type = other RNA
atgagcaatggcaacaaaga

SEQ ID NO: 24984 - RNA, 20 nt, synthetic construct
  source 1..20: mol_type = other RNA
gatgagcaatggcaacaaag

SEQ ID NO: 24985 - RNA, 20 nt, synthetic construct
  source 1..20: mol_type = other RNA
aagaagttgttgatgagcaa

SEQ ID NO: 24986 - RNA, 20 nt, synthetic construct
  source 1..20: mol_type = other RNA
gagctccaaattttcctccc

SEQ ID NO: 24987 - RNA, 20 nt, synthetic construct
  source 1..20: mol_type = other RNA
agctccaaattttcctccct

SEQ ID NO: 24988 - RNA, 20 nt, synthetic construct
  source 1..20: mol_type = other RNA
ccaaattttcctccctggga

SEQ ID NO: 24989 - RNA, 20 nt, synthetic construct
  source 1..20: mol_type = other RNA
aattttcctccctgggatgg

SEQ ID NO: 24990 - RNA, 20 nt, synthetic construct
  source 1..20: mol_type = other RNA
ccatcccagggaggaaaatt

SEQ ID NO: 24991 - RNA, 20 nt, synthetic construct
  source 1..20: mol_type = other RNA
tgtttacctccatcccaggg

SEQ ID NO: 24992 - RNA, 20 nt, synthetic construct
  source 1..20: mol_type = other RNA
ctctgtttacctccatccca

SEQ ID NO: 24993 - RNA, 20 nt, synthetic construct
  source 1..20: mol_type = other RNA
tctctgtttacctccatccc

SEQ ID NO: 24994 - RNA, 20 nt, synthetic construct
  source 1..20: mol_type = other RNA
gttcaggcccctcagagaag

SEQ ID NO: 24995 - RNA, 20 nt, synthetic construct
  source 1..20: mol_type = other RNA
agttcaggcccctcagagaa

SEQ ID NO: 24996 - RNA, 20 nt, synthetic construct
  source 1..20: mol_type = other RNA
aagttcaggcccctcagaga

SEQ ID NO: 24997 - RNA, 20 nt, synthetic construct
  source 1..20: mol_type = other RNA
ctgaacttaccgcagcctct

SEQ ID NO: 24998 - RNA, 20 nt, synthetic construct
  source 1..20: mol_type = other RNA
cgagaggctgcggtaagttc

SEQ ID NO: 24999 - RNA, 20 nt, synthetic construct
  source 1..20: mol_type = other RNA
atcaggctgccgagaggctg

SEQ ID NO: 25000 - RNA, 20 nt, synthetic construct
  source 1..20: mol_type = other RNA
agcgggatcaggctgccgag

SEQ ID NO: 25001 - RNA, 20 nt, synthetic construct
  source 1..20: mol_type = other RNA
cagcctgatcccgctgttcc

SEQ ID NO: 25002 - RNA, 20 nt, synthetic construct
  source 1..20: mol_type = other RNA
gggcctggaacagcgggatc

SEQ ID NO: 25003 - RNA, 20 nt, synthetic construct
  source 1..20: mol_type = other RNA
ggataagggcctggaacagc

SEQ ID NO: 25004 - RNA, 20 nt, synthetic construct
  source 1..20: mol_type = other RNA
tggataagggcctggaacag

SEQ ID NO: 25005 - RNA, 20 nt, synthetic construct
  source 1..20: mol_type = other RNA
ttccaggcccttatccaact

SEQ ID NO: 25006 - RNA, 20 nt, synthetic construct
  source 1..20: mol_type = other RNA
ggccaagttggataagggcc

SEQ ID NO: 25007 - RNA, 20 nt, synthetic construct
  source 1..20: mol_type = other RNA
ctgaaggccaagttggataa

SEQ ID NO: 25008 - RNA, 20 nt, synthetic construct
  source 1..20: mol_type = other RNA
tctgaaggccaagttggata

SEQ ID NO: 25009 - RNA, 20 nt, synthetic construct
  source 1..20: mol_type = other RNA
cgaggctctgaaggccaagt

SEQ ID NO: 25010 - RNA, 20 nt, synthetic construct
  source 1..20: mol_type = other RNA
gaaggagaacgaggctctga

SEQ ID NO: 25011 - RNA, 20 nt, synthetic construct
  source 1..20: mol_type = other RNA
gcagcttcggaaggagaacg

SEQ ID NO: 25012 - RNA, 20 nt, synthetic construct
  source 1..20: mol_type = other RNA
ccttccgaagctgctcacac

SEQ ID NO: 25013 - RNA, 20 nt, synthetic construct
  source 1..20: mol_type = other RNA
cttccgaagctgctcacaca

SEQ ID NO: 25014 - RNA, 20 nt, synthetic construct
  source 1..20: mol_type = other RNA
cctgtgtgagcagcttcgga

SEQ ID NO: 25015 - RNA, 20 nt, synthetic construct
  source 1..20: mol_type = other RNA
agctgctcacacagggtctg

SEQ ID NO: 25016 - RNA, 20 nt, synthetic construct
  source 1..20: mol_type = other RNA
gctgctcacacagggtctgt

SEQ ID NO: 25017 - RNA, 20 nt, synthetic construct
  source 1..20: mol_type = other RNA
ctgctcacacagggtctgtg

SEQ ID NO: 25018 - RNA, 20 nt, synthetic construct
  source 1..20: mol_type = other RNA
tcacacagggtctgtggggc

SEQ ID NO: 25019 - RNA, 20 nt, synthetic construct
  source 1..20: mol_type = other RNA
cacacagggtctgtggggca

SEQ ID NO: 25020 - RNA, 20 nt, synthetic construct
  source 1..20: mol_type = other RNA
acacagggtctgtggggcag

SEQ ID NO: 25021 - RNA, 20 nt, synthetic construct
  source 1..20: mol_type = other RNA
tgtggggcaggggaacagac

SEQ ID NO: 25022 - RNA, 20 nt, synthetic construct
  source 1..20: mol_type = other RNA
gtggggcaggggaacagaca

SEQ ID NO: 25023 - RNA, 20 nt, synthetic construct
  source 1..20: mol_type = other RNA
gcaggtgaggcgcgtgggga

SEQ ID NO: 25024 - RNA, 20 nt, synthetic construct
  source 1..20: mol_type = other RNA
tgcaggtgaggcgcgtgggg

SEQ ID NO: 25025 - RNA, 20 nt, synthetic construct
  source 1..20: mol_type = other RNA
cacgcgcctcacctgcagaa

SEQ ID NO: 25026 - RNA, 20 nt, synthetic construct
  source 1..20: mol_type = other RNA
ttctgcaggtgaggcgcgtg

SEQ ID NO: 25027 - RNA, 20 nt, synthetic construct
  source 1..20: mol_type = other RNA
gcgcctcacctgcagaatgg

SEQ ID NO: 25028 - RNA, 20 nt, synthetic construct
  source 1..20: mol_type = other RNA
cattctgcaggtgaggcgcg

SEQ ID NO: 25029 - RNA, 20 nt, synthetic construct
  source 1..20: mol_type = other RNA
gcacctccattctgcaggtg

SEQ ID NO: 25030 - RNA, 20 nt, synthetic construct
  source 1..20: mol_type = other RNA
gcagcgcacctccattctgc

SEQ ID NO: 25031 - RNA, 20 nt, synthetic construct
  source 1..20: mol_type = other RNA
ctgctcattcttgtgcacct

SEQ ID NO: 25032 - RNA, 20 nt, synthetic construct
  source 1..20: mol_type = other RNA
tgtgcaccttggatgccagt

SEQ ID NO: 25033 - RNA, 20 nt, synthetic construct
  source 1..20: mol_type = other RNA
gttcaaccgactggcatcca

SEQ ID NO: 25034 - RNA, 20 nt, synthetic construct
  source 1..20: mol_type = other RNA
atgccagtcggttgaactcc

SEQ ID NO: 25035 - RNA, 20 nt, synthetic construct
  source 1..20: mol_type = other RNA
tgccagtcggttgaactcca

SEQ ID NO: 25036 - RNA, 20 nt, synthetic construct
  source 1..20: mol_type = other RNA
ggccctggagttcaaccgac

SEQ ID NO: 25037 - RNA, 20 nt, synthetic construct
  source 1..20: mol_type = other RNA
ggttgaactccagggccatg

SEQ ID NO: 25038 - RNA, 20 nt, synthetic construct
  source 1..20: mol_type = other RNA
actccagggccatgcggccc

SEQ ID NO: 25039 - RNA, 20 nt, synthetic construct
  source 1..20: mol_type = other RNA
ccagggccatgcggcccagg

SEQ ID NO: 25040 - RNA, 20 nt, synthetic construct
  source 1..20: mol_type = other RNA
cagggccatgcggcccaggt

SEQ ID NO: 25041 - RNA, 20 nt, synthetic construct
  source 1..20: mol_type = other RNA
ccacctgggccgcatggccc

SEQ ID NO: 25042 - RNA, 20 nt, synthetic construct
  source 1..20: mol_type = other RNA
cttcacccacctgggccgca

SEQ ID NO: 25043 - RNA, 20 nt, synthetic construct
  source 1..20: mol_type = other RNA
ggcccaggtgggtgaagagc

SEQ ID NO: 25044 - RNA, 20 nt, synthetic construct
  source 1..20: mol_type = other RNA
ggtgggtgaagagctggccg

SEQ ID NO: 25045 - RNA, 20 nt, synthetic construct
  source 1..20: mol_type = other RNA
ggccagctcttcacccacct

SEQ ID NO: 25046 - RNA, 20 nt, synthetic construct
  source 1..20: mol_type = other RNA
cggccagctcttcacccacc

SEQ ID NO: 25047 - RNA, 20 nt, synthetic construct
  source 1..20: mol_type = other RNA
gtgaagagctggccgtggtc

SEQ ID NO: 25048 - RNA, 20 nt, synthetic construct
  source 1..20: mol_type = other RNA
ctggccgtggtccggctcct

SEQ ID NO: 25049 - RNA, 20 nt, synthetic construct
  source 1..20: mol_type = other RNA
tgtgccgaggagccggacca

SEQ ID NO: 25050 - RNA, 20 nt, synthetic construct
  source 1..20: mol_type = other RNA
gagtgtgtgtgccgaggagc

SEQ ID NO: 25051 - RNA, 20 nt, synthetic construct
  source 1..20: mol_type = other RNA
ctcggcacacacactcagcg

SEQ ID NO: 25052 - RNA, 20 nt, synthetic construct
  source 1..20: mol_type = other RNA
cacgctgagtgtgtgtgccg

SEQ ID NO: 25053 - RNA, 20 nt, synthetic construct
  source 1..20: mol_type = other RNA
acacactcagcgtggtctcc

SEQ ID NO: 25054 - RNA, 20 nt, synthetic construct
  source 1..20: mol_type = other RNA
gcgtggtctccaggcgctgc

SEQ ID NO: 25055 - RNA, 20 nt, synthetic construct
  source 1..20: mol_type = other RNA
ggcgctgcaggtgcagcatc

SEQ ID NO: 25056 - RNA, 20 nt, synthetic construct
  source 1..20: mol_type = other RNA
gatgctgcacctgcagcgcc

SEQ ID NO: 25057 - RNA, 20 nt, synthetic construct
  source 1..20: mol_type = other RNA
gcatcaggttgccgtcctca

SEQ ID NO: 25058 - RNA, 20 nt, synthetic construct
  source 1..20: mol_type = other RNA
catcaggttgccgtcctcac

SEQ ID NO: 25059 - RNA, 20 nt, synthetic construct
  source 1..20: mol_type = other RNA
atcaggttgccgtcctcacg

SEQ ID NO: 25060 - RNA, 20 nt, synthetic construct
  source 1..20: mol_type = other RNA
ggttgccgtcctcacggggc

SEQ ID NO: 25061 - RNA, 20 nt, synthetic construct
  source 1..20: mol_type = other RNA
gttgccgtcctcacggggca

SEQ ID NO: 25062 - RNA, 20 nt, synthetic construct
  source 1..20: mol_type = other RNA
ttgccgtcctcacggggcag

SEQ ID NO: 25063 - RNA, 20 nt, synthetic construct
  source 1..20: mol_type = other RNA
tgccgtcctcacggggcagg

SEQ ID NO: 25064 - RNA, 20 nt, synthetic construct
  source 1..20: mol_type = other RNA
ggccccctgccccgtgagga

SEQ ID NO: 25065 - RNA, 20 nt, synthetic construct
  source 1..20: mol_type = other RNA
gctgggccccctgccccgtg

SEQ ID NO: 25066 - RNA, 20 nt, synthetic construct
  source 1..20: mol_type = other RNA
ggggcagggggcccagcgcc

SEQ ID NO: 25067 - RNA, 20 nt, synthetic construct
  source 1..20: mol_type = other RNA
agggggcccagcgcctggag

SEQ ID NO: 25068 - RNA, 20 nt, synthetic construct
  source 1..20: mol_type = other RNA
gggggcccagcgcctggaga

SEQ ID NO: 25069 - RNA, 20 nt, synthetic construct
  source 1..20: mol_type = other RNA
cccagcgcctggagagggaa

SEQ ID NO: 25070 - RNA, 20 nt, synthetic construct
  source 1..20: mol_type = other RNA
ccagcgcctggagagggaaa

SEQ ID NO: 25071 - RNA, 20 nt, synthetic construct
  source 1..20: mol_type = other RNA
cctttccctctccaggcgct

SEQ ID NO: 25072 - RNA, 20 nt, synthetic construct
  source 1..20: mol_type = other RNA
ccctttccctctccaggcgc

SEQ ID NO: 25073 - RNA, 20 nt, synthetic construct
  source 1..20: mol_type = other RNA
ctggagagggaaagggcaca

SEQ ID NO: 25074 - RNA, 20 nt, synthetic construct
  source 1..20: mol_type = other RNA
cgtgtgccctttccctctcc

SEQ ID NO: 25075 - RNA, 20 nt, synthetic construct
  source 1..20: mol_type = other RNA
gagtggacgggcaggacccc

SEQ ID NO: 25076 - RNA, 20 nt, synthetic construct
  source 1..20: mol_type = other RNA
tgagtggacgggcaggaccc

SEQ ID NO: 25077 - RNA, 20 nt, synthetic construct
  source 1..20: mol_type = other RNA
ccgtccactcaccatcgcat

SEQ ID NO: 25078 - RNA, 20 nt, synthetic construct
  source 1..20: mol_type = other RNA
caatgcgatggtgagtggac

SEQ ID NO: 25079 - RNA, 20 nt, synthetic construct
  source 1..20: mol_type = other RNA
cactcaccatcgcattggca

SEQ ID NO: 25080 - RNA, 20 nt, synthetic construct
  source 1..20: mol_type = other RNA
catgccaatgcgatggtgag

SEQ ID NO: 25081 - RNA, 20 nt, synthetic construct
  source 1..20: mol_type = other RNA
cagcagccatgccaatgcga

SEQ ID NO: 25082 - RNA, 20 nt, synthetic construct
  source 1..20: mol_type = other RNA
ttggcatggctgctgctctc

SEQ ID NO: 25083 - RNA, 20 nt, synthetic construct
  source 1..20: mol_type = other RNA
tctggtgaattctgctcctc

SEQ ID NO: 25084 - RNA, 20 nt, synthetic construct
  source 1..20: mol_type = other RNA
atttgaagtggtcactcctg

SEQ ID NO: 25085 - RNA, 20 nt, synthetic construct
  source 1..20: mol_type = other RNA
agtgaccacttcaaattcag

SEQ ID NO: 25086 - RNA, 20 nt, synthetic construct
  source 1..20: mol_type = other RNA
gaccacttcaaattcagagg

SEQ ID NO: 25087 - RNA, 20 nt, synthetic construct
  source 1..20: mol_type = other RNA
cacctcctctgaatttgaag

SEQ ID NO: 25088 - RNA, 20 nt, synthetic construct
  source 1..20: mol_type = other RNA
aggaggtgccctgtgcagaa

SEQ ID NO: 25089 - RNA, 20 nt, synthetic construct
  source 1..20: mol_type = other RNA
ccctgtgcagaaaggaagtt

SEQ ID NO: 25090 - RNA, 20 nt, synthetic construct
  source 1..20: mol_type = other RNA
cctaacttcctttctgcaca

SEQ ID NO: 25091 - RNA, 20 nt, synthetic construct
  source 1..20: mol_type = other RNA
acctaacttcctttctgcac

SEQ ID NO: 25092 - RNA, 20 nt, synthetic construct
  source 1..20: mol_type = other RNA
gttttatttggagtcatggg

SEQ ID NO: 25093 - RNA, 20 nt, synthetic construct
  source 1..20: mol_type = other RNA
taagttttatttggagtcat

SEQ ID NO: 25094 - RNA, 20 nt, synthetic construct
  source 1..20: mol_type = other RNA
actccaaataaaacttacac

SEQ ID NO: 25095 - RNA, 20 nt, synthetic construct
  source 1..20: mol_type = other RNA
caaataaaacttacactgga

SEQ ID NO: 25096 - RNA, 20 nt, synthetic construct
  source 1..20: mol_type = other RNA
ataaaacttacactggatgg

SEQ ID NO: 25097 - RNA, 20 nt, synthetic construct
  source 1..20: mol_type = other RNA
catccagtgtaagttttatt

SEQ ID NO: 25098 - RNA, 20 nt, synthetic construct
  source 1..20: mol_type = other RNA
ttacactggatggaggcttc

SEQ ID NO: 25099 - RNA, 20 nt, synthetic construct
  source 1..20: mol_type = other RNA
ctggatggaggcttctggac

SEQ ID NO: 25100 - RNA, 20 nt, synthetic construct
  source 1..20: mol_type = other RNA
ggaggcttctggactggtgc

SEQ ID NO: 25101 - RNA, 20 nt, synthetic construct
  source 1..20: mol_type = other RNA
gactggtgctggcttgtcac

SEQ ID NO: 25102 - RNA, 20 nt, synthetic construct
  source 1..20: mol_type = other RNA
actggtgctggcttgtcact

SEQ ID NO: 25103 - RNA, 20 nt, synthetic construct
  source 1..20: mol_type = other RNA
ctggtgctggcttgtcactg

SEQ ID NO: 25104 - RNA, 20 nt, synthetic construct
  source 1..20: mol_type = other RNA
ggcttgtcactggggcatgc

SEQ ID NO: 25105 - RNA, 20 nt, synthetic construct
  source 1..20: mol_type = other RNA
gcttgtcactggggcatgca

SEQ ID NO: 25106 - RNA, 20 nt, synthetic construct
  source 1..20: mol_type = other RNA
cttgtcactggggcatgcag

SEQ ID NO: 25107 - RNA, 20 nt, synthetic construct
  source 1..20: mol_type = other RNA
actggggcatgcaggggctg

SEQ ID NO: 25108 - RNA, 20 nt, synthetic construct
  source 1..20: mol_type = other RNA
ctggggcatgcaggggctgt

SEQ ID NO: 25109 - RNA, 20 nt, synthetic construct
  source 1..20: mol_type = other RNA
gtgacatttgagtcctttcc

SEQ ID NO: 25110 - RNA, 20 nt, synthetic construct
  source 1..20: mol_type = other RNA
ctttcttgattctccaggaa

SEQ ID NO: 25111 - RNA, 20 nt, synthetic construct
  source 1..20: mol_type = other RNA
ctgtgctttcttgattctcc

SEQ ID NO: 25112 - RNA, 20 nt, synthetic construct
  source 1..20: mol_type = other RNA
cacaggtataagaggagtct

SEQ ID NO: 25113 - RNA, 20 nt, synthetic construct
  source 1..20: mol_type = other RNA
tcacaggtataagaggagtc

SEQ ID NO: 25114 - RNA, 20 nt, synthetic construct
  source 1..20: mol_type = other RNA
ttatacctgtgagctcagcc

SEQ ID NO: 25115 - RNA, 20 nt, synthetic construct
  source 1..20: mol_type = other RNA
tatacctgtgagctcagcca

SEQ ID NO: 25116 - RNA, 20 nt, synthetic construct
  source 1..20: mol_type = other RNA
atacctgtgagctcagccag

SEQ ID NO: 25117 - RNA, 20 nt, synthetic construct
  source 1..20: mol_type = other RNA
tacctgtgagctcagccagg

SEQ ID NO: 25118 - RNA, 20 nt, synthetic construct
  source 1..20: mol_type = other RNA
gagctcagccagggggtcga

SEQ ID NO: 25119 - RNA, 20 nt, synthetic construct
  source 1..20: mol_type = other RNA
cagggggtcgaaggagccca

SEQ ID NO: 25120 - RNA, 20 nt, synthetic construct
  source 1..20: mol_type = other RNA
ggggtcgaaggagcccaagg

SEQ ID NO: 25121 - RNA, 20 nt, synthetic construct
  source 1..20: mol_type = other RNA
gggtcgaaggagcccaagga

SEQ ID NO: 25122 - RNA, 20 nt, synthetic construct
  source 1..20: mol_type = other RNA
aaggagcccaaggagggaga

SEQ ID NO: 25123 - RNA, 20 nt, synthetic construct
  source 1..20: mol_type = other RNA
gagcccaaggagggagaagg

SEQ ID NO: 25124 - RNA, 20 nt, synthetic construct
  source 1..20: mol_type = other RNA
cccaaggagggagaaggtgg

SEQ ID NO: 25125 - RNA, 20 nt, synthetic construct
  source 1..20: mol_type = other RNA
ccaaggagggagaaggtggt

SEQ ID NO: 25126 - RNA, 20 nt, synthetic construct
  source 1..20: mol_type = other RNA
ccaccaccttctccctcctt

SEQ ID NO: 25127 - RNA, 20 nt, synthetic construct
  source 1..20: mol_type = other RNA
cccaccaccttctccctcct

SEQ ID NO: 25128 - RNA, 20 nt, synthetic construct
  source 1..20: mol_type = other RNA
gaaggcagaggagctagtga

SEQ ID NO: 25129 - RNA, 20 nt, synthetic construct
  source 1..20: mol_type = other RNA
ctagctcctctgccttctgc

SEQ ID NO: 25130 - RNA, 20 nt, synthetic construct
  source 1..20: mol_type = other RNA
ctctgccttctgccggagcc

SEQ ID NO: 25131 - RNA, 20 nt, synthetic construct
  source 1..20: mol_type = other RNA
caggctccggcagaaggcag

SEQ ID NO: 25132 - RNA, 20 nt, synthetic construct
  source 1..20: mol_type = other RNA
agcgaccaggctccggcaga

SEQ ID NO: 25133 - RNA, 20 nt, synthetic construct
  source 1..20: mol_type = other RNA
ggagcctggtcgcttccatc

SEQ ID NO: 25134 - RNA, 20 nt, synthetic construct
  source 1..20: mol_type = other RNA
gagcctggtcgcttccatct

SEQ ID NO: 25135 - RNA, 20 nt, synthetic construct
  source 1..20: mol_type = other RNA
agatggaagcgaccaggctc

SEQ ID NO: 25136 - RNA, 20 nt, synthetic construct
  source 1..20: mol_type = other RNA
agtcccagatggaagcgacc

SEQ ID NO: 25137 - RNA, 20 nt, synthetic construct
  source 1..20: mol_type = other RNA
gcttttggaagagtcccaga

SEQ ID NO: 25138 - RNA, 20 nt, synthetic construct
  source 1..20: mol_type = other RNA
aaaagctcccctagagttat

SEQ ID NO: 25139 - RNA, 20 nt, synthetic construct
  source 1..20: mol_type = other RNA
aaagctcccctagagttatt

SEQ ID NO: 25140 - RNA, 20 nt, synthetic construct
  source 1..20: mol_type = other RNA
aagctcccctagagttattg

SEQ ID NO: 25141 - RNA, 20 nt, synthetic construct
  source 1..20: mol_type = other RNA
aataactctaggggagcttt

SEQ ID NO: 25142 - RNA, 20 nt, synthetic construct
  source 1..20: mol_type = other RNA
ccctagagttattggggaag

SEQ ID NO: 25143 - RNA, 20 nt, synthetic construct
  source 1..20: mol_type = other RNA
ctcttccccaataactctag

SEQ ID NO: 25144 - RNA, 20 nt, synthetic construct
  source 1..20: mol_type = other RNA
cctcttccccaataactcta

SEQ ID NO: 25145 - RNA, 20 nt, synthetic construct
  source 1..20: mol_type = other RNA
tcctcttccccaataactct

SEQ ID NO: 25146 - RNA, 20 nt, synthetic construct
  source 1..20: mol_type = other RNA
atgcaagggataaagatgtt

SEQ ID NO: 25147 - RNA, 20 nt, synthetic construct
  source 1..20: mol_type = other RNA
cttgcattttttccttcagc

SEQ ID NO: 25148 - RNA, 20 nt, synthetic construct
  source 1..20: mol_type = other RNA
ttgcattttttccttcagcc

SEQ ID NO: 25149 - RNA, 20 nt, synthetic construct
  source 1..20: mol_type = other RNA
ggctgaaggaaaaaatgcaa

SEQ ID NO: 25150 - RNA, 20 nt, synthetic construct
  source 1..20: mol_type = other RNA
cggctgaaggaaaaaatgca

SEQ ID NO: 25151 - RNA, 20 nt, synthetic construct
  source 1..20: mol_type = other RNA
gaaggagaattcccggctga

SEQ ID NO: 25152 - RNA, 20 nt, synthetic construct
  source 1..20: mol_type = other RNA
gccgggaattctccttcact

SEQ ID NO: 25153 - RNA, 20 nt, synthetic construct
  source 1..20: mol_type = other RNA
gcctagtgaaggagaattcc

SEQ ID NO: 25154 - RNA, 20 nt, synthetic construct
  source 1..20: mol_type = other RNA
cactaggcgctcaaaagctg

SEQ ID NO: 25155 - RNA, 20 nt, synthetic construct
  source 1..20: mol_type = other RNA
agcttttgagcgcctagtga

SEQ ID NO: 25156 - RNA, 20 nt, synthetic construct
  source 1..20: mol_type = other RNA
agctgcggatgcctctcctg

SEQ ID NO: 25157 - RNA, 20 nt, synthetic construct
  source 1..20: mol_type = other RNA
gctgcggatgcctctcctga

SEQ ID NO: 25158 - RNA, 20 nt, synthetic construct
  source 1..20: mol_type = other RNA
cctgagggcacgctgccccc

SEQ ID NO: 25159 - RNA, 20 nt, synthetic construct
  source 1..20: mol_type = other RNA
ctgagggcacgctgccccca

SEQ ID NO: 25160 - RNA, 20 nt, synthetic construct
  source 1..20: mol_type = other RNA
cctgggggcagcgtgccctc

SEQ ID NO: 25161 - RNA, 20 nt, synthetic construct
  source 1..20: mol_type = other RNA
tgcccccagggtcgtagatc

SEQ ID NO: 25162 - RNA, 20 nt, synthetic construct
  source 1..20: mol_type = other RNA
ccagggtcgtagatccggta

SEQ ID NO: 25163 - RNA, 20 nt, synthetic construct
  source 1..20: mol_type = other RNA
taccggatctacgaccctgg

SEQ ID NO: 25164 - RNA, 20 nt, synthetic construct
  source 1..20: mol_type = other RNA
gtaccggatctacgaccctg

SEQ ID NO: 25165 - RNA, 20 nt, synthetic construct
  source 1..20: mol_type = other RNA
cgtaccggatctacgaccct

SEQ ID NO: 25166 - RNA, 20 nt, synthetic construct
  source 1..20: mol_type = other RNA
ccgtaccggatctacgaccc

SEQ ID NO: 25167 - RNA, 20 nt, synthetic construct
  source 1..20: mol_type = other RNA
acggtcctctcccttccatg

SEQ ID NO: 25168 - RNA, 20 nt, synthetic construct
  source 1..20: mol_type = other RNA
cggtcctctcccttccatga

SEQ ID NO: 25169 - RNA, 20 nt, synthetic construct
  source 1..20: mol_type = other RNA
gctaccctcatggaagggag

SEQ ID NO: 25170 - RNA, 20 nt, synthetic construct
  source 1..20: mol_type = other RNA
gctgagctaccctcatggaa

SEQ ID NO: 25171 - RNA, 20 nt, synthetic construct
  source 1..20: mol_type = other RNA
ggctgagctaccctcatgga

SEQ ID NO: 25172 - RNA, 20 nt, synthetic construct
  source 1..20: mol_type = other RNA
caggggctgagctaccctca

SEQ ID NO: 25173 - RNA, 20 nt, synthetic construct
  source 1..20: mol_type = other RNA
gggtagctcagcccctgccg

SEQ ID NO: 25174 - RNA, 20 nt, synthetic construct
  source 1..20: mol_type = other RNA
cccctgccgtggtgcccgcc

SEQ ID NO: 25175 - RNA, 20 nt, synthetic construct
  source 1..20: mol_type = other RNA
ccaggcgggcaccacggcag

SEQ ID NO: 25176 - RNA, 20 nt, synthetic construct
  source 1..20: mol_type = other RNA
gccaggcgggcaccacggca

SEQ ID NO: 25177 - RNA, 20 nt, synthetic construct
  source 1..20: mol_type = other RNA
agccaggcgggcaccacggc

SEQ ID NO: 25178 - RNA, 20 nt, synthetic construct
  source 1..20: mol_type = other RNA
gtggtgcccgcctggctgta

SEQ ID NO: 25179 - RNA, 20 nt, synthetic construct
  source 1..20: mol_type = other RNA
ttacagccaggcgggcacca

SEQ ID NO: 25180 - RNA, 20 nt, synthetic construct
  source 1..20: mol_type = other RNA
tgttgtccttacagccaggc

SEQ ID NO: 25181 - RNA, 20 nt, synthetic construct
  source 1..20: mol_type = other RNA
ctgttgtccttacagccagg

SEQ ID NO: 25182 - RNA, 20 nt, synthetic construct
  source 1..20: mol_type = other RNA
ctgctgttgtccttacagcc

SEQ ID NO: 25183 - RNA, 20 nt, synthetic construct
  source 1..20: mol_type = other RNA
tgccttgtcctgtagattag

SEQ ID NO: 25184 - RNA, 20 nt, synthetic construct
  source 1..20: mol_type = other RNA
agcctctaatctacaggaca

SEQ ID NO: 25185 - RNA, 20 nt, synthetic construct
  source 1..20: mol_type = other RNA
tgtagattagaggctgcatg

SEQ ID NO: 25186 - RNA, 20 nt, synthetic construct
  source 1..20: mol_type = other RNA
tcatgcagcctctaatctac

SEQ ID NO: 25187 - RNA, 20 nt, synthetic construct
  source 1..20: mol_type = other RNA
attagaggctgcatgaggac

SEQ ID NO: 25188 - RNA, 20 nt, synthetic construct
  source 1..20: mol_type = other RNA
ttagaggctgcatgaggaca

SEQ ID NO: 25189 - RNA, 20 nt, synthetic construct
  source 1..20: mol_type = other RNA
gcaagtccatcctgtgtgcc

SEQ ID NO: 25190 - RNA, 20 nt, synthetic construct
  source 1..20: mol_type = other RNA
caagtccatcctgtgtgcca

SEQ ID NO: 25191 - RNA, 20 nt, synthetic construct
  source 1..20: mol_type = other RNA
agataccctggcacacagga

SEQ ID NO: 25192 - RNA, 20 nt, synthetic construct
  source 1..20: mol_type = other RNA
gtgccagggtatcttcagag

SEQ ID NO: 25193 - RNA, 20 nt, synthetic construct
  source 1..20: mol_type = other RNA
gggccactctgaagataccc

SEQ ID NO: 25194 - RNA, 20 nt, synthetic construct
  source 1..20: mol_type = other RNA
tcttcagagtggcccagagt

SEQ ID NO: 25195 - RNA, 20 nt, synthetic construct
  source 1..20: mol_type = other RNA
cttcagagtggcccagagta

SEQ ID NO: 25196 - RNA, 20 nt, synthetic construct
  source 1..20: mol_type = other RNA
agtggcccagagtagggcct

SEQ ID NO: 25197 - RNA, 20 nt, synthetic construct
  source 1..20: mol_type = other RNA
gtttaccgaggccctactct

SEQ ID NO: 25198 - RNA, 20 nt, synthetic construct
  source 1..20: mol_type = other RNA
ggtttaccgaggccctactc

SEQ ID NO: 25199 - RNA, 20 nt, synthetic construct
  source 1..20: mol_type = other RNA
tctgaattcaaggtttaccg

SEQ ID NO: 25200 - RNA, 20 nt, synthetic construct
  source 1..20: mol_type = other RNA
gtctgacttctctgaattca

SEQ ID NO: 25201 - RNA, 20 nt, synthetic construct
  source 1..20: mol_type = other RNA
attcagagaagtcagactga

SEQ ID NO: 25202 - RNA, 20 nt, synthetic construct
  source 1..20: mol_type = other RNA
ttcagagaagtcagactgaa

SEQ ID NO: 25203 - RNA, 20 nt, synthetic construct
  source 1..20: mol_type = other RNA
ggaggcggggtcggggtcaa

SEQ ID NO: 25204 - RNA, 20 nt, synthetic construct
  source 1..20: mol_type = other RNA
aggaggcggggtcggggtca

SEQ ID NO: 25205 - RNA, 20 nt, synthetic construct
  source 1..20: mol_type = other RNA
ccccgaccccgcctcctgca

SEQ ID NO: 25206 - RNA, 20 nt, synthetic construct
  source 1..20: mol_type = other RNA
ccttgcaggaggcggggtcg

SEQ ID NO: 25207 - RNA, 20 nt, synthetic construct
  source 1..20: mol_type = other RNA
gccttgcaggaggcggggtc

SEQ ID NO: 25208 - RNA, 20 nt, synthetic construct
  source 1..20: mol_type = other RNA
ggccttgcaggaggcggggt

SEQ ID NO: 25209 - RNA, 20 nt, synthetic construct
  source 1..20: mol_type = other RNA
acatggccttgcaggaggcg

SEQ ID NO: 25210 - RNA, 20 nt, synthetic construct
  source 1..20: mol_type = other RNA
gacatggccttgcaggaggc

SEQ ID NO: 25211 - RNA, 20 nt, synthetic construct
  source 1..20: mol_type = other RNA
ggacatggccttgcaggagg

SEQ ID NO: 25212 - RNA, 20 nt, synthetic construct
  source 1..20: mol_type = other RNA
gttggacatggccttgcagg

SEQ ID NO: 25213 - RNA, 20 nt, synthetic construct
  source 1..20: mol_type = other RNA
gatgttggacatggccttgc

SEQ ID NO: 25214 - RNA, 20 nt, synthetic construct
  source 1..20: mol_type = other RNA
tttctctgggatgttggaca

SEQ ID NO: 25215 - RNA, 20 nt, synthetic construct
  source 1..20: mol_type = other RNA
ttaggctttctctgggatgt

SEQ ID NO: 25216 - RNA, 20 nt, synthetic construct
  source 1..20: mol_type = other RNA
gtcagggttaggctttctct

SEQ ID NO: 25217 - RNA, 20 nt, synthetic construct
  source 1..20: mol_type = other RNA
ggtcagggttaggctttctc

SEQ ID NO: 25218 - RNA, 20 nt, synthetic construct
  source 1..20: mol_type = other RNA
ctggtcagtgggtcagggtt

SEQ ID NO: 25219 - RNA, 20 nt, synthetic construct
  source 1..20: mol_type = other RNA
acccactgaccagacgcact

SEQ ID NO: 25220 - RNA, 20 nt, synthetic construct
  source 1..20: mol_type = other RNA
gtgcgtctggtcagtgggtc

SEQ ID NO: 25221 - RNA, 20 nt, synthetic construct
  source 1..20: mol_type = other RNA
tccaagtgcgtctggtcagt

SEQ ID NO: 25222 - RNA, 20 nt, synthetic construct
  source 1..20: mol_type = other RNA
gtccaagtgcgtctggtcag

SEQ ID NO: 25223 - RNA, 20 nt, synthetic construct
  source 1..20: mol_type = other RNA
tctgggcgtccaagtgcgtc

SEQ ID NO: 25224 - RNA, 20 nt, synthetic construct
  source 1..20: mol_type = other RNA
cccagacacttctagaatcc

SEQ ID NO: 25225 - RNA, 20 nt, synthetic construct
  source 1..20: mol_type = other RNA
gacacttctagaatccaggc

SEQ ID NO: 25226 - RNA, 20 nt, synthetic construct
  source 1..20: mol_type = other RNA
acacttctagaatccaggct

SEQ ID NO: 25227 - RNA, 20 nt, synthetic construct
  source 1..20: mol_type = other RNA
gcctggattctagaagtgtc

SEQ ID NO: 25228 - RNA, 20 nt, synthetic construct
  source 1..20: mol_type = other RNA
ggagcatggctggcccagcc

SEQ ID NO: 25229 - RNA, 20 nt, synthetic construct
  source 1..20: mol_type = other RNA
ccagccatgctccctcagag

SEQ ID NO: 25230 - RNA, 20 nt, synthetic construct
  source 1..20: mol_type = other RNA
cctctctgagggagcatggc

SEQ ID NO: 25231 - RNA, 20 nt, synthetic construct
  source 1..20: mol_type = other RNA
tgggcctctctgagggagca

SEQ ID NO: 25232 - RNA, 20 nt, synthetic construct
  source 1..20: mol_type = other RNA
ctcagagaggcccagatgta

SEQ ID NO: 25233 - RNA, 20 nt, synthetic construct
  source 1..20: mol_type = other RNA
ttacatctgggcctctctga

SEQ ID NO: 25234 - RNA, 20 nt, synthetic construct
  source 1..20: mol_type = other RNA
cttacatctgggcctctctg

SEQ ID NO: 25235 - RNA, 20 nt, synthetic construct
  source 1..20: mol_type = other RNA
gaggcccagatgtaaggcga

SEQ ID NO: 25236 - RNA, 20 nt, synthetic construct
  source 1..20: mol_type = other RNA
aggcccagatgtaaggcgaa

SEQ ID NO: 25237 - RNA, 20 nt, synthetic construct
  source 1..20: mol_type = other RNA
tgtcccttcgccttacatct

SEQ ID NO: 25238 - RNA, 20 nt, synthetic construct
  source 1..20: mol_type = other RNA
ttgtcccttcgccttacatc

SEQ ID NO: 25239 - RNA, 20 nt, synthetic construct
  source 1..20: mol_type = other RNA
gtaaggcgaagggacaaagc

SEQ ID NO: 25240 - RNA, 20 nt, synthetic construct
  source 1..20: mol_type = other RNA
gaagggacaaagcaggatgc

SEQ ID NO: 25241 - RNA, 20 nt, synthetic construct
  source 1..20: mol_type = other RNA
acaaagcaggatgcaggatg

SEQ ID NO: 25242 - RNA, 20 nt, synthetic construct
  source 1..20: mol_type = other RNA
caaagcaggatgcaggatgt

SEQ ID NO: 25243 - RNA, 20 nt, synthetic construct
  source 1..20: mol_type = other RNA
tgttttggaggacgtggggt

SEQ ID NO: 25244 - RNA, 20 nt, synthetic construct
  source 1..20: mol_type = other RNA
gtgttttggaggacgtgggg

SEQ ID NO: 25245 - RNA, 20 nt, synthetic construct
  source 1..20: mol_type = other RNA
tgcgtgttttggaggacgtg

SEQ ID NO: 25246 - RNA, 20 nt, synthetic construct
  source 1..20: mol_type = other RNA
ttgcgtgttttggaggacgt

SEQ ID NO: 25247 - RNA, 20 nt, synthetic construct
  source 1..20: mol_type = other RNA
gttgcgtgttttggaggacg

SEQ ID NO: 25248 - RNA, 20 nt, synthetic construct
  source 1..20: mol_type = other RNA
ctgagtgttgcgtgttttgg

SEQ ID NO: 25249 - RNA, 20 nt, synthetic construct
  source 1..20: mol_type = other RNA
aaactgagtgttgcgtgttt

SEQ ID NO: 25250 - RNA, 20 nt, synthetic construct
  source 1..20: mol_type = other RNA
acgcaacactcagtttctct

SEQ ID NO: 25251 - RNA, 20 nt, synthetic construct
  source 1..20: mol_type = other RNA
cactcagtttctcttggcgc

SEQ ID NO: 25252 - RNA, 20 nt, synthetic construct
  source 1..20: mol_type = other RNA
actcagtttctcttggcgct

SEQ ID NO: 25253 - RNA, 20 nt, synthetic construct
  source 1..20: mol_type = other RNA
ctcagtttctcttggcgctg

SEQ ID NO: 25254 - RNA, 20 nt, synthetic construct
  source 1..20: mol_type = other RNA
tcttggcgctggggagtcaa

SEQ ID NO: 25255 - RNA, 20 nt, synthetic construct
  source 1..20: mol_type = other RNA
cttggcgctggggagtcaac

SEQ ID NO: 25256 - RNA, 20 nt, synthetic construct
  source 1..20: mol_type = other RNA
cgctggggagtcaacgggaa

SEQ ID NO: 25257 - RNA, 20 nt, synthetic construct
  source 1..20: mol_type = other RNA
gctggggagtcaacgggaaa

SEQ ID NO: 25258 - RNA, 20 nt, synthetic construct
  source 1..20: mol_type = other RNA
ctggggagtcaacgggaaag

SEQ ID NO: 25259 - RNA, 20 nt, synthetic construct
  source 1..20: mol_type = other RNA
gtcaacgggaaaggggttca

SEQ ID NO: 25260 - RNA, 20 nt, synthetic construct
  source 1..20: mol_type = other RNA
tcaacgggaaaggggttcat

SEQ ID NO: 25261 - RNA, 20 nt, synthetic construct
  source 1..20: mol_type = other RNA
ggttcatgggaaacaaaaag

SEQ ID NO: 25262 - RNA, 20 nt, synthetic construct
  source 1..20: mol_type = other RNA
gttcatgggaaacaaaaagt

SEQ ID NO: 25263 - RNA, 20 nt, synthetic construct
  source 1..20: mol_type = other RNA
tgctcccctactttagcctc

SEQ ID NO: 25264 - RNA, 20 nt, synthetic construct
  source 1..20: mol_type = other RNA
gctcccctactttagcctca

SEQ ID NO: 25265 - RNA, 20 nt, synthetic construct
  source 1..20: mol_type = other RNA
ctcccctactttagcctcag

SEQ ID NO: 25266 - RNA, 20 nt, synthetic construct
  source 1..20: mol_type = other RNA
tcccctactttagcctcagg

SEQ ID NO: 25267 - RNA, 20 nt, synthetic construct
  source 1..20: mol_type = other RNA
gccccctgaggctaaagtag

SEQ ID NO: 25268 - RNA, 20 nt, synthetic construct
  source 1..20: mol_type = other RNA
tgccccctgaggctaaagta

SEQ ID NO: 25269 - RNA, 20 nt, synthetic construct
  source 1..20: mol_type = other RNA
ctgccccctgaggctaaagt

SEQ ID NO: 25270 - RNA, 20 nt, synthetic construct
  source 1..20: mol_type = other RNA
tagcctcagggggcagagct

SEQ ID NO: 25271 - RNA, 20 nt, synthetic construct
  source 1..20: mol_type = other RNA
agcctcagggggcagagctt

SEQ ID NO: 25272 - RNA, 20 nt, synthetic construct
  source 1..20: mol_type = other RNA
gcctcagggggcagagcttg

SEQ ID NO: 25273 - RNA, 20 nt, synthetic construct
  source 1..20: mol_type = other RNA
tccccaagctctgccccctg

SEQ ID NO: 25274 - RNA, 20 nt, synthetic construct
  source 1..20: mol_type = other RNA
cagagcttggggagaaagaa

SEQ ID NO: 25275 - RNA, 20 nt, synthetic construct
  source 1..20: mol_type = other RNA
ttggggagaaagaaaggcag

SEQ ID NO: 25276 - RNA, 20 nt, synthetic construct
  source 1..20: mol_type = other RNA
tggggagaaagaaaggcagt

SEQ ID NO: 25277 - RNA, 20 nt, synthetic construct
  source 1..20: mol_type = other RNA
gaaagaaaggcagtgggcag

SEQ ID NO: 25278 - RNA, 20 nt, synthetic construct
  source 1..20: mol_type = other RNA
gcagtgggcagaggagacgc

SEQ ID NO: 25279 - RNA, 20 nt, synthetic construct
  source 1..20: mol_type = other RNA
gcaggagaaatatcctattg

SEQ ID NO: 25280 - RNA, 20 nt, synthetic construct
  source 1..20: mol_type = other RNA
caggagaaatatcctattgt

SEQ ID NO: 25281 - RNA, 20 nt, synthetic construct
  source 1..20: mol_type = other RNA
tattgtgggaaaaccctctc

SEQ ID NO: 25282 - RNA, 20 nt, synthetic construct
  source 1..20: mol_type = other RNA
agagagggttttcccacaat

SEQ ID NO: 25283 - RNA, 20 nt, synthetic construct
  source 1..20: mol_type = other RNA
aaaccctctctggagatcag

SEQ ID NO: 25284 - RNA, 20 nt, synthetic construct
  source 1..20: mol_type = other RNA
gctcctctgatctccagaga

SEQ ID NO: 25285 - RNA, 20 nt, synthetic construct
  source 1..20: mol_type = other RNA
ggctcctctgatctccagag

SEQ ID NO: 25286 - RNA, 20 nt, synthetic construct
  source 1..20: mol_type = other RNA
gagatcagaggagccacccc

SEQ ID NO: 25287 - RNA, 20 nt, synthetic construct
  source 1..20: mol_type = other RNA
atcagaggagccacccctgg

SEQ ID NO: 25288 - RNA, 20 nt, synthetic construct
  source 1..20: mol_type = other RNA
tcagaggagccacccctgga

SEQ ID NO: 25289 - RNA, 20 nt, synthetic construct
  source 1..20: mol_type = other RNA
ggagccacccctggagggcc

SEQ ID NO: 25290 - RNA, 20 nt, synthetic construct
  source 1..20: mol_type = other RNA
ccctggagggcctggacttc

SEQ ID NO: 25291 - RNA, 20 nt, synthetic construct
  source 1..20: mol_type = other RNA
aagtccaggccctccagggg

SEQ ID NO: 25292 - RNA, 20 nt, synthetic construct
  source 1..20: mol_type = other RNA
tggagggcctggacttctgg

SEQ ID NO: 25293 - RNA, 20 nt, synthetic construct
  source 1..20: mol_type = other RNA
cagaagtccaggccctccag

SEQ ID NO: 25294 - RNA, 20 nt, synthetic construct
  source 1..20: mol_type = other RNA
ccagaagtccaggccctcca

SEQ ID NO: 25295 - RNA, 20 nt, synthetic construct
  source 1..20: mol_type = other RNA
tccagaagtccaggccctcc

SEQ ID NO: 25296 - RNA, 20 nt, synthetic construct
  source 1..20: mol_type = other RNA
tttctttcctccagaagtcc

SEQ ID NO: 25297 - RNA, 20 nt, synthetic construct
  source 1..20: mol_type = other RNA
tggaggaaagaaagacaaag

SEQ ID NO: 25298 - RNA, 20 nt, synthetic construct
  source 1..20: mol_type = other RNA
ggaggaaagaaagacaaaga

SEQ ID NO: 25299 - RNA, 20 nt, synthetic construct
  source 1..20: mol_type = other RNA
agaaagacaaagagggaaac

SEQ ID NO: 25300 - RNA, 20 nt, synthetic construct
  source 1..20: mol_type = other RNA
gaaagacaaagagggaaaca

SEQ ID NO: 25301 - RNA, 20 nt, synthetic construct
  source 1..20: mol_type = other RNA
ggcatgaggtcagcagaact

SEQ ID NO: 25302 - RNA, 20 nt, synthetic construct
  source 1..20: mol_type = other RNA
ctgctgacctcatgcccaga

SEQ ID NO: 25303 - RNA, 20 nt, synthetic construct
  source 1..20: mol_type = other RNA
cctcatgcccagatggtcag

SEQ ID NO: 25304 - RNA, 20 nt, synthetic construct
  source 1..20: mol_type = other RNA
ccgctgaccatctgggcatg

SEQ ID NO: 25305 - RNA, 20 nt, synthetic construct
  source 1..20: mol_type = other RNA
agatggtcagcggcagtccc

SEQ ID NO: 25306 - RNA, 20 nt, synthetic construct
  source 1..20: mol_type = other RNA
gggactgccgctgaccatct

SEQ ID NO: 25307 - RNA, 20 nt, synthetic construct
  source 1..20: mol_type = other RNA
agggactgccgctgaccatc

SEQ ID NO: 25308 - RNA, 20 nt, synthetic construct
  source 1..20: mol_type = other RNA
ggcagtccctggatgaccac

SEQ ID NO: 25309 - RNA, 20 nt, synthetic construct
  source 1..20: mol_type = other RNA
gcagtccctggatgaccact

SEQ ID NO: 25310 - RNA, 20 nt, synthetic construct
  source 1..20: mol_type = other RNA
ctggatgaccactgggcaga

SEQ ID NO: 25311 - RNA, 20 nt, synthetic construct
  source 1..20: mol_type = other RNA
tggatgaccactgggcagac

SEQ ID NO: 25312 - RNA, 20 nt, synthetic construct
  source 1..20: mol_type = other RNA
gtctgcccagtggtcatcca

SEQ ID NO: 25313 - RNA, 20 nt, synthetic construct
  source 1..20: mol_type = other RNA
cgtctgcccagtggtcatcc

SEQ ID NO: 25314 - RNA, 20 nt, synthetic construct
  source 1..20: mol_type = other RNA
gagagttcccgtctgcccag

SEQ ID NO: 25315 - RNA, 20 nt, synthetic construct
  source 1..20: mol_type = other RNA
aactctccctctgatcaatg

SEQ ID NO: 25316 - RNA, 20 nt, synthetic construct
  source 1..20: mol_type = other RNA
taaaaacctcattgatcaga

SEQ ID NO: 25317 - RNA, 20 nt, synthetic construct
  source 1..20: mol_type = other RNA
ataaaaacctcattgatcag

SEQ ID NO: 25318 - RNA, 20 nt, synthetic construct
  source 1..20: mol_type = other RNA
ttataacttctcccagagag

SEQ ID NO: 25319 - RNA, 20 nt, synthetic construct
  source 1..20: mol_type = other RNA
cagagagaggactcattctc

SEQ ID NO: 25320 - RNA, 20 nt, synthetic construct
  source 1..20: mol_type = other RNA
tgagaatgagtcctctctct

SEQ ID NO: 25321 - RNA, 20 nt, synthetic construct
  source 1..20: mol_type = other RNA
ctgagaatgagtcctctctc

SEQ ID NO: 25322 - RNA, 20 nt, synthetic construct
  source 1..20: mol_type = other RNA
cattctcaggatgacagagc

SEQ ID NO: 25323 - RNA, 20 nt, synthetic construct
  source 1..20: mol_type = other RNA
tctcaggatgacagagctgg

SEQ ID NO: 25324 - RNA, 20 nt, synthetic construct
  source 1..20: mol_type = other RNA
ctcaggatgacagagctgga

SEQ ID NO: 25325 - RNA, 20 nt, synthetic construct
  source 1..20: mol_type = other RNA
tcaggatgacagagctggag

SEQ ID NO: 25326 - RNA, 20 nt, synthetic construct
  source 1..20: mol_type = other RNA
gagctggaggggactctcca

SEQ ID NO: 25327 - RNA, 20 nt, synthetic construct
  source 1..20: mol_type = other RNA
agctggaggggactctccaa

SEQ ID NO: 25328 - RNA, 20 nt, synthetic construct
  source 1..20: mol_type = other RNA
gggactctccaagggcaatg

SEQ ID NO: 25329 - RNA, 20 nt, synthetic construct
  source 1..20: mol_type = other RNA
aggattcgcctcattgccct

SEQ ID NO: 25330 - RNA, 20 nt, synthetic construct
  source 1..20: mol_type = other RNA
gaggcgaatcctgcattatc

SEQ ID NO: 25331 - RNA, 20 nt, synthetic construct
  source 1..20: mol_type = other RNA
gcgaatcctgcattatcagg

SEQ ID NO: 25332 - RNA, 20 nt, synthetic construct
  source 1..20: mol_type = other RNA
cgaatcctgcattatcaggt

SEQ ID NO: 25333 - RNA, 20 nt, synthetic construct
  source 1..20: mol_type = other RNA
tctctcccacctgataatgc

SEQ ID NO: 25334 - RNA, 20 nt, synthetic construct
  source 1..20: mol_type = other RNA
atgcacccagaaacactcaa

SEQ ID NO: 25335 - RNA, 20 nt, synthetic construct
  source 1..20: mol_type = other RNA
ccagaaacactcaatggatg

SEQ ID NO: 25336 - RNA, 20 nt, synthetic construct
  source 1..20: mol_type = other RNA
cagaaacactcaatggatga

SEQ ID NO: 25337 - RNA, 20 nt, synthetic construct
  source 1..20: mol_type = other RNA
agaaacactcaatggatgag

SEQ ID NO: 25338 - RNA, 20 nt, synthetic construct
  source 1..20: mol_type = other RNA
ctcatccattgagtgtttct

SEQ ID NO: 25339 - RNA, 20 nt, synthetic construct
  source 1..20: mol_type = other RNA
cctcatccattgagtgtttc

SEQ ID NO: 25340 - RNA, 20 nt, synthetic construct
  source 1..20: mol_type = other RNA
gctgcattcgaacatgacga

SEQ ID NO: 25341 - RNA, 20 nt, synthetic construct
  source 1..20: mol_type = other RNA
tctgctgtccacaaaccacg

SEQ ID NO: 25342 - RNA, 20 nt, synthetic construct
  source 1..20: mol_type = other RNA
gtggtttgtggacagcagag

SEQ ID NO: 25343 - RNA, 20 nt, synthetic construct
  source 1..20: mol_type = other RNA
cgtggtttgtggacagcaga

SEQ ID NO: 25344 - RNA, 20 nt, synthetic construct
  source 1..20: mol_type = other RNA
tcgtggtttgtggacagcag

SEQ ID NO: 25345 - RNA, 20 nt, synthetic construct
  source 1..20: mol_type = other RNA
aaccacgaggatgttttcaa

SEQ ID NO: 25346 - RNA, 20 nt, synthetic construct
  source 1..20: mol_type = other RNA
accacgaggatgttttcaaa

SEQ ID NO: 25347 - RNA, 20 nt, synthetic construct
  source 1..20: mol_type = other RNA
ccacgaggatgttttcaaag

SEQ ID NO: 25348 - RNA, 20 nt, synthetic construct
  source 1..20: mol_type = other RNA
cccctttgaaaacatcctcg

SEQ ID NO: 25349 - RNA, 20 nt, synthetic construct
  source 1..20: mol_type = other RNA
ggatgttttcaaaggggaaa

SEQ ID NO: 25350 - RNA, 20 nt, synthetic construct
  source 1..20: mol_type = other RNA
actgaccactcccctccatg

SEQ ID NO: 25351 - RNA, 20 nt, synthetic construct
  source 1..20: mol_type = other RNA
cccctccatgtggcagtatc

SEQ ID NO: 25352 - RNA, 20 nt, synthetic construct
  source 1..20: mol_type = other RNA
ccagatactgccacatggag

SEQ ID NO: 25353 - RNA, 20 nt, synthetic construct
  source 1..20: mol_type = other RNA
tccagatactgccacatgga

SEQ ID NO: 25354 - RNA, 20 nt, synthetic construct
  source 1..20: mol_type = other RNA
ctccagatactgccacatgg

SEQ ID NO: 25355 - RNA, 20 nt, synthetic construct
  source 1..20: mol_type = other RNA
gaactccagatactgccaca

SEQ ID NO: 25356 - RNA, 20 nt, synthetic construct
  source 1..20: mol_type = other RNA
gtatctggagttcagagccc

SEQ ID NO: 25357 - RNA, 20 nt, synthetic construct
  source 1..20: mol_type = other RNA
gttcagagcccaggagtcct

SEQ ID NO: 25358 - RNA, 20 nt, synthetic construct
  source 1..20: mol_type = other RNA
ttcagagcccaggagtcctc

SEQ ID NO: 25359 - RNA, 20 nt, synthetic construct
  source 1..20: mol_type = other RNA
gctcatgcccgaggactcct

SEQ ID NO: 25360 - RNA, 20 nt, synthetic construct
  source 1..20: mol_type = other RNA
agctcatgcccgaggactcc

SEQ ID NO: 25361 - RNA, 20 nt, synthetic construct
  source 1..20: mol_type = other RNA
atcagatgagctcatgcccg

SEQ ID NO: 25362 - RNA, 20 nt, synthetic construct
  source 1..20: mol_type = other RNA
gctcatctgattctcactca

SEQ ID NO: 25363 - RNA, 20 nt, synthetic construct
  source 1..20: mol_type = other RNA
ctgattctcactcacggcac

SEQ ID NO: 25364 - RNA, 20 nt, synthetic construct
  source 1..20: mol_type = other RNA
acggcacaggcagtgcagca

SEQ ID NO: 25365 - RNA, 20 nt, synthetic construct
  source 1..20: mol_type = other RNA
acaggcagtgcagcaaggca

SEQ ID NO: 25366 - RNA, 20 nt, synthetic construct
  source 1..20: mol_type = other RNA
agcaaggcaaggccctgagc

SEQ ID NO: 25367 - RNA, 20 nt, synthetic construct
  source 1..20: mol_type = other RNA
gcaaggcaaggccctgagca

SEQ ID NO: 25368 - RNA, 20 nt, synthetic construct
  source 1..20: mol_type = other RNA
ggcaaggccctgagcaggga

SEQ ID NO: 25369 - RNA, 20 nt, synthetic construct
  source 1..20: mol_type = other RNA
gccctgagcagggaaggcca

SEQ ID NO: 25370 - RNA, 20 nt, synthetic construct
  source 1..20: mol_type = other RNA
accttggccttccctgctca

SEQ ID NO: 25371 - RNA, 20 nt, synthetic construct
  source 1..20: mol_type = other RNA
gaccttggccttccctgctc

SEQ ID NO: 25372 - RNA, 20 nt, synthetic construct
  source 1..20: mol_type = other RNA
agggaaggccaaggtcacaa

SEQ ID NO: 25373 - RNA, 20 nt, synthetic construct
  source 1..20: mol_type = other RNA
gccaaggtcacaaaggagtc

SEQ ID NO: 25374 - RNA, 20 nt, synthetic construct
  source 1..20: mol_type = other RNA
aggtcacaaaggagtcagga

SEQ ID NO: 25375 - RNA, 20 nt, synthetic construct
  source 1..20: mol_type = other RNA
tcctgactcctttgtgacct

SEQ ID NO: 25376 - RNA, 20 nt, synthetic construct
  source 1..20: mol_type = other RNA
caaaggagtcaggatggagc

SEQ ID NO: 25377 - RNA, 20 nt, synthetic construct
  source 1..20: mol_type = other RNA
aaaggagtcaggatggagct

SEQ ID NO: 25378 - RNA, 20 nt, synthetic construct
  source 1..20: mol_type = other RNA
aagatccctgctctccctcc

SEQ ID NO: 25379 - RNA, 20 nt, synthetic construct
  source 1..20: mol_type = other RNA
gagggagagcagggatcttc

SEQ ID NO: 25380 - RNA, 20 nt, synthetic construct
  source 1..20: mol_type = other RNA
ggcagcctggagggagagca

SEQ ID NO: 25381 - RNA, 20 nt, synthetic construct
  source 1..20: mol_type = other RNA
gggcagcctggagggagagc

SEQ ID NO: 25382 - RNA, 20 nt, synthetic construct
  source 1..20: mol_type = other RNA
tgggctgtgggcagcctgga

SEQ ID NO: 25383 - RNA, 20 nt, synthetic construct
  source 1..20: mol_type = other RNA
atgggctgtgggcagcctgg

SEQ ID NO: 25384 - RNA, 20 nt, synthetic construct
  source 1..20: mol_type = other RNA
aggatgggctgtgggcagcc

SEQ ID NO: 25385 - RNA, 20 nt, synthetic construct
  source 1..20: mol_type = other RNA
ggaaatggaggatgggctgt

SEQ ID NO: 25386 - RNA, 20 nt, synthetic construct
  source 1..20: mol_type = other RNA
gggaaatggaggatgggctg

SEQ ID NO: 25387 - RNA, 20 nt, synthetic construct
  source 1..20: mol_type = other RNA
caggaagggaaatggaggat

SEQ ID NO: 25388 - RNA, 20 nt, synthetic construct
  source 1..20: mol_type = other RNA
gcaggaagggaaatggagga

SEQ ID NO: 25389 - RNA, 20 nt, synthetic construct
  source 1..20: mol_type = other RNA
ctgggcaggaagggaaatgg

SEQ ID NO: 25390 - RNA, 20 nt, synthetic construct
  source 1..20: mol_type = other RNA
ttgctgggcaggaagggaaa

SEQ ID NO: 25391 - RNA, 20 nt, synthetic construct
  source 1..20: mol_type = other RNA
cttcctgcccagcaatccca

SEQ ID NO: 25392 - RNA, 20 nt, synthetic construct
  source 1..20: mol_type = other RNA
atgggattgctgggcaggaa

SEQ ID NO: 25393 - RNA, 20 nt, synthetic construct
  source 1..20: mol_type = other RNA
catgggattgctgggcagga

SEQ ID NO: 25394 - RNA, 20 nt, synthetic construct
  source 1..20: mol_type = other RNA
gtgccatgggattgctgggc

SEQ ID NO: 25395 - RNA, 20 nt, synthetic construct
  source 1..20: mol_type = other RNA
gcaatcccatggcacaccac

SEQ ID NO: 25396 - RNA, 20 nt, synthetic construct
  source 1..20: mol_type = other RNA
tggtgtgccatgggattgct

SEQ ID NO: 25397 - RNA, 20 nt, synthetic construct
  source 1..20: mol_type = other RNA
gtggtgtgccatgggattgc

SEQ ID NO: 25398 - RNA, 20 nt, synthetic construct
  source 1..20: mol_type = other RNA
gggggcctgtggtgtgccat

SEQ ID NO: 25399 - RNA, 20 nt, synthetic construct
  source 1..20: mol_type = other RNA
tgggggcctgtggtgtgcca

SEQ ID NO: 25400 - RNA, 20 nt, synthetic construct
  source 1..20: mol_type = other RNA
gaagatgtggtgggggcctg

SEQ ID NO: 25401 - RNA, 20 nt, synthetic construct
  source 1..20: mol_type = other RNA
actctgagaagatgtggtgg

SEQ ID NO: 25402 - RNA, 20 nt, synthetic construct
  source 1..20: mol_type = other RNA
gactctgagaagatgtggtg

SEQ ID NO: 25403 - RNA, 20 nt, synthetic construct
  source 1..20: mol_type = other RNA
agactctgagaagatgtggt

SEQ ID NO: 25404 - RNA, 20 nt, synthetic construct
  source 1..20: mol_type = other RNA
gagactctgagaagatgtgg

SEQ ID NO: 25405 - RNA, 20 nt, synthetic construct
  source 1..20: mol_type = other RNA
aaagagactctgagaagatg

SEQ ID NO: 25406 - RNA, 20 nt, synthetic construct
  source 1..20: mol_type = other RNA
tctcagagtctctttccacc

SEQ ID NO: 25407 - RNA, 20 nt, synthetic construct
  source 1..20: mol_type = other RNA
gagtctctttccacctggcc

SEQ ID NO: 25408 - RNA, 20 nt, synthetic construct
  source 1..20: mol_type = other RNA
gtttgtggaaccaggccagg

SEQ ID NO: 25409 - RNA, 20 nt, synthetic construct
  source 1..20: mol_type = other RNA
gtagtttgtggaaccaggcc

SEQ ID NO: 25410 - RNA, 20 nt, synthetic construct
  source 1..20: mol_type = other RNA
gatttgtagtttgtggaacc

SEQ ID NO: 25411 - RNA, 20 nt, synthetic construct
  source 1..20: mol_type = other RNA
tccacaaactacaaatcagc

SEQ ID NO: 25412 - RNA, 20 nt, synthetic construct
  source 1..20: mol_type = other RNA
acctgctgatttgtagtttg

SEQ ID NO: 25413 - RNA, 20 nt, synthetic construct
  source 1..20: mol_type = other RNA
agcaggtgctccaccagcag

SEQ ID NO: 25414 - RNA, 20 nt, synthetic construct
  source 1..20: mol_type = other RNA
gcaggtgctccaccagcagt

SEQ ID NO: 25415 - RNA, 20 nt, synthetic construct
  source 1..20: mol_type = other RNA
ggctggagtcccactgctgg

SEQ ID NO: 25416 - RNA, 20 nt, synthetic construct
  source 1..20: mol_type = other RNA
cggggctggagtcccactgc

SEQ ID NO: 25417 - RNA, 20 nt, synthetic construct
  source 1..20: mol_type = other RNA
ctggtttgggcaagcggggc

SEQ ID NO: 25418 - RNA, 20 nt, synthetic construct
  source 1..20: mol_type = other RNA
gtttctggtttgggcaagcg

SEQ ID NO: 25419 - RNA, 20 nt, synthetic construct
  source 1..20: mol_type = other RNA
ttgcccaaaccagaaacagc

SEQ ID NO: 25420 - RNA, 20 nt, synthetic construct
  source 1..20: mol_type = other RNA
ctgtttctggtttgggcaag

SEQ ID NO: 25421 - RNA, 20 nt, synthetic construct
  source 1..20: mol_type = other RNA
cccaaaccagaaacagctgg

SEQ ID NO: 25422 - RNA, 20 nt, synthetic construct
  source 1..20: mol_type = other RNA
ccaccagctgtttctggttt

SEQ ID NO: 25423 - RNA, 20 nt, synthetic construct
  source 1..20: mol_type = other RNA
accaccagctgtttctggtt

SEQ ID NO: 25424 - RNA, 20 nt, synthetic construct
  source 1..20: mol_type = other RNA
tctataccaccagctgtttc

SEQ ID NO: 25425 - RNA, 20 nt, synthetic construct
  source 1..20: mol_type = other RNA
ttttggaagaaagtctgcgc

SEQ ID NO: 25426 - RNA, 20 nt, synthetic construct
  source 1..20: mol_type = other RNA
caaaacaagacctcagccag

SEQ ID NO: 25427 - RNA, 20 nt, synthetic construct
  source 1..20: mol_type = other RNA
aaaacaagacctcagccagc

SEQ ID NO: 25428 - RNA, 20 nt, synthetic construct
  source 1..20: mol_type = other RNA
aaacaagacctcagccagcg

SEQ ID NO: 25429 - RNA, 20 nt, synthetic construct
  source 1..20: mol_type = other RNA
cgctggctgaggtcttgttt

SEQ ID NO: 25430 - RNA, 20 nt, synthetic construct
  source 1..20: mol_type = other RNA
tgtggaggccccgctggctg

SEQ ID NO: 25431 - RNA, 20 nt, synthetic construct
  source 1..20: mol_type = other RNA
gcaggctgtggaggccccgc

SEQ ID NO: 25432 - RNA, 20 nt, synthetic construct
  source 1..20: mol_type = other RNA
gcctccacagcctgccccag

SEQ ID NO: 25433 - RNA, 20 nt, synthetic construct
  source 1..20: mol_type = other RNA
cctccacagcctgccccaga

SEQ ID NO: 25434 - RNA, 20 nt, synthetic construct
  source 1..20: mol_type = other RNA
ctccacagcctgccccagag

SEQ ID NO: 25435 - RNA, 20 nt, synthetic construct
  source 1..20: mol_type = other RNA
ccctctggggcaggctgtgg

SEQ ID NO: 25436 - RNA, 20 nt, synthetic construct
  source 1..20: mol_type = other RNA
agcctgccccagaggggccc

SEQ ID NO: 25437 - RNA, 20 nt, synthetic construct
  source 1..20: mol_type = other RNA
gcctgccccagaggggccct

SEQ ID NO: 25438 - RNA, 20 nt, synthetic construct
  source 1..20: mol_type = other RNA
cctgccccagaggggccctg

SEQ ID NO: 25439 - RNA, 20 nt, synthetic construct
  source 1..20: mol_type = other RNA
ccccagggcccctctggggc

SEQ ID NO: 25440 - RNA, 20 nt, synthetic construct
  source 1..20: mol_type = other RNA
gcagccccagggcccctctg

SEQ ID NO: 25441 - RNA, 20 nt, synthetic construct
  source 1..20: mol_type = other RNA
ggcagccccagggcccctct

SEQ ID NO: 25442 - RNA, 20 nt, synthetic construct
  source 1..20: mol_type = other RNA
ggggccctggggctgcccgc

SEQ ID NO: 25443 - RNA, 20 nt, synthetic construct
  source 1..20: mol_type = other RNA
ggttccagcgggcagcccca

SEQ ID NO: 25444 - RNA, 20 nt, synthetic construct
  source 1..20: mol_type = other RNA
tggttccagcgggcagcccc

SEQ ID NO: 25445 - RNA, 20 nt, synthetic construct
  source 1..20: mol_type = other RNA
gctgcccgctggaaccagaa

SEQ ID NO: 25446 - RNA, 20 nt, synthetic construct
  source 1..20: mol_type = other RNA
tgggcctttctggttccagc

SEQ ID NO: 25447 - RNA, 20 nt, synthetic construct
  source 1..20: mol_type = other RNA
ggaaccagaaaggcccagtt

SEQ ID NO: 25448 - RNA, 20 nt, synthetic construct
  source 1..20: mol_type = other RNA
gaaccagaaaggcccagttt

SEQ ID NO: 25449 - RNA, 20 nt, synthetic construct
  source 1..20: mol_type = other RNA
aaccagaaaggcccagtttg

SEQ ID NO: 25450 - RNA, 20 nt, synthetic construct
  source 1..20: mol_type = other RNA
accagaaaggcccagtttgg

SEQ ID NO: 25451 - RNA, 20 nt, synthetic construct
  source 1..20: mol_type = other RNA
gcccccaaactgggcctttc

SEQ ID NO: 25452 - RNA, 20 nt, synthetic construct
  source 1..20: mol_type = other RNA
ggcccagtttgggggcagaa

SEQ ID NO: 25453 - RNA, 20 nt, synthetic construct
  source 1..20: mol_type = other RNA
gcccagtttgggggcagaaa

SEQ ID NO: 25454 - RNA, 20 nt, synthetic construct
  source 1..20: mol_type = other RNA
cccagtttgggggcagaaag

SEQ ID NO: 25455 - RNA, 20 nt, synthetic construct
  source 1..20: mol_type = other RNA
cccctttctgcccccaaact

SEQ ID NO: 25456 - RNA, 20 nt, synthetic construct
  source 1..20: mol_type = other RNA
gcccctttctgcccccaaac

SEQ ID NO: 25457 - RNA, 20 nt, synthetic construct
  source 1..20: mol_type = other RNA
cagaaaggggcccagacaga

SEQ ID NO: 25458 - RNA, 20 nt, synthetic construct
  source 1..20: mol_type = other RNA
aaggggcccagacagacggc

SEQ ID NO: 25459 - RNA, 20 nt, synthetic construct
  source 1..20: mol_type = other RNA
gcccagacagacggcaggtc

SEQ ID NO: 25460 - RNA, 20 nt, synthetic construct
  source 1..20: mol_type = other RNA
gcctgacctgccgtctgtct

SEQ ID NO: 25461 - RNA, 20 nt, synthetic construct
  source 1..20: mol_type = other RNA
tgcctgacctgccgtctgtc

SEQ ID NO: 25462 - RNA, 20 nt, synthetic construct
  source 1..20: mol_type = other RNA
acaaccacagaccgtgaaga

SEQ ID NO: 25463 - RNA, 20 nt, synthetic construct
  source 1..20: mol_type = other RNA
acttccatcttcacggtctg

SEQ ID NO: 25464 - RNA, 20 nt, synthetic construct
  source 1..20: mol_type = other RNA
cagcatcacttccatcttca

SEQ ID NO: 25465 - RNA, 20 nt, synthetic construct
  source 1..20: mol_type = other RNA
agtgatgctgctgaaaccga

SEQ ID NO: 25466 - RNA, 20 nt, synthetic construct
  source 1..20: mol_type = other RNA
cgaaggagccacccactagc

SEQ ID NO: 25467 - RNA, 20 nt, synthetic construct
  source 1..20: mol_type = other RNA
ctgctagtgggtggctcctt

SEQ ID NO: 25468 - RNA, 20 nt, synthetic construct
  source 1..20: mol_type = other RNA
cactagcaggcaagcacttg

SEQ ID NO: 25469 - RNA, 20 nt, synthetic construct
  source 1..20: mol_type = other RNA
actagcaggcaagcacttgt

SEQ ID NO: 25470 - RNA, 20 nt, synthetic construct
  source 1..20: mol_type = other RNA
acaagtgcttgcctgctagt

SEQ ID NO: 25471 - RNA, 20 nt, synthetic construct
  source 1..20: mol_type = other RNA
agcaggcaagcacttgtggg

SEQ ID NO: 25472 - RNA, 20 nt, synthetic construct
  source 1..20: mol_type = other RNA
ggcaagcacttgtgggtggc

SEQ ID NO: 25473 - RNA, 20 nt, synthetic construct
  source 1..20: mol_type = other RNA
gcaagcacttgtgggtggca

SEQ ID NO: 25474 - RNA, 20 nt, synthetic construct
  source 1..20: mol_type = other RNA
agcacttgtgggtggcaggg

SEQ ID NO: 25475 - RNA, 20 nt, synthetic construct
  source 1..20: mol_type = other RNA
gcagggaggcagtagtcccc

SEQ ID NO: 25476 - RNA, 20 nt, synthetic construct
  source 1..20: mol_type = other RNA
cagggaggcagtagtcccca

SEQ ID NO: 25477 - RNA, 20 nt, synthetic construct
  source 1..20: mol_type = other RNA
aggctgagagttgagccctg

SEQ ID NO: 25478 - RNA, 20 nt, synthetic construct
  source 1..20: mol_type = other RNA
aaggctgagagttgagccct

SEQ ID NO: 25479 - RNA, 20 nt, synthetic construct
  source 1..20: mol_type = other RNA
taaggctgagagttgagccc

SEQ ID NO: 25480 - RNA, 20 nt, synthetic construct
  source 1..20: mol_type = other RNA
cagccttaccccagaaagag

SEQ ID NO: 25481 - RNA, 20 nt, synthetic construct
  source 1..20: mol_type = other RNA
agccttaccccagaaagaga

SEQ ID NO: 25482 - RNA, 20 nt, synthetic construct
  source 1..20: mol_type = other RNA
gccttaccccagaaagagag

SEQ ID NO: 25483 - RNA, 20 nt, synthetic construct
  source 1..20: mol_type = other RNA
acccctctctttctggggta

SEQ ID NO: 25484 - RNA, 20 nt, synthetic construct
  source 1..20: mol_type = other RNA
atcatacccctctctttctg

SEQ ID NO: 25485 - RNA, 20 nt, synthetic construct
  source 1..20: mol_type = other RNA
tatcatacccctctctttct

SEQ ID NO: 25486 - RNA, 20 nt, synthetic construct
  source 1..20: mol_type = other RNA
ttatcatacccctctctttc

SEQ ID NO: 25487 - RNA, 20 nt, synthetic construct
  source 1..20: mol_type = other RNA
gcttttgctctgaaatgctt

SEQ ID NO: 25488 - RNA, 20 nt, synthetic construct
  source 1..20: mol_type = other RNA
tcttcccattagcagtgttc

SEQ ID NO: 25489 - RNA, 20 nt, synthetic construct
  source 1..20: mol_type = other RNA
tcccattagcagtgttctgg

SEQ ID NO: 25490 - RNA, 20 nt, synthetic construct
  source 1..20: mol_type = other RNA
attagcagtgttctggtggc

SEQ ID NO: 25491 - RNA, 20 nt, synthetic construct
  source 1..20: mol_type = other RNA
ttagcagtgttctggtggct

SEQ ID NO: 25492 - RNA, 20 nt, synthetic construct
  source 1..20: mol_type = other RNA
gccaccagaacactgctaat

SEQ ID NO: 25493 - RNA, 20 nt, synthetic construct
  source 1..20: mol_type = other RNA
agccaccagaacactgctaa

SEQ ID NO: 25494 - RNA, 20 nt, synthetic construct
  source 1..20: mol_type = other RNA
cagtgttctggtggctgggt

SEQ ID NO: 25495 - RNA, 20 nt, synthetic construct
  source 1..20: mol_type = other RNA
agtgttctggtggctgggta

SEQ ID NO: 25496 - RNA, 20 nt, synthetic construct
  source 1..20: mol_type = other RNA
gtgttctggtggctgggtag

SEQ ID NO: 25497 - RNA, 20 nt, synthetic construct
  source 1..20: mol_type = other RNA
tgttctggtggctgggtagg

SEQ ID NO: 25498 - RNA, 20 nt, synthetic construct
  source 1..20: mol_type = other RNA
gttctggtggctgggtaggg

SEQ ID NO: 25499 - RNA, 20 nt, synthetic construct
  source 1..20: mol_type = other RNA
ctggtggctgggtagggggg

SEQ ID NO: 25500 - RNA, 20 nt, synthetic construct
  source 1..20: mol_type = other RNA
gaatatcatttggggggtct

SEQ ID NO: 25501 - RNA, 20 nt, synthetic construct
  source 1..20: mol_type = other RNA
tgaatatcatttggggggtc

SEQ ID NO: 25502 - RNA, 20 nt, synthetic construct
  source 1..20: mol_type = other RNA
gcaagtgaatatcatttggg

SEQ ID NO: 25503 - RNA, 20 nt, synthetic construct
  source 1..20: mol_type = other RNA
tgcaagtgaatatcatttgg

SEQ ID NO: 25504 - RNA, 20 nt, synthetic construct
  source 1..20: mol_type = other RNA
atgcaagtgaatatcatttg

SEQ ID NO: 25505 - RNA, 20 nt, synthetic construct
  source 1..20: mol_type = other RNA
tatgcaagtgaatatcattt

SEQ ID NO: 25506 - RNA, 20 nt, synthetic construct
  source 1..20: mol_type = other RNA
ctatgcaagtgaatatcatt

SEQ ID NO: 25507 - RNA, 20 nt, synthetic construct
  source 1..20: mol_type = other RNA
aagtattttgcaaatgttag

SEQ ID NO: 25508 - RNA, 20 nt, synthetic construct
  source 1..20: mol_type = other RNA
cagatggaaaaacaatgctt

SEQ ID NO: 25509 - RNA, 20 nt, synthetic construct
  source 1..20: mol_type = other RNA
tcagatggaaaaacaatgct

SEQ ID NO: 25510 - RNA, 20 nt, synthetic construct
  source 1..20: mol_type = other RNA
tctgattatcacaacagccc

SEQ ID NO: 25511 - RNA, 20 nt, synthetic construct
  source 1..20: mol_type = other RNA
ctgattatcacaacagccct

SEQ ID NO: 25512 - RNA, 20 nt, synthetic construct
  source 1..20: mol_type = other RNA
gggctgttgtgataatcaga

SEQ ID NO: 25513 - RNA, 20 nt, synthetic construct
  source 1..20: mol_type = other RNA
tcacaacagccctgggaaga

SEQ ID NO: 25514 - RNA, 20 nt, synthetic construct
  source 1..20: mol_type = other RNA
aacagccctgggaagaaggc

SEQ ID NO: 25515 - RNA, 20 nt, synthetic construct
  source 1..20: mol_type = other RNA
acagccctgggaagaaggca

SEQ ID NO: 25516 - RNA, 20 nt, synthetic construct
  source 1..20: mol_type = other RNA
tcagccctgccttcttccca

SEQ ID NO: 25517 - RNA, 20 nt, synthetic construct
  source 1..20: mol_type = other RNA
atcagccctgccttcttccc

SEQ ID NO: 25518 - RNA, 20 nt, synthetic construct
  source 1..20: mol_type = other RNA
cagggctgatacctgcctga

SEQ ID NO: 25519 - RNA, 20 nt, synthetic construct
  source 1..20: mol_type = other RNA
tgatacctgcctgatggata

SEQ ID NO: 25520 - RNA, 20 nt, synthetic construct
  source 1..20: mol_type = other RNA
agtttccttatccatcaggc

SEQ ID NO: 25521 - RNA, 20 nt, synthetic construct
  source 1..20: mol_type = other RNA
cttcagtttccttatccatc

SEQ ID NO: 25522 - RNA, 20 nt, synthetic construct
  source 1..20: mol_type = other RNA
aaggaaactgaagtccagct

SEQ ID NO: 25523 - RNA, 20 nt, synthetic construct
  source 1..20: mol_type = other RNA
aggaaactgaagtccagctt

SEQ ID NO: 25524 - RNA, 20 nt, synthetic construct
  source 1..20: mol_type = other RNA
ggaaactgaagtccagcttg

SEQ ID NO: 25525 - RNA, 20 nt, synthetic construct
  source 1..20: mol_type = other RNA
ggctgattaagtccccaagc

SEQ ID NO: 25526 - RNA, 20 nt, synthetic construct
  source 1..20: mol_type = other RNA
tcagcccaatttaatgcctt

SEQ ID NO: 25527 - RNA, 20 nt, synthetic construct
  source 1..20: mol_type = other RNA
aatttaatgcctttggtcac

SEQ ID NO: 25528 - RNA, 20 nt, synthetic construct
  source 1..20: mol_type = other RNA
gtgaccaaaggcattaaatt

SEQ ID NO: 25529 - RNA, 20 nt, synthetic construct
  source 1..20: mol_type = other RNA
agtgaccaaaggcattaaat

SEQ ID NO: 25530 - RNA, 20 nt, synthetic construct
  source 1..20: mol_type = other RNA
tttggtcactggctgcatcc

SEQ ID NO: 25531 - RNA, 20 nt, synthetic construct
  source 1..20: mol_type = other RNA
ttggtcactggctgcatcct

SEQ ID NO: 25532 - RNA, 20 nt, synthetic construct
  source 1..20: mol_type = other RNA
tggtcactggctgcatcctg

SEQ ID NO: 25533 - RNA, 20 nt, synthetic construct
  source 1..20: mol_type = other RNA
aggatgcagccagtgaccaa

SEQ ID NO: 25534 - RNA, 20 nt, synthetic construct
  source 1..20: mol_type = other RNA
ttgcagggatagctggcccc

SEQ ID NO: 25535 - RNA, 20 nt, synthetic construct
  source 1..20: mol_type = other RNA
gccagctatccctgcaaccc

SEQ ID NO: 25536 - RNA, 20 nt, synthetic construct
  source 1..20: mol_type = other RNA
tatccctgcaaccctggagc

SEQ ID NO: 25537 - RNA, 20 nt, synthetic construct
  source 1..20: mol_type = other RNA
tcacctgctccagggttgca

SEQ ID NO: 25538 - RNA, 20 nt, synthetic construct
  source 1..20: mol_type = other RNA
atcacctgctccagggttgc

SEQ ID NO: 25539 - RNA, 20 nt, synthetic construct
  source 1..20: mol_type = other RNA
ggagcaggtgatgccctccc

SEQ ID NO: 25540 - RNA, 20 nt, synthetic construct
  source 1..20: mol_type = other RNA
ggagggcatcacctgctcca

SEQ ID NO: 25541 - RNA, 20 nt, synthetic construct
  source 1..20: mol_type = other RNA
gggagggcatcacctgctcc

SEQ ID NO: 25542 - RNA, 20 nt, synthetic construct
  source 1..20: mol_type = other RNA
tgatgccctccctggcccag

SEQ ID NO: 25543 - RNA, 20 nt, synthetic construct
  source 1..20: mol_type = other RNA
gatgccctccctggcccaga

SEQ ID NO: 25544 - RNA, 20 nt, synthetic construct
  source 1..20: mol_type = other RNA
ttttccctctgggccaggga

SEQ ID NO: 25545 - RNA, 20 nt, synthetic construct
  source 1..20: mol_type = other RNA
cttttccctctgggccaggg

SEQ ID NO: 25546 - RNA, 20 nt, synthetic construct
  source 1..20: mol_type = other RNA
acacttttccctctgggcca

SEQ ID NO: 25547 - RNA, 20 nt, synthetic construct
  source 1..20: mol_type = other RNA
tacacttttccctctgggcc

SEQ ID NO: 25548 - RNA, 20 nt, synthetic construct
  source 1..20: mol_type = other RNA
ttgcttacacttttccctct

SEQ ID NO: 25549 - RNA, 20 nt, synthetic construct
  source 1..20: mol_type = other RNA
tttgcttacacttttccctc

SEQ ID NO: 25550 - RNA, 20 nt, synthetic construct
  source 1..20: mol_type = other RNA
gaaaagtgtaagcaaatctc

SEQ ID NO: 25551 - RNA, 20 nt, synthetic construct
  source 1..20: mol_type = other RNA
tgtaagcaaatctctggtac

SEQ ID NO: 25552 - RNA, 20 nt, synthetic construct
  source 1..20: mol_type = other RNA
gtaagcaaatctctggtaca

SEQ ID NO: 25553 - RNA, 20 nt, synthetic construct
  source 1..20: mol_type = other RNA
agcaaatctctggtacaggg

SEQ ID NO: 25554 - RNA, 20 nt, synthetic construct
  source 1..20: mol_type = other RNA
aaatctctggtacagggagg

SEQ ID NO: 25555 - RNA, 20 nt, synthetic construct
  source 1..20: mol_type = other RNA
ctctggtacagggaggtgga

SEQ ID NO: 25556 - RNA, 20 nt, synthetic construct
  source 1..20: mol_type = other RNA
agggaggtggaaggtcatcg

SEQ ID NO: 25557 - RNA, 20 nt, synthetic construct
  source 1..20: mol_type = other RNA
aacatctacctccccagcag

SEQ ID NO: 25558 - RNA, 20 nt, synthetic construct
  source 1..20: mol_type = other RNA
tctgctggggaggtagatgt

SEQ ID NO: 25559 - RNA, 20 nt, synthetic construct
  source 1..20: mol_type = other RNA
ctacctccccagcagaggtg

SEQ ID NO: 25560 - RNA, 20 nt, synthetic construct
  source 1..20: mol_type = other RNA
tacctccccagcagaggtga

SEQ ID NO: 25561 - RNA, 20 nt, synthetic construct
  source 1..20: mol_type = other RNA
agccctcacctctgctgggg

SEQ ID NO: 25562 - RNA, 20 nt, synthetic construct
  source 1..20: mol_type = other RNA
cagcagaggtgagggctgcc

SEQ ID NO: 25563 - RNA, 20 nt, synthetic construct
  source 1..20: mol_type = other RNA
agcagaggtgagggctgcca

SEQ ID NO: 25564 - RNA, 20 nt, synthetic construct
  source 1..20: mol_type = other RNA
ggcagccctcacctctgctg

SEQ ID NO: 25565 - RNA, 20 nt, synthetic construct
  source 1..20: mol_type = other RNA
tggcagccctcacctctgct

SEQ ID NO: 25566 - RNA, 20 nt, synthetic construct
  source 1..20: mol_type = other RNA
ctggcagccctcacctctgc

SEQ ID NO: 25567 - RNA, 20 nt, synthetic construct
  source 1..20: mol_type = other RNA
gtgagggctgccagggatgc

SEQ ID NO: 25568 - RNA, 20 nt, synthetic construct
  source 1..20: mol_type = other RNA
gggctgccagggatgctggc

SEQ ID NO: 25569 - RNA, 20 nt, synthetic construct
  source 1..20: mol_type = other RNA
ctgccagggatgctggcagg

SEQ ID NO: 25570 - RNA, 20 nt, synthetic construct
  source 1..20: mol_type = other RNA
tgccagggatgctggcaggt

SEQ ID NO: 25571 - RNA, 20 nt, synthetic construct
  source 1..20: mol_type = other RNA
agggatgctggcaggtgggc

SEQ ID NO: 25572 - RNA, 20 nt, synthetic construct
  source 1..20: mol_type = other RNA
agcccacctgccagcatccc

SEQ ID NO: 25573 - RNA, 20 nt, synthetic construct
  source 1..20: mol_type = other RNA
gctggcaggtgggctggcag

SEQ ID NO: 25574 - RNA, 20 nt, synthetic construct
  source 1..20: mol_type = other RNA
ctggcaggtgggctggcaga

SEQ ID NO: 25575 - RNA, 20 nt, synthetic construct
  source 1..20: mol_type = other RNA
tggcaggtgggctggcagag

SEQ ID NO: 25576 - RNA, 20 nt, synthetic construct
  source 1..20: mol_type = other RNA
ggcaggtgggctggcagagg

SEQ ID NO: 25577 - RNA, 20 nt, synthetic construct
  source 1..20: mol_type = other RNA
tgggctggcagagggggtat

SEQ ID NO: 25578 - RNA, 20 nt, synthetic construct
  source 1..20: mol_type = other RNA
gggctggcagagggggtata

SEQ ID NO: 25579 - RNA, 20 nt, synthetic construct
  source 1..20: mol_type = other RNA
tggcagagggggtataggga

SEQ ID NO: 25580 - RNA, 20 nt, synthetic construct
  source 1..20: mol_type = other RNA
ggcagagggggtatagggaa

SEQ ID NO: 25581 - RNA, 20 nt, synthetic construct
  source 1..20: mol_type = other RNA
gcagagggggtatagggaag

SEQ ID NO: 25582 - RNA, 20 nt, synthetic construct
  source 1..20: mol_type = other RNA
ggtatagggaaggggtctcc

SEQ ID NO: 25583 - RNA, 20 nt, synthetic construct
  source 1..20: mol_type = other RNA
gaaggggtctccaggaaaga

SEQ ID NO: 25584 - RNA, 20 nt, synthetic construct
  source 1..20: mol_type = other RNA
ctgttctgtgccgtctttcc

SEQ ID NO: 25585 - RNA, 20 nt, synthetic construct
  source 1..20: mol_type = other RNA
cacagaacagaacgtcagag

SEQ ID NO: 25586 - RNA, 20 nt, synthetic construct
  source 1..20: mol_type = other RNA
agtgtctactctgctgtgta

SEQ ID NO: 25587 - RNA, 20 nt, synthetic construct
  source 1..20: mol_type = other RNA
ctctgctgtgtatggaacca

SEQ ID NO: 25588 - RNA, 20 nt, synthetic construct
  source 1..20: mol_type = other RNA
tctgctgtgtatggaaccat

SEQ ID NO: 25589 - RNA, 20 nt, synthetic construct
  source 1..20: mol_type = other RNA
ggctcattccctcacatgca

SEQ ID NO: 25590 - RNA, 20 nt, synthetic construct
  source 1..20: mol_type = other RNA
gctcattccctcacatgcaa

SEQ ID NO: 25591 - RNA, 20 nt, synthetic construct
  source 1..20: mol_type = other RNA
ctcattccctcacatgcaag

SEQ ID NO: 25592 - RNA, 20 nt, synthetic construct
  source 1..20: mol_type = other RNA
attccctcacatgcaagggg

SEQ ID NO: 25593 - RNA, 20 nt, synthetic construct
  source 1..20: mol_type = other RNA
cacatgcaaggggaggagca

SEQ ID NO: 25594 - RNA, 20 nt, synthetic construct
  source 1..20: mol_type = other RNA
acatgcaaggggaggagcat

SEQ ID NO: 25595 - RNA, 20 nt, synthetic construct
  source 1..20: mol_type = other RNA
tgctcctccccttgcatgtg

SEQ ID NO: 25596 - RNA, 20 nt, synthetic construct
  source 1..20: mol_type = other RNA
agcatgggccacacagaaac

SEQ ID NO: 25597 - RNA, 20 nt, synthetic construct
  source 1..20: mol_type = other RNA
gcatgggccacacagaaacc

SEQ ID NO: 25598 - RNA, 20 nt, synthetic construct
  source 1..20: mol_type = other RNA
gccacacagaaaccgggtga

SEQ ID NO: 25599 - RNA, 20 nt, synthetic construct
  source 1..20: mol_type = other RNA
gccatcacccggtttctgtg

SEQ ID NO: 25600 - RNA, 20 nt, synthetic construct
  source 1..20: mol_type = other RNA
aaccgggtgatggctaaagc

SEQ ID NO: 25601 - RNA, 20 nt, synthetic construct
  source 1..20: mol_type = other RNA
tgatggctaaagctggcctc

SEQ ID NO: 25602 - RNA, 20 nt, synthetic construct
  source 1..20: mol_type = other RNA
cttgggtcttcttgatcctg

SEQ ID NO: 25603 - RNA, 20 nt, synthetic construct
  source 1..20: mol_type = other RNA
atcaagaagacccaagtctc

SEQ ID NO: 25604 - RNA, 20 nt, synthetic construct
  source 1..20: mol_type = other RNA
gctgctagctcctgagactt

SEQ ID NO: 25605 - RNA, 20 nt, synthetic construct
  source 1..20: mol_type = other RNA
tgctgctagctcctgagact

SEQ ID NO: 25606 - RNA, 20 nt, synthetic construct
  source 1..20: mol_type = other RNA
caggagctagcagcaagctg

SEQ ID NO: 25607 - RNA, 20 nt, synthetic construct
  source 1..20: mol_type = other RNA
aagagagagagccagcacca

SEQ ID NO: 25608 - RNA, 20 nt, synthetic construct
  source 1..20: mol_type = other RNA
cagcgatgtttccatggtgc

SEQ ID NO: 25609 - RNA, 20 nt, synthetic construct
  source 1..20: mol_type = other RNA
ccatggaaacatcgctgcct

SEQ ID NO: 25610 - RNA, 20 nt, synthetic construct
  source 1..20: mol_type = other RNA
tggaaacatcgctgccttgg

SEQ ID NO: 25611 - RNA, 20 nt, synthetic construct
  source 1..20: mol_type = other RNA
ccaaggcagcgatgtttcca

SEQ ID NO: 25612 - RNA, 20 nt, synthetic construct
  source 1..20: mol_type = other RNA
aacatcgctgccttggaggc

SEQ ID NO: 25613 - RNA, 20 nt, synthetic construct
  source 1..20: mol_type = other RNA
tgccttggaggcaggaagaa

SEQ ID NO: 25614 - RNA, 20 nt, synthetic construct
  source 1..20: mol_type = other RNA
gacctttcttcctgcctcca

SEQ ID NO: 25615 - RNA, 20 nt, synthetic construct
  source 1..20: mol_type = other RNA
gcaggaagaaaggtccacac

SEQ ID NO: 25616 - RNA, 20 nt, synthetic construct
  source 1..20: mol_type = other RNA
caggaagaaaggtccacaca

SEQ ID NO: 25617 - RNA, 20 nt, synthetic construct
  source 1..20: mol_type = other RNA
ccacacagggaaagtgctca

SEQ ID NO: 25618 - RNA, 20 nt, synthetic construct
  source 1..20: mol_type = other RNA
ccttgagcactttccctgtg

SEQ ID NO: 25619 - RNA, 20 nt, synthetic construct
  source 1..20: mol_type = other RNA
aggccaaccttgcgaacacg

SEQ ID NO: 25620 - RNA, 20 nt, synthetic construct
  source 1..20: mol_type = other RNA
aggcctcgtgttcgcaaggt

SEQ ID NO: 25621 - RNA, 20 nt, synthetic construct
  source 1..20: mol_type = other RNA
ttgcgaacacgaggcctgag

SEQ ID NO: 25622 - RNA, 20 nt, synthetic construct
  source 1..20: mol_type = other RNA
tgcgaacacgaggcctgaga

SEQ ID NO: 25623 - RNA, 20 nt, synthetic construct
  source 1..20: mol_type = other RNA
gcgaacacgaggcctgagag

SEQ ID NO: 25624 - RNA, 20 nt, synthetic construct
  source 1..20: mol_type = other RNA
cgaacacgaggcctgagagg

SEQ ID NO: 25625 - RNA, 20 nt, synthetic construct
  source 1..20: mol_type = other RNA
tgcaggtgaggccccctctc

SEQ ID NO: 25626 - RNA, 20 nt, synthetic construct
  source 1..20: mol_type = other RNA
agctgaggctagtgcaggtg

SEQ ID NO: 25627 - RNA, 20 nt, synthetic construct
  source 1..20: mol_type = other RNA
gacagagctgaggctagtgc

SEQ ID NO: 25628 - RNA, 20 nt, synthetic construct
  source 1..20: mol_type = other RNA
cctcagctctgtccaccctg

SEQ ID NO: 25629 - RNA, 20 nt, synthetic construct
  source 1..20: mol_type = other RNA
ctcagctctgtccaccctgt

SEQ ID NO: 25630 - RNA, 20 nt, synthetic construct
  source 1..20: mol_type = other RNA
ccacagggtggacagagctg

SEQ ID NO: 25631 - RNA, 20 nt, synthetic construct
  source 1..20: mol_type = other RNA
ccctgtgggctgtgaaaccc

SEQ ID NO: 25632 - RNA, 20 nt, synthetic construct
  source 1..20: mol_type = other RNA
gggtttcacagcccacaggg

SEQ ID NO: 25633 - RNA, 20 nt, synthetic construct
  source 1..20: mol_type = other RNA
ccagggtttcacagcccaca

SEQ ID NO: 25634 - RNA, 20 nt, synthetic construct
  source 1..20: mol_type = other RNA
tccagggtttcacagcccac

SEQ ID NO: 25635 - RNA, 20 nt, synthetic construct
  source 1..20: mol_type = other RNA
aaaggtgagtggctgctcca

SEQ ID NO: 25636 - RNA, 20 nt, synthetic construct
  source 1..20: mol_type = other RNA
gaaaggtgagtggctgctcc

SEQ ID NO: 25637 - RNA, 20 nt, synthetic construct
  source 1..20: mol_type = other RNA
actcacctttcctgagcctc

SEQ ID NO: 25638 - RNA, 20 nt, synthetic construct
  source 1..20: mol_type = other RNA
tgaggctcaggaaaggtgag

SEQ ID NO: 25639 - RNA, 20 nt, synthetic construct
  source 1..20: mol_type = other RNA
aggcacctgaggctcaggaa

SEQ ID NO: 25640 - RNA, 20 nt, synthetic construct
  source 1..20: mol_type = other RNA
agatgaggcacctgaggctc

SEQ ID NO: 25641 - RNA, 20 nt, synthetic construct
  source 1..20: mol_type = other RNA
aggtgcctcatctgtaaagc

SEQ ID NO: 25642 - RNA, 20 nt, synthetic construct
  source 1..20: mol_type = other RNA
ctttacagatgaggcacctg

SEQ ID NO: 25643 - RNA, 20 nt, synthetic construct
  source 1..20: mol_type = other RNA
ttactcctgctttacagatg

SEQ ID NO: 25644 - RNA, 20 nt, synthetic construct
  source 1..20: mol_type = other RNA
tctttgatcttctatcaggt

SEQ ID NO: 25645 - RNA, 20 nt, synthetic construct
  source 1..20: mol_type = other RNA
aatttctttgatcttctatc

SEQ ID NO: 25646 - RNA, 20 nt, synthetic construct
  source 1..20: mol_type = other RNA
tgaaacaatatgtgtatagt

SEQ ID NO: 25647 - RNA, 20 nt, synthetic construct
  source 1..20: mol_type = other RNA
acaatatgtgtatagttgga

SEQ ID NO: 25648 - RNA, 20 nt, synthetic construct
  source 1..20: mol_type = other RNA
caatatgtgtatagttggaa

SEQ ID NO: 25649 - RNA, 20 nt, synthetic construct
  source 1..20: mol_type = other RNA
gaattctcactttctacttt

SEQ ID NO: 25650 - RNA, 20 nt, synthetic construct
  source 1..20: mol_type = other RNA
tcttgttaaatcagataatc

SEQ ID NO: 25651 - RNA, 20 nt, synthetic construct
  source 1..20: mol_type = other RNA
actgtatactcttattattt

SEQ ID NO: 25652 - RNA, 20 nt, synthetic construct
  source 1..20: mol_type = other RNA
ctcagcatttgacacacagc

SEQ ID NO: 25653 - RNA, 20 nt, synthetic construct
  source 1..20: mol_type = other RNA
cacagcaggtgcttaataaa

SEQ ID NO: 25654 - RNA, 20 nt, synthetic construct
  source 1..20: mol_type = other RNA
aggtgcttaataaaaggctg

SEQ ID NO: 25655 - RNA, 20 nt, synthetic construct
  source 1..20: mol_type = other RNA
ataagctgggcacagttgtg

SEQ ID NO: 25656 - RNA, 20 nt, synthetic construct
  source 1..20: mol_type = other RNA
aactgtgcccagcttatcta

SEQ ID NO: 25657 - RNA, 20 nt, synthetic construct
  source 1..20: mol_type = other RNA
actgtgcccagcttatctaa

SEQ ID NO: 25658 - RNA, 20 nt, synthetic construct
  source 1..20: mol_type = other RNA
cccagcttatctaagggcca

SEQ ID NO: 25659 - RNA, 20 nt, synthetic construct
  source 1..20: mol_type = other RNA
ccttggcccttagataagct

SEQ ID NO: 25660 - RNA, 20 nt, synthetic construct
  source 1..20: mol_type = other RNA
gccttggcccttagataagc

SEQ ID NO: 25661 - RNA, 20 nt, synthetic construct
  source 1..20: mol_type = other RNA
agaacaaatggggaaagcct

SEQ ID NO: 25662 - RNA, 20 nt, synthetic construct
  source 1..20: mol_type = other RNA
ccatttgttctctcctttaa

SEQ ID NO: 25663 - RNA, 20 nt, synthetic construct
  source 1..20: mol_type = other RNA
catttgttctctcctttaat

SEQ ID NO: 25664 - RNA, 20 nt, synthetic construct
  source 1..20: mol_type = other RNA
attaaaggagagaacaaatg

SEQ ID NO: 25665 - RNA, 20 nt, synthetic construct
  source 1..20: mol_type = other RNA
cattaaaggagagaacaaat

SEQ ID NO: 25666 - RNA, 20 nt, synthetic construct
  source 1..20: mol_type = other RNA
ccattaaaggagagaacaaa

SEQ ID NO: 25667 - RNA, 20 nt, synthetic construct
  source 1..20: mol_type = other RNA
ctctcctttaatgggatttt

SEQ ID NO: 25668 - RNA, 20 nt, synthetic construct
  source 1..20: mol_type = other RNA
agagcctaaaatcccattaa

SEQ ID NO: 25669 - RNA, 20 nt, synthetic construct
  source 1..20: mol_type = other RNA
ttccgtcagctcagtaagct

SEQ ID NO: 25670 - RNA, 20 nt, synthetic construct
  source 1..20: mol_type = other RNA
cagctcagtaagctaggttc

SEQ ID NO: 25671 - RNA, 20 nt, synthetic construct
  source 1..20: mol_type = other RNA
aacctagcttactgagctga

SEQ ID NO: 25672 - RNA, 20 nt, synthetic construct
  source 1..20: mol_type = other RNA
ggtcactagagaataagtgg

SEQ ID NO: 25673 - RNA, 20 nt, synthetic construct
  source 1..20: mol_type = other RNA
gcaggtcactagagaataag

SEQ ID NO: 25674 - RNA, 20 nt, synthetic construct
  source 1..20: mol_type = other RNA
tgcatatcaccatttaactg

SEQ ID NO: 25675 - RNA, 20 nt, synthetic construct
  source 1..20: mol_type = other RNA
acagttaaatggtgatatgc

SEQ ID NO: 25676 - RNA, 20 nt, synthetic construct
  source 1..20: mol_type = other RNA
ccatttaactgtggttaagc

SEQ ID NO: 25677 - RNA, 20 nt, synthetic construct
  source 1..20: mol_type = other RNA
catttaactgtggttaagca

SEQ ID NO: 25678 - RNA, 20 nt, synthetic construct
  source 1..20: mol_type = other RNA
cctgcttaaccacagttaaa

SEQ ID NO: 25679 - RNA, 20 nt, synthetic construct
  source 1..20: mol_type = other RNA
ctgtggttaagcagggtgcc

SEQ ID NO: 25680 - RNA, 20 nt, synthetic construct
  source 1..20: mol_type = other RNA
tcactagctatggtgtgtcc

SEQ ID NO: 25681 - RNA, 20 nt, synthetic construct
  source 1..20: mol_type = other RNA
agctacatgttcactagcta

SEQ ID NO: 25682 - RNA, 20 nt, synthetic construct
  source 1..20: mol_type = other RNA
agtgtggcatcgtggttcaa

SEQ ID NO: 25683 - RNA, 20 nt, synthetic construct
  source 1..20: mol_type = other RNA
gagtgtggcatcgtggttca

SEQ ID NO: 25684 - RNA, 20 nt, synthetic construct
  source 1..20: mol_type = other RNA
atgccacactcaccaacaac

SEQ ID NO: 25685 - RNA, 20 nt, synthetic construct
  source 1..20: mol_type = other RNA
tgccacactcaccaacaact

SEQ ID NO: 25686 - RNA, 20 nt, synthetic construct
  source 1..20: mol_type = other RNA
ttcccagttgttggtgagtg

SEQ ID NO: 25687 - RNA, 20 nt, synthetic construct
  source 1..20: mol_type = other RNA
aggctcagattcccagttgt

SEQ ID NO: 25688 - RNA, 20 nt, synthetic construct
  source 1..20: mol_type = other RNA
cctcatttcctctgctgtaa

SEQ ID NO: 25689 - RNA, 20 nt, synthetic construct
  source 1..20: mol_type = other RNA
ctcatttcctctgctgtaaa

SEQ ID NO: 25690 - RNA, 20 nt, synthetic construct
  source 1..20: mol_type = other RNA
cctttacagcagaggaaatg

SEQ ID NO: 25691 - RNA, 20 nt, synthetic construct
  source 1..20: mol_type = other RNA
gatattgccctttacagcag

SEQ ID NO: 25692 - RNA, 20 nt, synthetic construct
  source 1..20: mol_type = other RNA
atatcctgcaattccaccca

SEQ ID NO: 25693 - RNA, 20 nt, synthetic construct
  source 1..20: mol_type = other RNA
caattccacccaaggatgaa

SEQ ID NO: 25694 - RNA, 20 nt, synthetic construct
  source 1..20: mol_type = other RNA
tcatccttgggtggaattgc

SEQ ID NO: 25695 - RNA, 20 nt, synthetic construct
  source 1..20: mol_type = other RNA
cacttcctttcatccttggg

SEQ ID NO: 25696 - RNA, 20 nt, synthetic construct
  source 1..20: mol_type = other RNA
tctcacttcctttcatcctt

SEQ ID NO: 25697 - RNA, 20 nt, synthetic construct
  source 1..20: mol_type = other RNA
atctcacttcctttcatcct

SEQ ID NO: 25698 - RNA, 20 nt, synthetic construct
  source 1..20: mol_type = other RNA
atgtctgcaatgtgatatca

SEQ ID NO: 25699 - RNA, 20 nt, synthetic construct
  source 1..20: mol_type = other RNA
gtcatcataacacaaatatg

SEQ ID NO: 25700 - RNA, 20 nt, synthetic construct
  source 1..20: mol_type = other RNA
aattggttggggaggactgg

SEQ ID NO: 25701 - RNA, 20 nt, synthetic construct
  source 1..20: mol_type = other RNA
gtcctccccaaccaatttcc

SEQ ID NO: 25702 - RNA, 20 nt, synthetic construct
  source 1..20: mol_type = other RNA
ggaaattggttggggaggac

SEQ ID NO: 25703 - RNA, 20 nt, synthetic construct
  source 1..20: mol_type = other RNA
tccccaaccaatttccaggc

SEQ ID NO: 25704 - RNA, 20 nt, synthetic construct
  source 1..20: mol_type = other RNA
ccccaaccaatttccaggct

SEQ ID NO: 25705 - RNA, 20 nt, synthetic construct
  source 1..20: mol_type = other RNA
cccaaccaatttccaggctg

SEQ ID NO: 25706 - RNA, 20 nt, synthetic construct
  source 1..20: mol_type = other RNA
agcctggaaattggttgggg

SEQ ID NO: 25707 - RNA, 20 nt, synthetic construct
  source 1..20: mol_type = other RNA
cccagcctggaaattggttg

SEQ ID NO: 25708 - RNA, 20 nt, synthetic construct
  source 1..20: mol_type = other RNA
ccccagcctggaaattggtt

SEQ ID NO: 25709 - RNA, 20 nt, synthetic construct
  source 1..20: mol_type = other RNA
tccccagcctggaaattggt

SEQ ID NO: 25710 - RNA, 20 nt, synthetic construct
  source 1..20: mol_type = other RNA
agtttccccagcctggaaat

SEQ ID NO: 25711 - RNA, 20 nt, synthetic construct
  source 1..20: mol_type = other RNA
gctggggaaactgcagcctc

SEQ ID NO: 25712 - RNA, 20 nt, synthetic construct
  source 1..20: mol_type = other RNA
aggctgcagtttccccagcc

SEQ ID NO: 25713 - RNA, 20 nt, synthetic construct
  source 1..20: mol_type = other RNA
gcctcaggtccatccatcaa

SEQ ID NO: 25714 - RNA, 20 nt, synthetic construct
  source 1..20: mol_type = other RNA
caggtccatccatcaaaggc

SEQ ID NO: 25715 - RNA, 20 nt, synthetic construct
  source 1..20: mol_type = other RNA
aggtccatccatcaaaggcc

SEQ ID NO: 25716 - RNA, 20 nt, synthetic construct
  source 1..20: mol_type = other RNA
gcctttgatggatggacctg

SEQ ID NO: 25717 - RNA, 20 nt, synthetic construct
  source 1..20: mol_type = other RNA
ccatccatcaaaggccgggt

SEQ ID NO: 25718 - RNA, 20 nt, synthetic construct
  source 1..20: mol_type = other RNA
ccaacccggcctttgatgga

SEQ ID NO: 25719 - RNA, 20 nt, synthetic construct
  source 1..20: mol_type = other RNA
aaatccaacccggcctttga

SEQ ID NO: 25720 - RNA, 20 nt, synthetic construct
  source 1..20: mol_type = other RNA
aaggccgggttggatttttc

SEQ ID NO: 25721 - RNA, 20 nt, synthetic construct
  source 1..20: mol_type = other RNA
actgcctgaaaaatccaacc

SEQ ID NO: 25722 - RNA, 20 nt, synthetic construct
  source 1..20: mol_type = other RNA
tactctgttcaatactgtaa

SEQ ID NO: 25723 - RNA, 20 nt, synthetic construct
  source 1..20: mol_type = other RNA
tctgttcaatactgtaatgg

SEQ ID NO: 25724 - RNA, 20 nt, synthetic construct
  source 1..20: mol_type = other RNA
ttggacaaatgtggaatggc

SEQ ID NO: 25725 - RNA, 20 nt, synthetic construct
  source 1..20: mol_type = other RNA
gggtttggacaaatgtggaa

SEQ ID NO: 25726 - RNA, 20 nt, synthetic construct
  source 1..20: mol_type = other RNA
tctatgggtttggacaaatg

SEQ ID NO: 25727 - RNA, 20 nt, synthetic construct
  source 1..20: mol_type = other RNA
tggtgtatgttctatgggtt

SEQ ID NO: 25728 - RNA, 20 nt, synthetic construct
  source 1..20: mol_type = other RNA
atagaacatacaccaccaag

SEQ ID NO: 25729 - RNA, 20 nt, synthetic construct
  source 1..20: mol_type = other RNA
tagaacatacaccaccaaga

SEQ ID NO: 25730 - RNA, 20 nt, synthetic construct
  source 1..20: mol_type = other RNA
cttggtggtgtatgttctat

SEQ ID NO: 25731 - RNA, 20 nt, synthetic construct
  source 1..20: mol_type = other RNA
tcttggtggtgtatgttcta

SEQ ID NO: 25732 - RNA, 20 nt, synthetic construct
  source 1..20: mol_type = other RNA
acatcagtgttccctcttgg

SEQ ID NO: 25733 - RNA, 20 nt, synthetic construct
  source 1..20: mol_type = other RNA
tttacatcagtgttccctct

SEQ ID NO: 25734 - RNA, 20 nt, synthetic construct
  source 1..20: mol_type = other RNA
gggaacactgatgtaaacca

SEQ ID NO: 25735 - RNA, 20 nt, synthetic construct
  source 1..20: mol_type = other RNA
ctgatgtaaaccatggactc

SEQ ID NO: 25736 - RNA, 20 nt, synthetic construct
  source 1..20: mol_type = other RNA
tgatgtaaaccatggactcc

SEQ ID NO: 25737 - RNA, 20 nt, synthetic construct
  source 1..20: mol_type = other RNA
ccatggactccgggtgacag

SEQ ID NO: 25738 - RNA, 20 nt, synthetic construct
  source 1..20: mol_type = other RNA
ccactgtcacccggagtcca

SEQ ID NO: 25739 - RNA, 20 nt, synthetic construct
  source 1..20: mol_type = other RNA
acattgacaccactgtcacc

SEQ ID NO: 25740 - RNA, 20 nt, synthetic construct
  source 1..20: mol_type = other RNA
ctgtaaaaaatctaccactc

SEQ ID NO: 25741 - RNA, 20 nt, synthetic construct
  source 1..20: mol_type = other RNA
taaaaaatctaccactctgg

SEQ ID NO: 25742 - RNA, 20 nt, synthetic construct
  source 1..20: mol_type = other RNA
aaaatctaccactctggtgg

SEQ ID NO: 25743 - RNA, 20 nt, synthetic construct
  source 1..20: mol_type = other RNA
ctggtggaggatgttgataa

SEQ ID NO: 25744 - RNA, 20 nt, synthetic construct
  source 1..20: mol_type = other RNA
tggtggaggatgttgataat

SEQ ID NO: 25745 - RNA, 20 nt, synthetic construct
  source 1..20: mol_type = other RNA
ggtggaggatgttgataatg

SEQ ID NO: 25746 - RNA, 20 nt, synthetic construct
  source 1..20: mol_type = other RNA
gtggaggatgttgataatgg

SEQ ID NO: 25747 - RNA, 20 nt, synthetic construct
  source 1..20: mol_type = other RNA
tgggggaagctatgcctgtt

SEQ ID NO: 25748 - RNA, 20 nt, synthetic construct
  source 1..20: mol_type = other RNA
gggggaagctatgcctgtta

SEQ ID NO: 25749 - RNA, 20 nt, synthetic construct
  source 1..20: mol_type = other RNA
ggggaagctatgcctgttag

SEQ ID NO: 25750 - RNA, 20 nt, synthetic construct
  source 1..20: mol_type = other RNA
gaagctatgcctgttagggg

SEQ ID NO: 25751 - RNA, 20 nt, synthetic construct
  source 1..20: mol_type = other RNA
aagctatgcctgttaggggt

SEQ ID NO: 25752 - RNA, 20 nt, synthetic construct
  source 1..20: mol_type = other RNA
agctatgcctgttaggggtg

SEQ ID NO: 25753 - RNA, 20 nt, synthetic construct
  source 1..20: mol_type = other RNA
gctatgcctgttaggggtgg

SEQ ID NO: 25754 - RNA, 20 nt, synthetic construct
  source 1..20: mol_type = other RNA
ctatgcctgttaggggtggg

SEQ ID NO: 25755 - RNA, 20 nt, synthetic construct
  source 1..20: mol_type = other RNA
tatgcctgttaggggtgggg

SEQ ID NO: 25756 - RNA, 20 nt, synthetic construct
  source 1..20: mol_type = other RNA
atgcctgttaggggtggggg

SEQ ID NO: 25757 - RNA, 20 nt, synthetic construct
  source 1..20: mol_type = other RNA
gcgccccccccacccctaac

SEQ ID NO: 25758 - RNA, 20 nt, synthetic construct
  source 1..20: mol_type = other RNA
tcacagcaaaattgagaaga

SEQ ID NO: 25759 - RNA, 20 nt, synthetic construct
  source 1..20: mol_type = other RNA
aaactgctctataaaaaata

SEQ ID NO: 25760 - RNA, 20 nt, synthetic construct
  source 1..20: mol_type = other RNA
attttttatagagcagtttt

SEQ ID NO: 25761 - RNA, 20 nt, synthetic construct
  source 1..20: mol_type = other RNA
tctttaatttaaaagagaaa

SEQ ID NO: 25762 - RNA, 20 nt, synthetic construct
  source 1..20: mol_type = other RNA
atttaaaagagaaaaggacc

SEQ ID NO: 25763 - RNA, 20 nt, synthetic construct
  source 1..20: mol_type = other RNA
aaaagagaaaaggaccaggc

SEQ ID NO: 25764 - RNA, 20 nt, synthetic construct
  source 1..20: mol_type = other RNA
aaagagaaaaggaccaggct

SEQ ID NO: 25765 - RNA, 20 nt, synthetic construct
  source 1..20: mol_type = other RNA
accaggctgggctctcctga

SEQ ID NO: 25766 - RNA, 20 nt, synthetic construct
  source 1..20: mol_type = other RNA
gccatcaggagagcccagcc

SEQ ID NO: 25767 - RNA, 20 nt, synthetic construct
  source 1..20: mol_type = other RNA
gggctctcctgatggctgtc

SEQ ID NO: 25768 - RNA, 20 nt, synthetic construct
  source 1..20: mol_type = other RNA
gtgtgaacctgacagccatc

SEQ ID NO: 25769 - RNA, 20 nt, synthetic construct
  source 1..20: mol_type = other RNA
gtcaggttcacacatgagtg

SEQ ID NO: 25770 - RNA, 20 nt, synthetic construct
  source 1..20: mol_type = other RNA
cttgagacagtgtgtattca

SEQ ID NO: 25771 - RNA, 20 nt, synthetic construct
  source 1..20: mol_type = other RNA
tgtattcaaggaccgcaccc

SEQ ID NO: 25772 - RNA, 20 nt, synthetic construct
  source 1..20: mol_type = other RNA
ccctggcatcctcaccaaca

SEQ ID NO: 25773 - RNA, 20 nt, synthetic construct
  source 1..20: mol_type = other RNA
ccttgttggtgaggatgcca

SEQ ID NO: 25774 - RNA, 20 nt, synthetic construct
  source 1..20: mol_type = other RNA
tccttgttggtgaggatgcc

SEQ ID NO: 25775 - RNA, 20 nt, synthetic construct
  source 1..20: mol_type = other RNA
gtctgggctccttgttggtg

SEQ ID NO: 25776 - RNA, 20 nt, synthetic construct
  source 1..20: mol_type = other RNA
gttaagtctgggctccttgt

SEQ ID NO: 25777 - RNA, 20 nt, synthetic construct
  source 1..20: mol_type = other RNA
aggatggaggagttaagtct

SEQ ID NO: 25778 - RNA, 20 nt, synthetic construct
  source 1..20: mol_type = other RNA
aaggatggaggagttaagtc

SEQ ID NO: 25779 - RNA, 20 nt, synthetic construct
  source 1..20: mol_type = other RNA
tcagttgattgcaaggatgg

SEQ ID NO: 25780 - RNA, 20 nt, synthetic construct
  source 1..20: mol_type = other RNA
tgctcagttgattgcaagga

SEQ ID NO: 25781 - RNA, 20 nt, synthetic construct
  source 1..20: mol_type = other RNA
caatcaactgagcaacaatg

SEQ ID NO: 25782 - RNA, 20 nt, synthetic construct
  source 1..20: mol_type = other RNA
gagtctcatatagtaacagc

SEQ ID NO: 25783 - RNA, 20 nt, synthetic construct
  source 1..20: mol_type = other RNA
agtctcatatagtaacagct

SEQ ID NO: 25784 - RNA, 20 nt, synthetic construct
  source 1..20: mol_type = other RNA
gtctcatatagtaacagctg

SEQ ID NO: 25785 - RNA, 20 nt, synthetic construct
  source 1..20: mol_type = other RNA
cagctggggcgccagaactg

SEQ ID NO: 25786 - RNA, 20 nt, synthetic construct
  source 1..20: mol_type = other RNA
agctggggcgccagaactgt

SEQ ID NO: 25787 - RNA, 20 nt, synthetic construct
  source 1..20: mol_type = other RNA
agaactgtgggatctagtca

SEQ ID NO: 25788 - RNA, 20 nt, synthetic construct
  source 1..20: mol_type = other RNA
ttgactagatcccacagttc

SEQ ID NO: 25789 - RNA, 20 nt, synthetic construct
  source 1..20: mol_type = other RNA
ggatctagtcaaggtacact

SEQ ID NO: 25790 - RNA, 20 nt, synthetic construct
  source 1..20: mol_type = other RNA
gatctagtcaaggtacacta

SEQ ID NO: 25791 - RNA, 20 nt, synthetic construct
  source 1..20: mol_type = other RNA
cgaacatcttaaccctcact

SEQ ID NO: 25792 - RNA, 20 nt, synthetic construct
  source 1..20: mol_type = other RNA
aggtaactgaggcctagtga

SEQ ID NO: 25793 - RNA, 20 nt, synthetic construct
  source 1..20: mol_type = other RNA
taggtaactgaggcctagtg

SEQ ID NO: 25794 - RNA, 20 nt, synthetic construct
  source 1..20: mol_type = other RNA
ggcctcagttacctaaaaag

SEQ ID NO: 25795 - RNA, 20 nt, synthetic construct
  source 1..20: mol_type = other RNA
gcctcagttacctaaaaaga

SEQ ID NO: 25796 - RNA, 20 nt, synthetic construct
  source 1..20: mol_type = other RNA
tccctctttttaggtaactg

SEQ ID NO: 25797 - RNA, 20 nt, synthetic construct
  source 1..20: mol_type = other RNA
ttttgcagctccctcttttt

SEQ ID NO: 25798 - RNA, 20 nt, synthetic construct
  source 1..20: mol_type = other RNA
ctgcaaaaatagtaataaca

SEQ ID NO: 25799 - RNA, 20 nt, synthetic construct
  source 1..20: mol_type = other RNA
tgcaaaaatagtaataacat

SEQ ID NO: 25800 - RNA, 20 nt, synthetic construct
  source 1..20: mol_type = other RNA
gcaaaaatagtaataacatg

SEQ ID NO: 25801 - RNA, 20 nt, synthetic construct
  source 1..20: mol_type = other RNA
caaaaatagtaataacatgg

SEQ ID NO: 25802 - RNA, 20 nt, synthetic construct
  source 1..20: mol_type = other RNA
aaaaatagtaataacatggg

SEQ ID NO: 25803 - RNA, 20 nt, synthetic construct
  source 1..20: mol_type = other RNA
taataacatggggggttgtg

SEQ ID NO: 25804 - RNA, 20 nt, synthetic construct
  source 1..20: mol_type = other RNA
aataacatggggggttgtgc

SEQ ID NO: 25805 - RNA, 20 nt, synthetic construct
  source 1..20: mol_type = other RNA
gttgtgcgggataatcatta

SEQ ID NO: 25806 - RNA, 20 nt, synthetic construct
  source 1..20: mol_type = other RNA
ccttccagttctaacatttc

SEQ ID NO: 25807 - RNA, 20 nt, synthetic construct
  source 1..20: mol_type = other RNA
tgaaatgttagaactggaag

SEQ ID NO: 25808 - RNA, 20 nt, synthetic construct
  source 1..20: mol_type = other RNA
ctgaaatgttagaactggaa

SEQ ID NO: 25809 - RNA, 20 nt, synthetic construct
  source 1..20: mol_type = other RNA
cctgaaatgttagaactgga

SEQ ID NO: 25810 - RNA, 20 nt, synthetic construct
  source 1..20: mol_type = other RNA
agatcctgaaatgttagaac

SEQ ID NO: 25811 - RNA, 20 nt, synthetic construct
  source 1..20: mol_type = other RNA
ttaaccttctaaccttaaga

SEQ ID NO: 25812 - RNA, 20 nt, synthetic construct
  source 1..20: mol_type = other RNA
ggagccttcttaaggttaga

SEQ ID NO: 25813 - RNA, 20 nt, synthetic construct
  source 1..20: mol_type = other RNA
tggggattggagccttctta

SEQ ID NO: 25814 - RNA, 20 nt, synthetic construct
  source 1..20: mol_type = other RNA
aagggattggagctggggat

SEQ ID NO: 25815 - RNA, 20 nt, synthetic construct
  source 1..20: mol_type = other RNA
cccagctccaatcccttcta

SEQ ID NO: 25816 - RNA, 20 nt, synthetic construct
  source 1..20: mol_type = other RNA
cttagaagggattggagctg

SEQ ID NO: 25817 - RNA, 20 nt, synthetic construct
  source 1..20: mol_type = other RNA
ccttagaagggattggagct

SEQ ID NO: 25818 - RNA, 20 nt, synthetic construct
  source 1..20: mol_type = other RNA
tccaatcccttctaaggccc

SEQ ID NO: 25819 - RNA, 20 nt, synthetic construct
  source 1..20: mol_type = other RNA
aatcccttctaaggcccagg

SEQ ID NO: 25820 - RNA, 20 nt, synthetic construct
  source 1..20: mol_type = other RNA
acctgggccttagaagggat

SEQ ID NO: 25821 - RNA, 20 nt, synthetic construct
  source 1..20: mol_type = other RNA
aatccacctgggccttagaa

SEQ ID NO: 25822 - RNA, 20 nt, synthetic construct
  source 1..20: mol_type = other RNA
aaatccacctgggccttaga

SEQ ID NO: 25823 - RNA, 20 nt, synthetic construct
  source 1..20: mol_type = other RNA
tgggttagggaaatccacct

SEQ ID NO: 25824 - RNA, 20 nt, synthetic construct
  source 1..20: mol_type = other RNA
atgggttagggaaatccacc

SEQ ID NO: 25825 - RNA, 20 nt, synthetic construct
  source 1..20: mol_type = other RNA
atgggaggactgatgggtta

SEQ ID NO: 25826 - RNA, 20 nt, synthetic construct
  source 1..20: mol_type = other RNA
tatgggaggactgatgggtt

SEQ ID NO: 25827 - RNA, 20 nt, synthetic construct
  source 1..20: mol_type = other RNA
gctcttatgggaggactgat

SEQ ID NO: 25828 - RNA, 20 nt, synthetic construct
  source 1..20: mol_type = other RNA
agctcttatgggaggactga

SEQ ID NO: 25829 - RNA, 20 nt, synthetic construct
  source 1..20: mol_type = other RNA
cctcccataagagctttcat

SEQ ID NO: 25830 - RNA, 20 nt, synthetic construct
  source 1..20: mol_type = other RNA
cctatgaaagctcttatggg

SEQ ID NO: 25831 - RNA, 20 nt, synthetic construct
  source 1..20: mol_type = other RNA
gcacctatgaaagctcttat

SEQ ID NO: 25832 - RNA, 20 nt, synthetic construct
  source 1..20: mol_type = other RNA
agcacctatgaaagctctta

SEQ ID NO: 25833 - RNA, 20 nt, synthetic construct
  source 1..20: mol_type = other RNA
taggtgctatcccctccccg

SEQ ID NO: 25834 - RNA, 20 nt, synthetic construct
  source 1..20: mol_type = other RNA
aggtgctatcccctccccga

SEQ ID NO: 25835 - RNA, 20 nt, synthetic construct
  source 1..20: mol_type = other RNA
ctctgactgccctcggggag

SEQ ID NO: 25836 - RNA, 20 nt, synthetic construct
  source 1..20: mol_type = other RNA
tctctgactgccctcgggga

SEQ ID NO: 25837 - RNA, 20 nt, synthetic construct
  source 1..20: mol_type = other RNA
gtctctgactgccctcgggg

SEQ ID NO: 25838 - RNA, 20 nt, synthetic construct
  source 1..20: mol_type = other RNA
agggtctctgactgccctcg

SEQ ID NO: 25839 - RNA, 20 nt, synthetic construct
  source 1..20: mol_type = other RNA
gagggtctctgactgccctc

SEQ ID NO: 25840 - RNA, 20 nt, synthetic construct
  source 1..20: mol_type = other RNA
tgagggtctctgactgccct

SEQ ID NO: 25841 - RNA, 20 nt, synthetic construct
  source 1..20: mol_type = other RNA
gggctgcggatgtcagctga

SEQ ID NO: 25842 - RNA, 20 nt, synthetic construct
  source 1..20: mol_type = other RNA
agggctgcggatgtcagctg

SEQ ID NO: 25843 - RNA, 20 nt, synthetic construct
  source 1..20: mol_type = other RNA
gacatccgcagccctgtgcc

SEQ ID NO: 25844 - RNA, 20 nt, synthetic construct
  source 1..20: mol_type = other RNA
gaggacctggcacagggctg

SEQ ID NO: 25845 - RNA, 20 nt, synthetic construct
  source 1..20: mol_type = other RNA
ggaggggaggacctggcaca

SEQ ID NO: 25846 - RNA, 20 nt, synthetic construct
  source 1..20: mol_type = other RNA
aggaggggaggacctggcac

SEQ ID NO: 25847 - RNA, 20 nt, synthetic construct
  source 1..20: mol_type = other RNA
ttaggcaggaggggaggacc

SEQ ID NO: 25848 - RNA, 20 nt, synthetic construct
  source 1..20: mol_type = other RNA
cctcctgcctaacttgtacc

SEQ ID NO: 25849 - RNA, 20 nt, synthetic construct
  source 1..20: mol_type = other RNA
tggtacaagttaggcaggag

SEQ ID NO: 25850 - RNA, 20 nt, synthetic construct
  source 1..20: mol_type = other RNA
ctggtacaagttaggcagga

SEQ ID NO: 25851 - RNA, 20 nt, synthetic construct
  source 1..20: mol_type = other RNA
cctggtacaagttaggcagg

SEQ ID NO: 25852 - RNA, 20 nt, synthetic construct
  source 1..20: mol_type = other RNA
gcctaacttgtaccaggctc

SEQ ID NO: 25853 - RNA, 20 nt, synthetic construct
  source 1..20: mol_type = other RNA
gagcctggtacaagttaggc

SEQ ID NO: 25854 - RNA, 20 nt, synthetic construct
  source 1..20: mol_type = other RNA
gccagagcctggtacaagtt

SEQ ID NO: 25855 - RNA, 20 nt, synthetic construct
  source 1..20: mol_type = other RNA
gatcaggcttggccagagcc

SEQ ID NO: 25856 - RNA, 20 nt, synthetic construct
  source 1..20: mol_type = other RNA
tgaggaacacagatcaggct

SEQ ID NO: 25857 - RNA, 20 nt, synthetic construct
  source 1..20: mol_type = other RNA
ctgatctgtgttcctcaaca

SEQ ID NO: 25858 - RNA, 20 nt, synthetic construct
  source 1..20: mol_type = other RNA
catgttgaggaacacagatc

SEQ ID NO: 25859 - RNA, 20 nt, synthetic construct
  source 1..20: mol_type = other RNA
ggaagatgtgtgccatgttg

SEQ ID NO: 25860 - RNA, 20 nt, synthetic construct
  source 1..20: mol_type = other RNA
gaggggaggatgaaggacat

SEQ ID NO: 25861 - RNA, 20 nt, synthetic construct
  source 1..20: mol_type = other RNA
ggaggggaggatgaaggaca

SEQ ID NO: 25862 - RNA, 20 nt, synthetic construct
  source 1..20: mol_type = other RNA
gactcgggaggggaggatga

SEQ ID NO: 25863 - RNA, 20 nt, synthetic construct
  source 1..20: mol_type = other RNA
tgtgggtgactcgggagggg

SEQ ID NO: 25864 - RNA, 20 nt, synthetic construct
  source 1..20: mol_type = other RNA
tcccgagtcacccacaaaga

SEQ ID NO: 25865 - RNA, 20 nt, synthetic construct
  source 1..20: mol_type = other RNA
ctttgtgggtgactcgggag

SEQ ID NO: 25866 - RNA, 20 nt, synthetic construct
  source 1..20: mol_type = other RNA
tctttgtgggtgactcggga

SEQ ID NO: 25867 - RNA, 20 nt, synthetic construct
  source 1..20: mol_type = other RNA
ttctttgtgggtgactcggg

SEQ ID NO: 25868 - RNA, 20 nt, synthetic construct
  source 1..20: mol_type = other RNA
gccttctttgtgggtgactc

SEQ ID NO: 25869 - RNA, 20 nt, synthetic construct
  source 1..20: mol_type = other RNA
ggccttctttgtgggtgact

SEQ ID NO: 25870 - RNA, 20 nt, synthetic construct
  source 1..20: mol_type = other RNA
gacagtggggccttctttgt

SEQ ID NO: 25871 - RNA, 20 nt, synthetic construct
  source 1..20: mol_type = other RNA
agacagtggggccttctttg

SEQ ID NO: 25872 - RNA, 20 nt, synthetic construct
  source 1..20: mol_type = other RNA
ctgtctccactcagcctccg

SEQ ID NO: 25873 - RNA, 20 nt, synthetic construct
  source 1..20: mol_type = other RNA
ggaggctgagtggagacagt

SEQ ID NO: 25874 - RNA, 20 nt, synthetic construct
  source 1..20: mol_type = other RNA
cggaggctgagtggagacag

SEQ ID NO: 25875 - RNA, 20 nt, synthetic construct
  source 1..20: mol_type = other RNA
tctgggcctcggaggctgag

SEQ ID NO: 25876 - RNA, 20 nt, synthetic construct
  source 1..20: mol_type = other RNA
gtgtgtaatctgggcctcgg

SEQ ID NO: 25877 - RNA, 20 nt, synthetic construct
  source 1..20: mol_type = other RNA
gtggtgtgtaatctgggcct

SEQ ID NO: 25878 - RNA, 20 nt, synthetic construct
  source 1..20: mol_type = other RNA
tagcgggtggtgtgtaatct

SEQ ID NO: 25879 - RNA, 20 nt, synthetic construct
  source 1..20: mol_type = other RNA
ttagcgggtggtgtgtaatc

SEQ ID NO: 25880 - RNA, 20 nt, synthetic construct
  source 1..20: mol_type = other RNA
tggctcaggtgtttagcggg

SEQ ID NO: 25881 - RNA, 20 nt, synthetic construct
  source 1..20: mol_type = other RNA
ttctggctcaggtgtttagc

SEQ ID NO: 25882 - RNA, 20 nt, synthetic construct
  source 1..20: mol_type = other RNA
attctggctcaggtgtttag

SEQ ID NO: 25883 - RNA, 20 nt, synthetic construct
  source 1..20: mol_type = other RNA
tgcagtgtgaattctggctc

SEQ ID NO: 25884 - RNA, 20 nt, synthetic construct
  source 1..20: mol_type = other RNA
cagaattcacactgcaaaag

SEQ ID NO: 25885 - RNA, 20 nt, synthetic construct
  source 1..20: mol_type = other RNA
ctcttttgcagtgtgaattc

SEQ ID NO: 25886 - RNA, 20 nt, synthetic construct
  source 1..20: mol_type = other RNA
ttcacactgcaaaagaggac

SEQ ID NO: 25887 - RNA, 20 nt, synthetic construct
  source 1..20: mol_type = other RNA
tggagagcacctaactaagc

SEQ ID NO: 25888 - RNA, 20 nt, synthetic construct
  source 1..20: mol_type = other RNA
cacctaactaagctggagag

SEQ ID NO: 25889 - RNA, 20 nt, synthetic construct
  source 1..20: mol_type = other RNA
acctaactaagctggagaga

SEQ ID NO: 25890 - RNA, 20 nt, synthetic construct
  source 1..20: mol_type = other RNA
accctctctccagcttagtt

SEQ ID NO: 25891 - RNA, 20 nt, synthetic construct
  source 1..20: mol_type = other RNA
agagagggtgacagttcgtt

SEQ ID NO: 25892 - RNA, 20 nt, synthetic construct
  source 1..20: mol_type = other RNA
gttaggcgctaccgtatgcc

SEQ ID NO: 25893 - RNA, 20 nt, synthetic construct
  source 1..20: mol_type = other RNA
cgctaccgtatgccaggtgc

SEQ ID NO: 25894 - RNA, 20 nt, synthetic construct
  source 1..20: mol_type = other RNA
gctaccgtatgccaggtgct

SEQ ID NO: 25895 - RNA, 20 nt, synthetic construct
  source 1..20: mol_type = other RNA
gcggcccagcacctggcata

SEQ ID NO: 25896 - RNA, 20 nt, synthetic construct
  source 1..20: mol_type = other RNA
tcatgatgcggcccagcacc

SEQ ID NO: 25897 - RNA, 20 nt, synthetic construct
  source 1..20: mol_type = other RNA
aggtcatgtgcgtcatgatg

SEQ ID NO: 25898 - RNA, 20 nt, synthetic construct
  source 1..20: mol_type = other RNA
tgtgtggcaagaagaaaatg

SEQ ID NO: 25899 - RNA, 20 nt, synthetic construct
  source 1..20: mol_type = other RNA
ttcttcttgccacacagata

SEQ ID NO: 25900 - RNA, 20 nt, synthetic construct
  source 1..20: mol_type = other RNA
tgataatttccatatctgtg

SEQ ID NO: 25901 - RNA, 20 nt, synthetic construct
  source 1..20: mol_type = other RNA
atcatccacactttccagca

SEQ ID NO: 25902 - RNA, 20 nt, synthetic construct
  source 1..20: mol_type = other RNA
ggtttccttgctggaaagtg

SEQ ID NO: 25903 - RNA, 20 nt, synthetic construct
  source 1..20: mol_type = other RNA
gcgtcgactggtttccttgc

SEQ ID NO: 25904 - RNA, 20 nt, synthetic construct
  source 1..20: mol_type = other RNA
aaccagtcgacgcagctaca

SEQ ID NO: 25905 - RNA, 20 nt, synthetic construct
  source 1..20: mol_type = other RNA
tcgacgcagctacatggatg

SEQ ID NO: 25906 - RNA, 20 nt, synthetic construct
  source 1..20: mol_type = other RNA
atccatgtagctgcgtcgac

SEQ ID NO: 25907 - RNA, 20 nt, synthetic construct
  source 1..20: mol_type = other RNA
tttgcctgagaatacacagc

SEQ ID NO: 25908 - RNA, 20 nt, synthetic construct
  source 1..20: mol_type = other RNA
gagaatacacagctggttag

SEQ ID NO: 25909 - RNA, 20 nt, synthetic construct
  source 1..20: mol_type = other RNA
ctaaccagctgtgtattctc

SEQ ID NO: 25910 - RNA, 20 nt, synthetic construct
  source 1..20: mol_type = other RNA
tgttggaatctgacagattg

SEQ ID NO: 25911 - RNA, 20 nt, synthetic construct
  source 1..20: mol_type = other RNA
agtggaaagggcactgatgt

SEQ ID NO: 25912 - RNA, 20 nt, synthetic construct
  source 1..20: mol_type = other RNA
ttccactgctctacactgcc

SEQ ID NO: 25913 - RNA, 20 nt, synthetic construct
  source 1..20: mol_type = other RNA
gcagtgtagagcagtggaaa

SEQ ID NO: 25914 - RNA, 20 nt, synthetic construct
  source 1..20: mol_type = other RNA
ggcagtgtagagcagtggaa

SEQ ID NO: 25915 - RNA, 20 nt, synthetic construct
  source 1..20: mol_type = other RNA
ctgctctacactgcctggag

SEQ ID NO: 25916 - RNA, 20 nt, synthetic construct
  source 1..20: mol_type = other RNA
ctccaggcagtgtagagcag

SEQ ID NO: 25917 - RNA, 20 nt, synthetic construct
  source 1..20: mol_type = other RNA
ctctacactgcctggagagg

SEQ ID NO: 25918 - RNA, 20 nt, synthetic construct
  source 1..20: mol_type = other RNA
acactgcctggagaggcggc

SEQ ID NO: 25919 - RNA, 20 nt, synthetic construct
  source 1..20: mol_type = other RNA
cttcagcctgccgcctctcc

SEQ ID NO: 25920 - RNA, 20 nt, synthetic construct
  source 1..20: mol_type = other RNA
ggcggcaggctgaagctcag

SEQ ID NO: 25921 - RNA, 20 nt, synthetic construct
  source 1..20: mol_type = other RNA
ggcaggctgaagctcagagg

SEQ ID NO: 25922 - RNA, 20 nt, synthetic construct
  source 1..20: mol_type = other RNA
gcaggctgaagctcagaggt

SEQ ID NO: 25923 - RNA, 20 nt, synthetic construct
  source 1..20: mol_type = other RNA
ggagaactggaaagtaggtc

SEQ ID NO: 25924 - RNA, 20 nt, synthetic construct
  source 1..20: mol_type = other RNA
gttctggagaactggaaagt

SEQ ID NO: 25925 - RNA, 20 nt, synthetic construct
  source 1..20: mol_type = other RNA
tggggcacgttctggagaac

SEQ ID NO: 25926 - RNA, 20 nt, synthetic construct
  source 1..20: mol_type = other RNA
taggaacttggggcacgttc

SEQ ID NO: 25927 - RNA, 20 nt, synthetic construct
  source 1..20: mol_type = other RNA
aggcaggggctaggaacttg

SEQ ID NO: 25928 - RNA, 20 nt, synthetic construct
  source 1..20: mol_type = other RNA
aaggcaggggctaggaactt

SEQ ID NO: 25929 - RNA, 20 nt, synthetic construct
  source 1..20: mol_type = other RNA
aaaggcaggggctaggaact

SEQ ID NO: 25930 - RNA, 20 nt, synthetic construct
  source 1..20: mol_type = other RNA
gacatataaaggcaggggct

SEQ ID NO: 25931 - RNA, 20 nt, synthetic construct
  source 1..20: mol_type = other RNA
ctagagacatataaaggcag

SEQ ID NO: 25932 - RNA, 20 nt, synthetic construct
  source 1..20: mol_type = other RNA
gctagagacatataaaggca

SEQ ID NO: 25933 - RNA, 20 nt, synthetic construct
  source 1..20: mol_type = other RNA
agctagagacatataaaggc

SEQ ID NO: 25934 - RNA, 20 nt, synthetic construct
  source 1..20: mol_type = other RNA
ataaagctagagacatataa

SEQ ID NO: 25935 - RNA, 20 nt, synthetic construct
  source 1..20: mol_type = other RNA
ctctagctttatatgcaacc

SEQ ID NO: 25936 - RNA, 20 nt, synthetic construct
  source 1..20: mol_type = other RNA
tagctttatatgcaaccagg

SEQ ID NO: 25937 - RNA, 20 nt, synthetic construct
  source 1..20: mol_type = other RNA
atgtggggcagattgccacc

SEQ ID NO: 25938 - RNA, 20 nt, synthetic construct
  source 1..20: mol_type = other RNA
ccacatcacctgcagtcaac

SEQ ID NO: 25939 - RNA, 20 nt, synthetic construct
  source 1..20: mol_type = other RNA
cacatcacctgcagtcaaca

SEQ ID NO: 25940 - RNA, 20 nt, synthetic construct
  source 1..20: mol_type = other RNA
tgttgactgcaggtgatgtg

SEQ ID NO: 25941 - RNA, 20 nt, synthetic construct
  source 1..20: mol_type = other RNA
ctgttgactgcaggtgatgt

SEQ ID NO: 25942 - RNA, 20 nt, synthetic construct
  source 1..20: mol_type = other RNA
cctgttgactgcaggtgatg

SEQ ID NO: 25943 - RNA, 20 nt, synthetic construct
  source 1..20: mol_type = other RNA
ttctaaaccctgttgactgc

SEQ ID NO: 25944 - RNA, 20 nt, synthetic construct
  source 1..20: mol_type = other RNA
tcaacagggtttagaatctc

SEQ ID NO: 25945 - RNA, 20 nt, synthetic construct
  source 1..20: mol_type = other RNA
cagggtttagaatctcaggc

SEQ ID NO: 25946 - RNA, 20 nt, synthetic construct
  source 1..20: mol_type = other RNA
gtttagaatctcaggctgga

SEQ ID NO: 25947 - RNA, 20 nt, synthetic construct
  source 1..20: mol_type = other RNA
tttagaatctcaggctggaa

SEQ ID NO: 25948 - RNA, 20 nt, synthetic construct
  source 1..20: mol_type = other RNA
caggctggaagggagctcag

SEQ ID NO: 25949 - RNA, 20 nt, synthetic construct
  source 1..20: mol_type = other RNA
aggactgggtaagcacagga

SEQ ID NO: 25950 - RNA, 20 nt, synthetic construct
  source 1..20: mol_type = other RNA
tgtgcttacccagtcctctg

SEQ ID NO: 25951 - RNA, 20 nt, synthetic construct
  source 1..20: mol_type = other RNA
tcagaggactgggtaagcac

SEQ ID NO: 25952 - RNA, 20 nt, synthetic construct
  source 1..20: mol_type = other RNA
cccagtcctctgaggagccc

SEQ ID NO: 25953 - RNA, 20 nt, synthetic construct
  source 1..20: mol_type = other RNA
ccagtcctctgaggagccca

SEQ ID NO: 25954 - RNA, 20 nt, synthetic construct
  source 1..20: mol_type = other RNA
cctgggctcctcagaggact

SEQ ID NO: 25955 - RNA, 20 nt, synthetic construct
  source 1..20: mol_type = other RNA
ccctgggctcctcagaggac

SEQ ID NO: 25956 - RNA, 20 nt, synthetic construct
  source 1..20: mol_type = other RNA
ggagtccctgggctcctcag

SEQ ID NO: 25957 - RNA, 20 nt, synthetic construct
  source 1..20: mol_type = other RNA
aggagcccagggactccagc

SEQ ID NO: 25958 - RNA, 20 nt, synthetic construct
  source 1..20: mol_type = other RNA
gttggccagctggagtccct

SEQ ID NO: 25959 - RNA, 20 nt, synthetic construct
  source 1..20: mol_type = other RNA
agttggccagctggagtccc

SEQ ID NO: 25960 - RNA, 20 nt, synthetic construct
  source 1..20: mol_type = other RNA
gattgctaaagttggccagc

SEQ ID NO: 25961 - RNA, 20 nt, synthetic construct
  source 1..20: mol_type = other RNA
gagatctggattgctaaagt

SEQ ID NO: 25962 - RNA, 20 nt, synthetic construct
  source 1..20: mol_type = other RNA
gggaggaagttggtgagatc

SEQ ID NO: 25963 - RNA, 20 nt, synthetic construct
  source 1..20: mol_type = other RNA
ttcctccccaaaacaattcc

SEQ ID NO: 25964 - RNA, 20 nt, synthetic construct
  source 1..20: mol_type = other RNA
tcctccccaaaacaattcct

SEQ ID NO: 25965 - RNA, 20 nt, synthetic construct
  source 1..20: mol_type = other RNA
cctccccaaaacaattcctg

SEQ ID NO: 25966 - RNA, 20 nt, synthetic construct
  source 1..20: mol_type = other RNA
ccccaggaattgttttgggg

SEQ ID NO: 25967 - RNA, 20 nt, synthetic construct
  source 1..20: mol_type = other RNA
ctgccccaggaattgttttg

SEQ ID NO: 25968 - RNA, 20 nt, synthetic construct
  source 1..20: mol_type = other RNA
gctgccccaggaattgtttt

SEQ ID NO: 25969 - RNA, 20 nt, synthetic construct
  source 1..20: mol_type = other RNA
ggctgccccaggaattgttt

SEQ ID NO: 25970 - RNA, 20 nt, synthetic construct
  source 1..20: mol_type = other RNA
attcctggggcagccagcac

SEQ ID NO: 25971 - RNA, 20 nt, synthetic construct
  source 1..20: mol_type = other RNA
tagccagtgctggctgcccc

SEQ ID NO: 25972 - RNA, 20 nt, synthetic construct
  source 1..20: mol_type = other RNA
agccagcactggctacagtt

SEQ ID NO: 25973 - RNA, 20 nt, synthetic construct
  source 1..20: mol_type = other RNA
agcctaactgtagccagtgc

SEQ ID NO: 25974 - RNA, 20 nt, synthetic construct
  source 1..20: mol_type = other RNA
gctcccagttctgtttccac

SEQ ID NO: 25975 - RNA, 20 nt, synthetic construct
  source 1..20: mol_type = other RNA
gggccagtggaaacagaact

SEQ ID NO: 25976 - RNA, 20 nt, synthetic construct
  source 1..20: mol_type = other RNA
agggccagtggaaacagaac

SEQ ID NO: 25977 - RNA, 20 nt, synthetic construct
  source 1..20: mol_type = other RNA
tggcccttctctcccctctg

SEQ ID NO: 25978 - RNA, 20 nt, synthetic construct
  source 1..20: mol_type = other RNA
agaggggagagaagggccag

SEQ ID NO: 25979 - RNA, 20 nt, synthetic construct
  source 1..20: mol_type = other RNA
ctctcccctctgtggtcccc

SEQ ID NO: 25980 - RNA, 20 nt, synthetic construct
  source 1..20: mol_type = other RNA
gggaccacagaggggagaga

SEQ ID NO: 25981 - RNA, 20 nt, synthetic construct
  source 1..20: mol_type = other RNA
ctctgtggtcccctggaata

SEQ ID NO: 25982 - RNA, 20 nt, synthetic construct
  source 1..20: mol_type = other RNA
tattccaggggaccacagag

SEQ ID NO: 25983 - RNA, 20 nt, synthetic construct
  source 1..20: mol_type = other RNA
ttattccaggggaccacaga

SEQ ID NO: 25984 - RNA, 20 nt, synthetic construct
  source 1..20: mol_type = other RNA
cttattccaggggaccacag

SEQ ID NO: 25985 - RNA, 20 nt, synthetic construct
  source 1..20: mol_type = other RNA
catcttgttccttattccag

SEQ ID NO: 25986 - RNA, 20 nt, synthetic construct
  source 1..20: mol_type = other RNA
gcatcttgttccttattcca

SEQ ID NO: 25987 - RNA, 20 nt, synthetic construct
  source 1..20: mol_type = other RNA
ggcatcttgttccttattcc

SEQ ID NO: 25988 - RNA, 20 nt, synthetic construct
  source 1..20: mol_type = other RNA
ctggctgtcatgctgaagat

SEQ ID NO: 25989 - RNA, 20 nt, synthetic construct
  source 1..20: mol_type = other RNA
gctggctgtcatgctgaaga

SEQ ID NO: 25990 - RNA, 20 nt, synthetic construct
  source 1..20: mol_type = other RNA
cagcatgacagccagccctg

SEQ ID NO: 25991 - RNA, 20 nt, synthetic construct
  source 1..20: mol_type = other RNA
cagccagccctgaggacatt

SEQ ID NO: 25992 - RNA, 20 nt, synthetic construct
  source 1..20: mol_type = other RNA
gttccaaatgtcctcagggc

SEQ ID NO: 25993 - RNA, 20 nt, synthetic construct
  source 1..20: mol_type = other RNA
gcaggttccaaatgtcctca

SEQ ID NO: 25994 - RNA, 20 nt, synthetic construct
  source 1..20: mol_type = other RNA
tgcaggttccaaatgtcctc

SEQ ID NO: 25995 - RNA, 20 nt, synthetic construct
  source 1..20: mol_type = other RNA
aacagtatagagaaggctgc

SEQ ID NO: 25996 - RNA, 20 nt, synthetic construct
  source 1..20: mol_type = other RNA
ttctctatactgttccacat

SEQ ID NO: 25997 - RNA, 20 nt, synthetic construct
  source 1..20: mol_type = other RNA
tctctatactgttccacata

SEQ ID NO: 25998 - RNA, 20 nt, synthetic construct
  source 1..20: mol_type = other RNA
tatgtggaacagtatagaga

SEQ ID NO: 25999 - RNA, 20 nt, synthetic construct
  source 1..20: mol_type = other RNA
gagggggggcagtccctatg

SEQ ID NO: 26000 - RNA, 20 nt, synthetic construct
  source 1..20: mol_type = other RNA
ttggtgggggactggagggg

SEQ ID NO: 26001 - RNA, 20 nt, synthetic construct
  source 1..20: mol_type = other RNA
gttggtgggggactggaggg

SEQ ID NO: 26002 - RNA, 20 nt, synthetic construct
  source 1..20: mol_type = other RNA
ggttggtgggggactggagg

SEQ ID NO: 26003 - RNA, 20 nt, synthetic construct
  source 1..20: mol_type = other RNA
gggttggtgggggactggag

SEQ ID NO: 26004 - RNA, 20 nt, synthetic construct
  source 1..20: mol_type = other RNA
agggttggtgggggactgga

SEQ ID NO: 26005 - RNA, 20 nt, synthetic construct
  source 1..20: mol_type = other RNA
gagggttggtgggggactgg

SEQ ID NO: 26006 - RNA, 20 nt, synthetic construct
  source 1..20: mol_type = other RNA
gtagagggttggtgggggac

SEQ ID NO: 26007 - RNA, 20 nt, synthetic construct
  source 1..20: mol_type = other RNA
gtggggtagagggttggtgg

SEQ ID NO: 26008 - RNA, 20 nt, synthetic construct
  source 1..20: mol_type = other RNA
tgtggggtagagggttggtg

SEQ ID NO: 26009 - RNA, 20 nt, synthetic construct
  source 1..20: mol_type = other RNA
gtgtggggtagagggttggt

SEQ ID NO: 26010 - RNA, 20 nt, synthetic construct
  source 1..20: mol_type = other RNA
agtgtggggtagagggttgg

SEQ ID NO: 26011 - RNA, 20 nt, synthetic construct
  source 1..20: mol_type = other RNA
gatagtgtggggtagagggt

SEQ ID NO: 26012 - RNA, 20 nt, synthetic construct
  source 1..20: mol_type = other RNA
taccccacactatctctagt

SEQ ID NO: 26013 - RNA, 20 nt, synthetic construct
  source 1..20: mol_type = other RNA
ctagagatagtgtggggtag

SEQ ID NO: 26014 - RNA, 20 nt, synthetic construct
  source 1..20: mol_type = other RNA
aaccaactagagatagtgtg

SEQ ID NO: 26015 - RNA, 20 nt, synthetic construct
  source 1..20: mol_type = other RNA
gaaccaactagagatagtgt

SEQ ID NO: 26016 - RNA, 20 nt, synthetic construct
  source 1..20: mol_type = other RNA
agaaccaactagagatagtg

SEQ ID NO: 26017 - RNA, 20 nt, synthetic construct
  source 1..20: mol_type = other RNA
tctctagttggttctagcac

SEQ ID NO: 26018 - RNA, 20 nt, synthetic construct
  source 1..20: mol_type = other RNA
agcactggacccaacattcc

SEQ ID NO: 26019 - RNA, 20 nt, synthetic construct
  source 1..20: mol_type = other RNA
tggacccaacattccaggca

SEQ ID NO: 26020 - RNA, 20 nt, synthetic construct
  source 1..20: mol_type = other RNA
caaaccatgcctggaatgtt

SEQ ID NO: 26021 - RNA, 20 nt, synthetic construct
  source 1..20: mol_type = other RNA
gcaaaccatgcctggaatgt

SEQ ID NO: 26022 - RNA, 20 nt, synthetic construct
  source 1..20: mol_type = other RNA
ttggtcaggcaaaccatgcc

SEQ ID NO: 26023 - RNA, 20 nt, synthetic construct
  source 1..20: mol_type = other RNA
tggtttgcctgaccaaatgc

SEQ ID NO: 26024 - RNA, 20 nt, synthetic construct
  source 1..20: mol_type = other RNA
gtgaaagcctgcatttggtc

SEQ ID NO: 26025 - RNA, 20 nt, synthetic construct
  source 1..20: mol_type = other RNA
tggaggtgaaagcctgcatt

SEQ ID NO: 26026 - RNA, 20 nt, synthetic construct
  source 1..20: mol_type = other RNA
gctttcacctccaccctttt

SEQ ID NO: 26027 - RNA, 20 nt, synthetic construct
  source 1..20: mol_type = other RNA
tatactacctaaaagggtgg

SEQ ID NO: 26028 - RNA, 20 nt, synthetic construct
  source 1..20: mol_type = other RNA
gaatatactacctaaaaggg

SEQ ID NO: 26029 - RNA, 20 nt, synthetic construct
  source 1..20: mol_type = other RNA
taggaatatactacctaaaa

SEQ ID NO: 26030 - RNA, 20 nt, synthetic construct
  source 1..20: mol_type = other RNA
taggtagtatattcctattg

SEQ ID NO: 26031 - RNA, 20 nt, synthetic construct
  source 1..20: mol_type = other RNA
aggtagtatattcctattga

SEQ ID NO: 26032 - RNA, 20 nt, synthetic construct
  source 1..20: mol_type = other RNA
atattcctattgagggagcc

SEQ ID NO: 26033 - RNA, 20 nt, synthetic construct
  source 1..20: mol_type = other RNA
tattcctattgagggagcct

SEQ ID NO: 26034 - RNA, 20 nt, synthetic construct
  source 1..20: mol_type = other RNA
tatacccaggctccctcaat

SEQ ID NO: 26035 - RNA, 20 nt, synthetic construct
  source 1..20: mol_type = other RNA
agaaaagcaaatgtataccc

SEQ ID NO: 26036 - RNA, 20 nt, synthetic construct
  source 1..20: mol_type = other RNA
gagaaaggacattcttcagt

SEQ ID NO: 26037 - RNA, 20 nt, synthetic construct
  source 1..20: mol_type = other RNA
caggttgttgtcattgagaa

SEQ ID NO: 26038 - RNA, 20 nt, synthetic construct
  source 1..20: mol_type = other RNA
aacctgcatgtatgcctaac

SEQ ID NO: 26039 - RNA, 20 nt, synthetic construct
  source 1..20: mol_type = other RNA
caccagttaggcatacatgc

SEQ ID NO: 26040 - RNA, 20 nt, synthetic construct
  source 1..20: mol_type = other RNA
gaactttgttctcaccagtt

SEQ ID NO: 26041 - RNA, 20 nt, synthetic construct
  source 1..20: mol_type = other RNA
catgtagaaacgtgtgcttg

SEQ ID NO: 26042 - RNA, 20 nt, synthetic construct
  source 1..20: mol_type = other RNA
atgtagaaacgtgtgcttga

SEQ ID NO: 26043 - RNA, 20 nt, synthetic construct
  source 1..20: mol_type = other RNA
agaaacgtgtgcttgagggc

SEQ ID NO: 26044 - RNA, 20 nt, synthetic construct
  source 1..20: mol_type = other RNA
gaaacgtgtgcttgagggct

SEQ ID NO: 26045 - RNA, 20 nt, synthetic construct
  source 1..20: mol_type = other RNA
gtgtgcttgagggctgggtg

SEQ ID NO: 26046 - RNA, 20 nt, synthetic construct
  source 1..20: mol_type = other RNA
tgcttgagggctgggtgcgg

SEQ ID NO: 26047 - RNA, 20 nt, synthetic construct
  source 1..20: mol_type = other RNA
tgcctgtaattccagcactt

SEQ ID NO: 26048 - RNA, 20 nt, synthetic construct
  source 1..20: mol_type = other RNA
gcctgtaattccagcacttt

SEQ ID NO: 26049 - RNA, 20 nt, synthetic construct
  source 1..20: mol_type = other RNA
tgtaattccagcactttggg

SEQ ID NO: 26050 - RNA, 20 nt, synthetic construct
  source 1..20: mol_type = other RNA
tcccaaagtgctggaattac

SEQ ID NO: 26051 - RNA, 20 nt, synthetic construct
  source 1..20: mol_type = other RNA
tccagcactttgggaggccg

SEQ ID NO: 26052 - RNA, 20 nt, synthetic construct
  source 1..20: mol_type = other RNA
agcactttgggaggccgagg

SEQ ID NO: 26053 - RNA, 20 nt, synthetic construct
  source 1..20: mol_type = other RNA
gcactttgggaggccgaggt

SEQ ID NO: 26054 - RNA, 20 nt, synthetic construct
  source 1..20: mol_type = other RNA
acctcggcctcccaaagtgc

SEQ ID NO: 26055 - RNA, 20 nt, synthetic construct
  source 1..20: mol_type = other RNA
ctttgggaggccgaggtggg

SEQ ID NO: 26056 - RNA, 20 nt, synthetic construct
  source 1..20: mol_type = other RNA
cgaggtgggcggatcacctg

SEQ ID NO: 26057 - RNA, 20 nt, synthetic construct
  source 1..20: mol_type = other RNA
ctcaggtgatccgcccacct

SEQ ID NO: 26058 - RNA, 20 nt, synthetic construct
  source 1..20: mol_type = other RNA
tgggcggatcacctgaggtc

SEQ ID NO: 26059 - RNA, 20 nt, synthetic construct
  source 1..20: mol_type = other RNA
gatctcgaactcctgacctc

SEQ ID NO: 26060 - RNA, 20 nt, synthetic construct
  source 1..20: mol_type = other RNA
tcaggagttcgagatcagcc

SEQ ID NO: 26061 - RNA, 20 nt, synthetic construct
  source 1..20: mol_type = other RNA
cgagatcagcctggccaaca

SEQ ID NO: 26062 - RNA, 20 nt, synthetic construct
  source 1..20: mol_type = other RNA
tgggttttgccatgttggcc

SEQ ID NO: 26063 - RNA, 20 nt, synthetic construct
  source 1..20: mol_type = other RNA
gagactgggttttgccatgt

SEQ ID NO: 26064 - RNA, 20 nt, synthetic construct
  source 1..20: mol_type = other RNA
ttgtatttttagtagagact

SEQ ID NO: 26065 - RNA, 20 nt, synthetic construct
  source 1..20: mol_type = other RNA
tttgtatttttagtagagac

SEQ ID NO: 26066 - RNA, 20 nt, synthetic construct
  source 1..20: mol_type = other RNA
taaaaatacaaaaattagcc

SEQ ID NO: 26067 - RNA, 20 nt, synthetic construct
  source 1..20: mol_type = other RNA
atacaaaaattagccaggtg

SEQ ID NO: 26068 - RNA, 20 nt, synthetic construct
  source 1..20: mol_type = other RNA
caaaaattagccaggtgtgg

SEQ ID NO: 26069 - RNA, 20 nt, synthetic construct
  source 1..20: mol_type = other RNA
aaattagccaggtgtggtgg

SEQ ID NO: 26070 - RNA, 20 nt, synthetic construct
  source 1..20: mol_type = other RNA
aattagccaggtgtggtggc

SEQ ID NO: 26071 - RNA, 20 nt, synthetic construct
  source 1..20: mol_type = other RNA
caggcacccgccaccacacc

SEQ ID NO: 26072 - RNA, 20 nt, synthetic construct
  source 1..20: mol_type = other RNA
gtgcctgtagtcccagctac

SEQ ID NO: 26073 - RNA, 20 nt, synthetic construct
  source 1..20: mol_type = other RNA
tgcctgtagtcccagctact

SEQ ID NO: 26074 - RNA, 20 nt, synthetic construct
  source 1..20: mol_type = other RNA
gcctgtagtcccagctactg

SEQ ID NO: 26075 - RNA, 20 nt, synthetic construct
  source 1..20: mol_type = other RNA
tgtagtcccagctactgggg

SEQ ID NO: 26076 - RNA, 20 nt, synthetic construct
  source 1..20: mol_type = other RNA
tccccagtagctgggactac

SEQ ID NO: 26077 - RNA, 20 nt, synthetic construct
  source 1..20: mol_type = other RNA
cccagctactggggaggctg

SEQ ID NO: 26078 - RNA, 20 nt, synthetic construct
  source 1..20: mol_type = other RNA
gctactggggaggctgaggt

SEQ ID NO: 26079 - RNA, 20 nt, synthetic construct
  source 1..20: mol_type = other RNA
cctcagcctccccagtagct

SEQ ID NO: 26080 - RNA, 20 nt, synthetic construct
  source 1..20: mol_type = other RNA
acctcagcctccccagtagc

SEQ ID NO: 26081 - RNA, 20 nt, synthetic construct
  source 1..20: mol_type = other RNA
gtaggagaatcgcttgaact

SEQ ID NO: 26082 - RNA, 20 nt, synthetic construct
  source 1..20: mol_type = other RNA
taggagaatcgcttgaactt

SEQ ID NO: 26083 - RNA, 20 nt, synthetic construct
  source 1..20: mol_type = other RNA
gagaatcgcttgaacttggg

SEQ ID NO: 26084 - RNA, 20 nt, synthetic construct
  source 1..20: mol_type = other RNA
aatcgcttgaacttgggagg

SEQ ID NO: 26085 - RNA, 20 nt, synthetic construct
  source 1..20: mol_type = other RNA
ggagtgctgtggcgtgatct

SEQ ID NO: 26086 - RNA, 20 nt, synthetic construct
  source 1..20: mol_type = other RNA
cacgccacagcactccagcc

SEQ ID NO: 26087 - RNA, 20 nt, synthetic construct
  source 1..20: mol_type = other RNA
acgccacagcactccagcct

SEQ ID NO: 26088 - RNA, 20 nt, synthetic construct
  source 1..20: mol_type = other RNA
tctcccaggctggagtgctg

SEQ ID NO: 26089 - RNA, 20 nt, synthetic construct
  source 1..20: mol_type = other RNA
ctccagcctgggagacagag

SEQ ID NO: 26090 - RNA, 20 nt, synthetic construct
  source 1..20: mol_type = other RNA
tccagcctgggagacagagt

SEQ ID NO: 26091 - RNA, 20 nt, synthetic construct
  source 1..20: mol_type = other RNA
tcccactctgtctcccaggc

SEQ ID NO: 26092 - RNA, 20 nt, synthetic construct
  source 1..20: mol_type = other RNA
ggagtcccactctgtctccc

SEQ ID NO: 26093 - RNA, 20 nt, synthetic construct
  source 1..20: mol_type = other RNA
tttttttttttcttttgaga

SEQ ID NO: 26094 - RNA, 20 nt, synthetic construct
  source 1..20: mol_type = other RNA
aaagaaaaaaaaaaaaaaaa

SEQ ID NO: 26095 - RNA, 20 nt, synthetic construct
  source 1..20: mol_type = other RNA
aagaaaaaaaaaaaaaaaaa

SEQ ID NO: 26096 - RNA, 20 nt, synthetic construct
  source 1..20: mol_type = other RNA
agaaaaaaaaaaaaaaaaag

SEQ ID NO: 26097 - RNA, 20 nt, synthetic construct
  source 1..20: mol_type = other RNA
aaaaaaaaaaggggtgtttg

SEQ ID NO: 26098 - RNA, 20 nt, synthetic construct
  source 1..20: mol_type = other RNA
aaaaaaaggggtgtttgagg

SEQ ID NO: 26099 - RNA, 20 nt, synthetic construct
  source 1..20: mol_type = other RNA
gaggaggtgtgagttaccta

SEQ ID NO: 26100 - RNA, 20 nt, synthetic construct
  source 1..20: mol_type = other RNA
aggaggtgtgagttacctaa

SEQ ID NO: 26101 - RNA, 20 nt, synthetic construct
  source 1..20: mol_type = other RNA
ggaggtgtgagttacctaag

SEQ ID NO: 26102 - RNA, 20 nt, synthetic construct
  source 1..20: mol_type = other RNA
gaggtgtgagttacctaagg

SEQ ID NO: 26103 - RNA, 20 nt, synthetic construct
  source 1..20: mol_type = other RNA
tcagttacttctgccccctt

SEQ ID NO: 26104 - RNA, 20 nt, synthetic construct
  source 1..20: mol_type = other RNA
gattcagtaataccctatct

SEQ ID NO: 26105 - RNA, 20 nt, synthetic construct
  source 1..20: mol_type = other RNA
gatctctagattcctagata

SEQ ID NO: 26106 - RNA, 20 nt, synthetic construct
  source 1..20: mol_type = other RNA
agatctctagattcctagat

SEQ ID NO: 26107 - RNA, 20 nt, synthetic construct
  source 1..20: mol_type = other RNA
ttgcatcagtacacagaagc

SEQ ID NO: 26108 - RNA, 20 nt, synthetic construct
  source 1..20: mol_type = other RNA
aatgtctattacaaagcatg

SEQ ID NO: 26109 - RNA, 20 nt, synthetic construct
  source 1..20: mol_type = other RNA
ttcttgaatgtccatcaaga

SEQ ID NO: 26110 - RNA, 20 nt, synthetic construct
  source 1..20: mol_type = other RNA
tcttgaatgtccatcaagaa

SEQ ID NO: 26111 - RNA, 20 nt, synthetic construct
  source 1..20: mol_type = other RNA
aatgtccatcaagaagggac

SEQ ID NO: 26112 - RNA, 20 nt, synthetic construct
  source 1..20: mol_type = other RNA
tttaaccagtcccttcttga

SEQ ID NO: 26113 - RNA, 20 nt, synthetic construct
  source 1..20: mol_type = other RNA
acaaaccaccattcattcga

SEQ ID NO: 26114 - RNA, 20 nt, synthetic construct
  source 1..20: mol_type = other RNA
gtattccatcgaatgaatgg

SEQ ID NO: 26115 - RNA, 20 nt, synthetic construct
  source 1..20: mol_type = other RNA
atagtattccatcgaatgaa

SEQ ID NO: 26116 - RNA, 20 nt, synthetic construct
  source 1..20: mol_type = other RNA
tatacagccatcaaaaagaa

SEQ ID NO: 26117 - RNA, 20 nt, synthetic construct
  source 1..20: mol_type = other RNA
atacagccatcaaaaagaat

SEQ ID NO: 26118 - RNA, 20 nt, synthetic construct
  source 1..20: mol_type = other RNA
tacagccatcaaaaagaatg

SEQ ID NO: 26119 - RNA, 20 nt, synthetic construct
  source 1..20: mol_type = other RNA
atctaccccattctttttga

SEQ ID NO: 26120 - RNA, 20 nt, synthetic construct
  source 1..20: mol_type = other RNA
aaagaatggggtagattgct

SEQ ID NO: 26121 - RNA, 20 nt, synthetic construct
  source 1..20: mol_type = other RNA
cactttgctttgtattttat

SEQ ID NO: 26122 - RNA, 20 nt, synthetic construct
  source 1..20: mol_type = other RNA
gcactttgctttgtatttta

SEQ ID NO: 26123 - RNA, 20 nt, synthetic construct
  source 1..20: mol_type = other RNA
tgcagatttatatgtgtaac

SEQ ID NO: 26124 - RNA, 20 nt, synthetic construct
  source 1..20: mol_type = other RNA
tgtgtgtgtgtgtatacata

SEQ ID NO: 26125 - RNA, 20 nt, synthetic construct
  source 1..20: mol_type = other RNA
tcttaaatgtgcatagaaaa

SEQ ID NO: 26126 - RNA, 20 nt, synthetic construct
  source 1..20: mol_type = other RNA
aatgtgcatagaaaaaggcc

SEQ ID NO: 26127 - RNA, 20 nt, synthetic construct
  source 1..20: mol_type = other RNA
ggcctggaagcccagtgctt

SEQ ID NO: 26128 - RNA, 20 nt, synthetic construct
  source 1..20: mol_type = other RNA
gcctggaagcccagtgcttt

SEQ ID NO: 26129 - RNA, 20 nt, synthetic construct
  source 1..20: mol_type = other RNA
tggaagcccagtgctttggg

SEQ ID NO: 26130 - RNA, 20 nt, synthetic construct
  source 1..20: mol_type = other RNA
tcccaaagcactgggcttcc

SEQ ID NO: 26131 - RNA, 20 nt, synthetic construct
  source 1..20: mol_type = other RNA
cccagtgctttgggaggcca

SEQ ID NO: 26132 - RNA, 20 nt, synthetic construct
  source 1..20: mol_type = other RNA
agtgctttgggaggccaagg

SEQ ID NO: 26133 - RNA, 20 nt, synthetic construct
  source 1..20: mol_type = other RNA
gtgctttgggaggccaaggt

SEQ ID NO: 26134 - RNA, 20 nt, synthetic construct
  source 1..20: mol_type = other RNA
ccttggcctcccaaagcact

SEQ ID NO: 26135 - RNA, 20 nt, synthetic construct
  source 1..20: mol_type = other RNA
accttggcctcccaaagcac

SEQ ID NO: 26136 - RNA, 20 nt, synthetic construct
  source 1..20: mol_type = other RNA
ctttgggaggccaaggtggg

SEQ ID NO: 26137 - RNA, 20 nt, synthetic construct
  source 1..20: mol_type = other RNA
caaggtgggaggattgcttg

SEQ ID NO: 26138 - RNA, 20 nt, synthetic construct
  source 1..20: mol_type = other RNA
ctcaagcaatcctcccacct

SEQ ID NO: 26139 - RNA, 20 nt, synthetic construct
  source 1..20: mol_type = other RNA
tgggaggattgcttgaggcc

SEQ ID NO: 26140 - RNA, 20 nt, synthetic construct
  source 1..20: mol_type = other RNA
gggaggattgcttgaggcca

SEQ ID NO: 26141 - RNA, 20 nt, synthetic construct
  source 1..20: mol_type = other RNA
ggaggattgcttgaggccag

SEQ ID NO: 26142 - RNA, 20 nt, synthetic construct
  source 1..20: mol_type = other RNA
ccaggggttcaagaccagcc

SEQ ID NO: 26143 - RNA, 20 nt, synthetic construct
  source 1..20: mol_type = other RNA
caggggttcaagaccagcct

SEQ ID NO: 26144 - RNA, 20 nt, synthetic construct
  source 1..20: mol_type = other RNA
ccaggctggtcttgaacccc

SEQ ID NO: 26145 - RNA, 20 nt, synthetic construct
  source 1..20: mol_type = other RNA
ttcttgctttttgcccaggc

SEQ ID NO: 26146 - RNA, 20 nt, synthetic construct
  source 1..20: mol_type = other RNA
tctattcttgctttttgccc

SEQ ID NO: 26147 - RNA, 20 nt, synthetic construct
  source 1..20: mol_type = other RNA
ttttttacattagcagagca

SEQ ID NO: 26148 - RNA, 20 nt, synthetic construct
  source 1..20: mol_type = other RNA
tttacattagcagagcatgg

SEQ ID NO: 26149 - RNA, 20 nt, synthetic construct
  source 1..20: mol_type = other RNA
agagcatggtggcacatgcc

SEQ ID NO: 26150 - RNA, 20 nt, synthetic construct
  source 1..20: mol_type = other RNA
tgcctggagtcccagctact

SEQ ID NO: 26151 - RNA, 20 nt, synthetic construct
  source 1..20: mol_type = other RNA
ttccgagtagctgggactcc

SEQ ID NO: 26152 - RNA, 20 nt, synthetic construct
  source 1..20: mol_type = other RNA
cccagctactcggaaagttg

SEQ ID NO: 26153 - RNA, 20 nt, synthetic construct
  source 1..20: mol_type = other RNA
agctactcggaaagttgagg

SEQ ID NO: 26154 - RNA, 20 nt, synthetic construct
  source 1..20: mol_type = other RNA
gctactcggaaagttgaggt

SEQ ID NO: 26155 - RNA, 20 nt, synthetic construct
  source 1..20: mol_type = other RNA
cctcaactttccgagtagct

SEQ ID NO: 26156 - RNA, 20 nt, synthetic construct
  source 1..20: mol_type = other RNA
acctcaactttccgagtagc

SEQ ID NO: 26157 - RNA, 20 nt, synthetic construct
  source 1..20: mol_type = other RNA
actcggaaagttgaggtggg

SEQ ID NO: 26158 - RNA, 20 nt, synthetic construct
  source 1..20: mol_type = other RNA
tcacttgagcccagcagttc

SEQ ID NO: 26159 - RNA, 20 nt, synthetic construct
  source 1..20: mol_type = other RNA
tcactgtagcctgaactgct

SEQ ID NO: 26160 - RNA, 20 nt, synthetic construct
  source 1..20: mol_type = other RNA
ctcactgtagcctgaactgc

SEQ ID NO: 26161 - RNA, 20 nt, synthetic construct
  source 1..20: mol_type = other RNA
tcactcaggctggagttcag

SEQ ID NO: 26162 - RNA, 20 nt, synthetic construct
  source 1..20: mol_type = other RNA
tattagtctgtcactcaggc

SEQ ID NO: 26163 - RNA, 20 nt, synthetic construct
  source 1..20: mol_type = other RNA
agagtattagtctgtcactc

SEQ ID NO: 26164 - RNA, 20 nt, synthetic construct
  source 1..20: mol_type = other RNA
agaaaagaaaaaagtctcaa

SEQ ID NO: 26165 - RNA, 20 nt, synthetic construct
  source 1..20: mol_type = other RNA
gcagtctactagtagcagtt

SEQ ID NO: 26166 - RNA, 20 nt, synthetic construct
  source 1..20: mol_type = other RNA
ctagtagactgctctacaga

SEQ ID NO: 26167 - RNA, 20 nt, synthetic construct
  source 1..20: mol_type = other RNA
actgctctacagaaggacct

SEQ ID NO: 26168 - RNA, 20 nt, synthetic construct
  source 1..20: mol_type = other RNA
tctacagaaggacctcggta

SEQ ID NO: 26169 - RNA, 20 nt, synthetic construct
  source 1..20: mol_type = other RNA
ttggttttagttccttaccg

SEQ ID NO: 26170 - RNA, 20 nt, synthetic construct
  source 1..20: mol_type = other RNA
ggtaaaataaaagtttcttt

SEQ ID NO: 26171 - RNA, 20 nt, synthetic construct
  source 1..20: mol_type = other RNA
tgctattttaactctttaca

SEQ ID NO: 26172 - RNA, 20 nt, synthetic construct
  source 1..20: mol_type = other RNA
gctattttaactctttacat

SEQ ID NO: 26173 - RNA, 20 nt, synthetic construct
  source 1..20: mol_type = other RNA
ttttataattgtataagaac

SEQ ID NO: 26174 - RNA, 20 nt, synthetic construct
  source 1..20: mol_type = other RNA
aattagtttttaaatacagt

SEQ ID NO: 26175 - RNA, 20 nt, synthetic construct
  source 1..20: mol_type = other RNA
attagtttttaaatacagta

SEQ ID NO: 26176 - RNA, 20 nt, synthetic construct
  source 1..20: mol_type = other RNA
tttaaatacagtagggacag

SEQ ID NO: 26177 - RNA, 20 nt, synthetic construct
  source 1..20: mol_type = other RNA
aatacagtagggacagagga

SEQ ID NO: 26178 - RNA, 20 nt, synthetic construct
  source 1..20: mol_type = other RNA
atacagtagggacagaggaa

SEQ ID NO: 26179 - RNA, 20 nt, synthetic construct
  source 1..20: mol_type = other RNA
tacagtagggacagaggaag

SEQ ID NO: 26180 - RNA, 20 nt, synthetic construct
  source 1..20: mol_type = other RNA
tagggacagaggaaggggaa

SEQ ID NO: 26181 - RNA, 20 nt, synthetic construct
  source 1..20: mol_type = other RNA
gacagaggaaggggaaagga

SEQ ID NO: 26182 - RNA, 20 nt, synthetic construct
  source 1..20: mol_type = other RNA
cttttgtactgcttgagttt

SEQ ID NO: 26183 - RNA, 20 nt, synthetic construct
  source 1..20: mol_type = other RNA
ttttgtactgcttgagtttt

SEQ ID NO: 26184 - RNA, 20 nt, synthetic construct
  source 1..20: mol_type = other RNA
tttgtactgcttgagttttg

SEQ ID NO: 26185 - RNA, 20 nt, synthetic construct
  source 1..20: mol_type = other RNA
ttgtactgcttgagttttgg

SEQ ID NO: 26186 - RNA, 20 nt, synthetic construct
  source 1..20: mol_type = other RNA
tgtactgcttgagttttggg

SEQ ID NO: 26187 - RNA, 20 nt, synthetic construct
  source 1..20: mol_type = other RNA
cccaataatcatgtgctatt

SEQ ID NO: 26188 - RNA, 20 nt, synthetic construct
  source 1..20: mol_type = other RNA
caaatagcacatgattattg

SEQ ID NO: 26189 - RNA, 20 nt, synthetic construct
  source 1..20: mol_type = other RNA
ccaaatagcacatgattatt

SEQ ID NO: 26190 - RNA, 20 nt, synthetic construct
  source 1..20: mol_type = other RNA
accaaatagcacatgattat

SEQ ID NO: 26191 - RNA, 20 nt, synthetic construct
  source 1..20: mol_type = other RNA
tatttggtaattttttttaa

SEQ ID NO: 26192 - RNA, 20 nt, synthetic construct
  source 1..20: mol_type = other RNA
atttggtaattttttttaaa

SEQ ID NO: 26193 - RNA, 20 nt, synthetic construct
  source 1..20: mol_type = other RNA
tttaagtgagctgagtgcag

SEQ ID NO: 26194 - RNA, 20 nt, synthetic construct
  source 1..20: mol_type = other RNA
tctggagtagctgggactac

SEQ ID NO: 26195 - RNA, 20 nt, synthetic construct
  source 1..20: mol_type = other RNA
gctactccagagacagacgc

SEQ ID NO: 26196 - RNA, 20 nt, synthetic construct
  source 1..20: mol_type = other RNA
cgtctgtctctggagtagct

SEQ ID NO: 26197 - RNA, 20 nt, synthetic construct
  source 1..20: mol_type = other RNA
gcgtctgtctctggagtagc

SEQ ID NO: 26198 - RNA, 20 nt, synthetic construct
  source 1..20: mol_type = other RNA
actccagagacagacgcagg

SEQ ID NO: 26199 - RNA, 20 nt, synthetic construct
  source 1..20: mol_type = other RNA
cagagacagacgcaggagga

SEQ ID NO: 26200 - RNA, 20 nt, synthetic construct
  source 1..20: mol_type = other RNA
catcctcctgcgtctgtctc

SEQ ID NO: 26201 - RNA, 20 nt, synthetic construct
  source 1..20: mol_type = other RNA
gttagataaactctggtttc

SEQ ID NO: 26202 - RNA, 20 nt, synthetic construct
  source 1..20: mol_type = other RNA
ttacagggttagataaactc

SEQ ID NO: 26203 - RNA, 20 nt, synthetic construct
  source 1..20: mol_type = other RNA
gtaactcccctgcctccaag

SEQ ID NO: 26204 - RNA, 20 nt, synthetic construct
  source 1..20: mol_type = other RNA
ttggaggcaggggagttaca

SEQ ID NO: 26205 - RNA, 20 nt, synthetic construct
  source 1..20: mol_type = other RNA
cttggaggcaggggagttac

SEQ ID NO: 26206 - RNA, 20 nt, synthetic construct
  source 1..20: mol_type = other RNA
atcttacctcttggaggcag

SEQ ID NO: 26207 - RNA, 20 nt, synthetic construct
  source 1..20: mol_type = other RNA
catcttacctcttggaggca

SEQ ID NO: 26208 - RNA, 20 nt, synthetic construct
  source 1..20: mol_type = other RNA
gcatcttacctcttggaggc

SEQ ID NO: 26209 - RNA, 20 nt, synthetic construct
  source 1..20: mol_type = other RNA
aagaggtaagatgccaattt

SEQ ID NO: 26210 - RNA, 20 nt, synthetic construct
  source 1..20: mol_type = other RNA
agaggtaagatgccaatttt

SEQ ID NO: 26211 - RNA, 20 nt, synthetic construct
  source 1..20: mol_type = other RNA
gaggtaagatgccaattttg

SEQ ID NO: 26212 - RNA, 20 nt, synthetic construct
  source 1..20: mol_type = other RNA
aaaattggcatcttacctct

SEQ ID NO: 26213 - RNA, 20 nt, synthetic construct
  source 1..20: mol_type = other RNA
taagaggaattccccaaaat

SEQ ID NO: 26214 - RNA, 20 nt, synthetic construct
  source 1..20: mol_type = other RNA
aattcctcttatacaaaata

SEQ ID NO: 26215 - RNA, 20 nt, synthetic construct
  source 1..20: mol_type = other RNA
tcctcttatacaaaatatgg

SEQ ID NO: 26216 - RNA, 20 nt, synthetic construct
  source 1..20: mol_type = other RNA
tccaccatattttgtataag

SEQ ID NO: 26217 - RNA, 20 nt, synthetic construct
  source 1..20: mol_type = other RNA
atacaaaatatggtggaaag

SEQ ID NO: 26218 - RNA, 20 nt, synthetic construct
  source 1..20: mol_type = other RNA
tacaaaatatggtggaaaga

SEQ ID NO: 26219 - RNA, 20 nt, synthetic construct
  source 1..20: mol_type = other RNA
ggtttcacagattcaaatcc

SEQ ID NO: 26220 - RNA, 20 nt, synthetic construct
  source 1..20: mol_type = other RNA
ttcgagaagggatcatagcc

SEQ ID NO: 26221 - RNA, 20 nt, synthetic construct
  source 1..20: mol_type = other RNA
gatcccttctcgaatgaccc

SEQ ID NO: 26222 - RNA, 20 nt, synthetic construct
  source 1..20: mol_type = other RNA
atcccttctcgaatgaccct

SEQ ID NO: 26223 - RNA, 20 nt, synthetic construct
  source 1..20: mol_type = other RNA
cttctcgaatgaccctgggt

SEQ ID NO: 26224 - RNA, 20 nt, synthetic construct
  source 1..20: mol_type = other RNA
tacccagggtcattcgagaa

SEQ ID NO: 26225 - RNA, 20 nt, synthetic construct
  source 1..20: mol_type = other RNA
ctacccagggtcattcgaga

SEQ ID NO: 26226 - RNA, 20 nt, synthetic construct
  source 1..20: mol_type = other RNA
aggaaagtgaggcctaccca

SEQ ID NO: 26227 - RNA, 20 nt, synthetic construct
  source 1..20: mol_type = other RNA
aaggaaagtgaggcctaccc

SEQ ID NO: 26228 - RNA, 20 nt, synthetic construct
  source 1..20: mol_type = other RNA
actttccttgtttctcccta

SEQ ID NO: 26229 - RNA, 20 nt, synthetic construct
  source 1..20: mol_type = other RNA
agggagaaacaaggaaagtg

SEQ ID NO: 26230 - RNA, 20 nt, synthetic construct
  source 1..20: mol_type = other RNA
catttccatagggagaaaca

SEQ ID NO: 26231 - RNA, 20 nt, synthetic construct
  source 1..20: mol_type = other RNA
ctccctatggaaatgttatg

SEQ ID NO: 26232 - RNA, 20 nt, synthetic construct
  source 1..20: mol_type = other RNA
gtcctcataacatttccata

SEQ ID NO: 26233 - RNA, 20 nt, synthetic construct
  source 1..20: mol_type = other RNA
ggtcctcataacatttccat

SEQ ID NO: 26234 - RNA, 20 nt, synthetic construct
  source 1..20: mol_type = other RNA
aaatgttatgaggaccaagt

SEQ ID NO: 26235 - RNA, 20 nt, synthetic construct
  source 1..20: mol_type = other RNA
agaactctatggttcctact

SEQ ID NO: 26236 - RNA, 20 nt, synthetic construct
  source 1..20: mol_type = other RNA
aaggtttacagagaactcta

SEQ ID NO: 26237 - RNA, 20 nt, synthetic construct
  source 1..20: mol_type = other RNA
ccttaaaatgctacccagac

SEQ ID NO: 26238 - RNA, 20 nt, synthetic construct
  source 1..20: mol_type = other RNA
cctgtctgggtagcatttta

SEQ ID NO: 26239 - RNA, 20 nt, synthetic construct
  source 1..20: mol_type = other RNA
tacccagacaggagcagtaa

SEQ ID NO: 26240 - RNA, 20 nt, synthetic construct
  source 1..20: mol_type = other RNA
agccattactgctcctgtct

SEQ ID NO: 26241 - RNA, 20 nt, synthetic construct
  source 1..20: mol_type = other RNA
cagccattactgctcctgtc

SEQ ID NO: 26242 - RNA, 20 nt, synthetic construct
  source 1..20: mol_type = other RNA
aggagcagtaatggctgcca

SEQ ID NO: 26243 - RNA, 20 nt, synthetic construct
  source 1..20: mol_type = other RNA
gtaatggctgccaaggagct

SEQ ID NO: 26244 - RNA, 20 nt, synthetic construct
  source 1..20: mol_type = other RNA
tggctgccaaggagctagga

SEQ ID NO: 26245 - RNA, 20 nt, synthetic construct
  source 1..20: mol_type = other RNA
ccaaggagctaggaaggaaa

SEQ ID NO: 26246 - RNA, 20 nt, synthetic construct
  source 1..20: mol_type = other RNA
caaggagctaggaaggaaaa

SEQ ID NO: 26247 - RNA, 20 nt, synthetic construct
  source 1..20: mol_type = other RNA
aaggagctaggaaggaaaag

SEQ ID NO: 26248 - RNA, 20 nt, synthetic construct
  source 1..20: mol_type = other RNA
ccttttccttcctagctcct

SEQ ID NO: 26249 - RNA, 20 nt, synthetic construct
  source 1..20: mol_type = other RNA
agctaggaaggaaaaggggc

SEQ ID NO: 26250 - RNA, 20 nt, synthetic construct
  source 1..20: mol_type = other RNA
ggaaggaaaaggggctggac

SEQ ID NO: 26251 - RNA, 20 nt, synthetic construct
  source 1..20: mol_type = other RNA
gaaggaaaaggggctggaca

SEQ ID NO: 26252 - RNA, 20 nt, synthetic construct
  source 1..20: mol_type = other RNA
aaggaaaaggggctggacag

SEQ ID NO: 26253 - RNA, 20 nt, synthetic construct
  source 1..20: mol_type = other RNA
aaggggctggacaggggctg

SEQ ID NO: 26254 - RNA, 20 nt, synthetic construct
  source 1..20: mol_type = other RNA
ttgttaacacaaggcatctt

SEQ ID NO: 26255 - RNA, 20 nt, synthetic construct
  source 1..20: mol_type = other RNA
agctttttgttgttaacaca

SEQ ID NO: 26256 - RNA, 20 nt, synthetic construct
  source 1..20: mol_type = other RNA
ttcatttttctcttcatttt

SEQ ID NO: 26257 - RNA, 20 nt, synthetic construct
  source 1..20: mol_type = other RNA
aaaaatgaataaatacattg

SEQ ID NO: 26258 - RNA, 20 nt, synthetic construct
  source 1..20: mol_type = other RNA
cattgtggcaatttcctatc

SEQ ID NO: 26259 - RNA, 20 nt, synthetic construct
  source 1..20: mol_type = other RNA
gctgtatagtatttcctgat

SEQ ID NO: 26260 - RNA, 20 nt, synthetic construct
  source 1..20: mol_type = other RNA
aaaaaagaatgagccacagc

SEQ ID NO: 26261 - RNA, 20 nt, synthetic construct
  source 1..20: mol_type = other RNA
catgttcgtatctccagctg

SEQ ID NO: 26262 - RNA, 20 nt, synthetic construct
  source 1..20: mol_type = other RNA
gatacgaacatgaatgaatc

SEQ ID NO: 26263 - RNA, 20 nt, synthetic construct
  source 1..20: mol_type = other RNA
atacgaacatgaatgaatct

SEQ ID NO: 26264 - RNA, 20 nt, synthetic construct
  source 1..20: mol_type = other RNA
tgggtctcactctgttgccc

SEQ ID NO: 26265 - RNA, 20 nt, synthetic construct
  source 1..20: mol_type = other RNA
tctcactctgttgcccaggc

SEQ ID NO: 26266 - RNA, 20 nt, synthetic construct
  source 1..20: mol_type = other RNA
ttgcccaggctggagtgcag

SEQ ID NO: 26267 - RNA, 20 nt, synthetic construct
  source 1..20: mol_type = other RNA
atgccactgcactccagcct

SEQ ID NO: 26268 - RNA, 20 nt, synthetic construct
  source 1..20: mol_type = other RNA
catgccactgcactccagcc

SEQ ID NO: 26269 - RNA, 20 nt, synthetic construct
  source 1..20: mol_type = other RNA
ggatgacttgggctgggagg

SEQ ID NO: 26270 - RNA, 20 nt, synthetic construct
  source 1..20: mol_type = other RNA
ggaggatgacttgggctggg

SEQ ID NO: 26271 - RNA, 20 nt, synthetic construct
  source 1..20: mol_type = other RNA
gtgggaggatgacttgggct

SEQ ID NO: 26272 - RNA, 20 nt, synthetic construct
  source 1..20: mol_type = other RNA
ggtgggaggatgacttgggc

SEQ ID NO: 26273 - RNA, 20 nt, synthetic construct
  source 1..20: mol_type = other RNA
ctaaggtgggaggatgactt

SEQ ID NO: 26274 - RNA, 20 nt, synthetic construct
  source 1..20: mol_type = other RNA
gctaaggtgggaggatgact

SEQ ID NO: 26275 - RNA, 20 nt, synthetic construct
  source 1..20: mol_type = other RNA
acttgagaggctaaggtggg

SEQ ID NO: 26276 - RNA, 20 nt, synthetic construct
  source 1..20: mol_type = other RNA
accttagcctctcaagtagc

SEQ ID NO: 26277 - RNA, 20 nt, synthetic construct
  source 1..20: mol_type = other RNA
gctacttgagaggctaaggt

SEQ ID NO: 26278 - RNA, 20 nt, synthetic construct
  source 1..20: mol_type = other RNA
agctacttgagaggctaagg

SEQ ID NO: 26279 - RNA, 20 nt, synthetic construct
  source 1..20: mol_type = other RNA
tccagctacttgagaggcta

SEQ ID NO: 26280 - RNA, 20 nt, synthetic construct
  source 1..20: mol_type = other RNA
tctcaagtagctggaactac

SEQ ID NO: 26281 - RNA, 20 nt, synthetic construct
  source 1..20: mol_type = other RNA
tgtagttccagctacttgag

SEQ ID NO: 26282 - RNA, 20 nt, synthetic construct
  source 1..20: mol_type = other RNA
caaaaattagctgggtgtgg

SEQ ID NO: 26283 - RNA, 20 nt, synthetic construct
  source 1..20: mol_type = other RNA
atacaaaaattagctgggtg

SEQ ID NO: 26284 - RNA, 20 nt, synthetic construct
  source 1..20: mol_type = other RNA
aaacaatacaaaaattagct

SEQ ID NO: 26285 - RNA, 20 nt, synthetic construct
  source 1..20: mol_type = other RNA
caaacaatacaaaaattagc

SEQ ID NO: 26286 - RNA, 20 nt, synthetic construct
  source 1..20: mol_type = other RNA
ttttgtattgtttgcagaga

SEQ ID NO: 26287 - RNA, 20 nt, synthetic construct
  source 1..20: mol_type = other RNA
tttgtattgtttgcagagat

SEQ ID NO: 26288 - RNA, 20 nt, synthetic construct
  source 1..20: mol_type = other RNA
ttgtttgcagagatgggttt

SEQ ID NO: 26289 - RNA, 20 nt, synthetic construct
  source 1..20: mol_type = other RNA
tttggccatgttgcccaagc

SEQ ID NO: 26290 - RNA, 20 nt, synthetic construct
  source 1..20: mol_type = other RNA
tgagaccagcttgggcaaca

SEQ ID NO: 26291 - RNA, 20 nt, synthetic construct
  source 1..20: mol_type = other RNA
ccaagctggtctcaaactcc

SEQ ID NO: 26292 - RNA, 20 nt, synthetic construct
  source 1..20: mol_type = other RNA
caagctggtctcaaactcct

SEQ ID NO: 26293 - RNA, 20 nt, synthetic construct
  source 1..20: mol_type = other RNA
caggagtttgagaccagctt

SEQ ID NO: 26294 - RNA, 20 nt, synthetic construct
  source 1..20: mol_type = other RNA
ccaggagtttgagaccagct

SEQ ID NO: 26295 - RNA, 20 nt, synthetic construct
  source 1..20: mol_type = other RNA
caggtggatctcttgagccc

SEQ ID NO: 26296 - RNA, 20 nt, synthetic construct
  source 1..20: mol_type = other RNA
tgggaggcagagcaggcagg

SEQ ID NO: 26297 - RNA, 20 nt, synthetic construct
  source 1..20: mol_type = other RNA
ctttgggaggcagagcaggc

SEQ ID NO: 26298 - RNA, 20 nt, synthetic construct
  source 1..20: mol_type = other RNA
ggcactttgggaggcagagc

SEQ ID NO: 26299 - RNA, 20 nt, synthetic construct
  source 1..20: mol_type = other RNA
tgcctcccaaagtgccagta

SEQ ID NO: 26300 - RNA, 20 nt, synthetic construct
  source 1..20: mol_type = other RNA
tgccttactggcactttggg

SEQ ID NO: 26301 - RNA, 20 nt, synthetic construct
  source 1..20: mol_type = other RNA
tcatgccttactggcacttt

SEQ ID NO: 26302 - RNA, 20 nt, synthetic construct
  source 1..20: mol_type = other RNA
ctcatgccttactggcactt

SEQ ID NO: 26303 - RNA, 20 nt, synthetic construct
  source 1..20: mol_type = other RNA
cgtggtgactcatgccttac

SEQ ID NO: 26304 - RNA, 20 nt, synthetic construct
  source 1..20: mol_type = other RNA
aatgttatttaggctgagcg

SEQ ID NO: 26305 - RNA, 20 nt, synthetic construct
  source 1..20: mol_type = other RNA
tatgtttaaaaatgttattt

SEQ ID NO: 26306 - RNA, 20 nt, synthetic construct
  source 1..20: mol_type = other RNA
aaaaatactatgtattattt

SEQ ID NO: 26307 - RNA, 20 nt, synthetic construct
  source 1..20: mol_type = other RNA
aaaatactatgtattattta

SEQ ID NO: 26308 - RNA, 20 nt, synthetic construct
  source 1..20: mol_type = other RNA
caagtgttctgaatttagtg

SEQ ID NO: 26309 - RNA, 20 nt, synthetic construct
  source 1..20: mol_type = other RNA
acaagtgttctgaatttagt

SEQ ID NO: 26310 - RNA, 20 nt, synthetic construct
  source 1..20: mol_type = other RNA
aacaagtgttctgaatttag

SEQ ID NO: 26311 - RNA, 20 nt, synthetic construct
  source 1..20: mol_type = other RNA
tcagaacacttgtttcttgt

SEQ ID NO: 26312 - RNA, 20 nt, synthetic construct
  source 1..20: mol_type = other RNA
gaacacttgtttcttgttgg

SEQ ID NO: 26313 - RNA, 20 nt, synthetic construct
  source 1..20: mol_type = other RNA
ttcttgttggtggctgatga

SEQ ID NO: 26314 - RNA, 20 nt, synthetic construct
  source 1..20: mol_type = other RNA
aaggagaaatttcaactgat

SEQ ID NO: 26315 - RNA, 20 nt, synthetic construct
  source 1..20: mol_type = other RNA
aaccagatgagtgagcatgt

SEQ ID NO: 26316 - RNA, 20 nt, synthetic construct
  source 1..20: mol_type = other RNA
cacctacatgctcactcatc

SEQ ID NO: 26317 - RNA, 20 nt, synthetic construct
  source 1..20: mol_type = other RNA
aggtgcctgcgtgttaccct

SEQ ID NO: 26318 - RNA, 20 nt, synthetic construct
  source 1..20: mol_type = other RNA
agataccgagggtaacacgc

SEQ ID NO: 26319 - RNA, 20 nt, synthetic construct
  source 1..20: mol_type = other RNA
aggagtctctcagataccga

SEQ ID NO: 26320 - RNA, 20 nt, synthetic construct
  source 1..20: mol_type = other RNA
aaggagtctctcagataccg

SEQ ID NO: 26321 - RNA, 20 nt, synthetic construct
  source 1..20: mol_type = other RNA
aaagaaaaaagaaaaattga

SEQ ID NO: 26322 - RNA, 20 nt, synthetic construct
  source 1..20: mol_type = other RNA
ttcaacttttattttagatt

SEQ ID NO: 26323 - RNA, 20 nt, synthetic construct
  source 1..20: mol_type = other RNA
tcaacttttattttagattc

SEQ ID NO: 26324 - RNA, 20 nt, synthetic construct
  source 1..20: mol_type = other RNA
caacttttattttagattcg

SEQ ID NO: 26325 - RNA, 20 nt, synthetic construct
  source 1..20: mol_type = other RNA
aacttttattttagattcgg

SEQ ID NO: 26326 - RNA, 20 nt, synthetic construct
  source 1..20: mol_type = other RNA
acttttattttagattcggg

SEQ ID NO: 26327 - RNA, 20 nt, synthetic construct
  source 1..20: mol_type = other RNA
gattcggggggtacatgtgc

SEQ ID NO: 26328 - RNA, 20 nt, synthetic construct
  source 1..20: mol_type = other RNA
acatgtgcaggtttgctacc

SEQ ID NO: 26329 - RNA, 20 nt, synthetic construct
  source 1..20: mol_type = other RNA
catgtgcaggtttgctacct

SEQ ID NO: 26330 - RNA, 20 nt, synthetic construct
  source 1..20: mol_type = other RNA
cctgggtatactgcgtgatt

SEQ ID NO: 26331 - RNA, 20 nt, synthetic construct
  source 1..20: mol_type = other RNA
ctgggtatactgcgtgattt

SEQ ID NO: 26332 - RNA, 20 nt, synthetic construct
  source 1..20: mol_type = other RNA
gtatactgcgtgatttgggt

SEQ ID NO: 26333 - RNA, 20 nt, synthetic construct
  source 1..20: mol_type = other RNA
tatactgcgtgatttgggta

SEQ ID NO: 26334 - RNA, 20 nt, synthetic construct
  source 1..20: mol_type = other RNA
atactgcgtgatttgggtag

SEQ ID NO: 26335 - RNA, 20 nt, synthetic construct
  source 1..20: mol_type = other RNA
gtaggggtgatcccatcacc

SEQ ID NO: 26336 - RNA, 20 nt, synthetic construct
  source 1..20: mol_type = other RNA
taggggtgatcccatcacct

SEQ ID NO: 26337 - RNA, 20 nt, synthetic construct
  source 1..20: mol_type = other RNA
atgctcagtacccaggtgat

SEQ ID NO: 26338 - RNA, 20 nt, synthetic construct
  source 1..20: mol_type = other RNA
tatgctcagtacccaggtga

SEQ ID NO: 26339 - RNA, 20 nt, synthetic construct
  source 1..20: mol_type = other RNA
gggaactatgctcagtaccc

SEQ ID NO: 26340 - RNA, 20 nt, synthetic construct
  source 1..20: mol_type = other RNA
ggcagagttgaaaaactgtt

SEQ ID NO: 26341 - RNA, 20 nt, synthetic construct
  source 1..20: mol_type = other RNA
aggcagagttgaaaaactgt

SEQ ID NO: 26342 - RNA, 20 nt, synthetic construct
  source 1..20: mol_type = other RNA
gctagagtggggagggaggg

SEQ ID NO: 26343 - RNA, 20 nt, synthetic construct
  source 1..20: mol_type = other RNA
actgctagagtggggaggga

SEQ ID NO: 26344 - RNA, 20 nt, synthetic construct
  source 1..20: mol_type = other RNA
gactgctagagtggggaggg

SEQ ID NO: 26345 - RNA, 20 nt, synthetic construct
  source 1..20: mol_type = other RNA
ggggactgctagagtgggga

SEQ ID NO: 26346 - RNA, 20 nt, synthetic construct
  source 1..20: mol_type = other RNA
tggggactgctagagtgggg

SEQ ID NO: 26347 - RNA, 20 nt, synthetic construct
  source 1..20: mol_type = other RNA
cactggggactgctagagtg

SEQ ID NO: 26348 - RNA, 20 nt, synthetic construct
  source 1..20: mol_type = other RNA
acactggggactgctagagt

SEQ ID NO: 26349 - RNA, 20 nt, synthetic construct
  source 1..20: mol_type = other RNA
gacactggggactgctagag

SEQ ID NO: 26350 - RNA, 20 nt, synthetic construct
  source 1..20: mol_type = other RNA
gatggcaacagtagacactg

SEQ ID NO: 26351 - RNA, 20 nt, synthetic construct
  source 1..20: mol_type = other RNA
agatggcaacagtagacact

SEQ ID NO: 26352 - RNA, 20 nt, synthetic construct
  source 1..20: mol_type = other RNA
aagatggcaacagtagacac

SEQ ID NO: 26353 - RNA, 20 nt, synthetic construct
  source 1..20: mol_type = other RNA
ttgccatctttatgtccatg

SEQ ID NO: 26354 - RNA, 20 nt, synthetic construct
  source 1..20: mol_type = other RNA
ggtcctcatggacataaaga

SEQ ID NO: 26355 - RNA, 20 nt, synthetic construct
  source 1..20: mol_type = other RNA
agctaaatatcaggtcctca

SEQ ID NO: 26356 - RNA, 20 nt, synthetic construct
  source 1..20: mol_type = other RNA
tataagtggagctaaatatc

SEQ ID NO: 26357 - RNA, 20 nt, synthetic construct
  source 1..20: mol_type = other RNA
tgcattttctcacttataag

SEQ ID NO: 26358 - RNA, 20 nt, synthetic construct
  source 1..20: mol_type = other RNA
aagtgagaaaatgcagcatt

SEQ ID NO: 26359 - RNA, 20 nt, synthetic construct
  source 1..20: mol_type = other RNA
gttcctgtgttaatgtgctt

SEQ ID NO: 26360 - RNA, 20 nt, synthetic construct
  source 1..20: mol_type = other RNA
tgtcctaagcacattaacac

SEQ ID NO: 26361 - RNA, 20 nt, synthetic construct
  source 1..20: mol_type = other RNA
tctatgttgccagtttcctg

SEQ ID NO: 26362 - RNA, 20 nt, synthetic construct
  source 1..20: mol_type = other RNA
tgatctggtcctcaggaaac

SEQ ID NO: 26363 - RNA, 20 nt, synthetic construct
  source 1..20: mol_type = other RNA
tcctgaggaccagatcacgc

SEQ ID NO: 26364 - RNA, 20 nt, synthetic construct
  source 1..20: mol_type = other RNA
tcctgcgtgatctggtcctc

SEQ ID NO: 26365 - RNA, 20 nt, synthetic construct
  source 1..20: mol_type = other RNA
ggtgcaactcctgcgtgatc

SEQ ID NO: 26366 - RNA, 20 nt, synthetic construct
  source 1..20: mol_type = other RNA
tgcacctgcagagacagaag

SEQ ID NO: 26367 - RNA, 20 nt, synthetic construct
  source 1..20: mol_type = other RNA
gcacctgcagagacagaagt

SEQ ID NO: 26368 - RNA, 20 nt, synthetic construct
  source 1..20: mol_type = other RNA
ctgcagagacagaagtgggc

SEQ ID NO: 26369 - RNA, 20 nt, synthetic construct
  source 1..20: mol_type = other RNA
cagcccacttctgtctctgc

SEQ ID NO: 26370 - RNA, 20 nt, synthetic construct
  source 1..20: mol_type = other RNA
gagacagaagtgggctggag

SEQ ID NO: 26371 - RNA, 20 nt, synthetic construct
  source 1..20: mol_type = other RNA
agacagaagtgggctggaga

SEQ ID NO: 26372 - RNA, 20 nt, synthetic construct
  source 1..20: mol_type = other RNA
aagtgggctggagagggacc

SEQ ID NO: 26373 - RNA, 20 nt, synthetic construct
  source 1..20: mol_type = other RNA
agtgggctggagagggacca

SEQ ID NO: 26374 - RNA, 20 nt, synthetic construct
  source 1..20: mol_type = other RNA
agcagcagacttaggagccc

SEQ ID NO: 26375 - RNA, 20 nt, synthetic construct
  source 1..20: mol_type = other RNA
tcagcttcagcagcagactt

SEQ ID NO: 26376 - RNA, 20 nt, synthetic construct
  source 1..20: mol_type = other RNA
gctgaagctgactatagcga

SEQ ID NO: 26377 - RNA, 20 nt, synthetic construct
  source 1..20: mol_type = other RNA
gctgactatagcgaaggcaa

SEQ ID NO: 26378 - RNA, 20 nt, synthetic construct
  source 1..20: mol_type = other RNA
tagcgaaggcaaaggacaag

SEQ ID NO: 26379 - RNA, 20 nt, synthetic construct
  source 1..20: mol_type = other RNA
gcaaaggacaagtggcctga

SEQ ID NO: 26380 - RNA, 20 nt, synthetic construct
  source 1..20: mol_type = other RNA
ctgaaggccaacagagagcc

SEQ ID NO: 26381 - RNA, 20 nt, synthetic construct
  source 1..20: mol_type = other RNA
tgcacaggtgcgtaaggagc

SEQ ID NO: 26382 - RNA, 20 nt, synthetic construct
  source 1..20: mol_type = other RNA
tcttgatgcacaggtgcgta

SEQ ID NO: 26383 - RNA, 20 nt, synthetic construct
  source 1..20: mol_type = other RNA
tgtgcatcaagaacactgca

SEQ ID NO: 26384 - RNA, 20 nt, synthetic construct
  source 1..20: mol_type = other RNA
atgcagtgttcttgatgcac

SEQ ID NO: 26385 - RNA, 20 nt, synthetic construct
  source 1..20: mol_type = other RNA
tcaagaacactgcatggcac

SEQ ID NO: 26386 - RNA, 20 nt, synthetic construct
  source 1..20: mol_type = other RNA
caagaacactgcatggcact

SEQ ID NO: 26387 - RNA, 20 nt, synthetic construct
  source 1..20: mol_type = other RNA
cactgcatggcactgggcac

SEQ ID NO: 26388 - RNA, 20 nt, synthetic construct
  source 1..20: mol_type = other RNA
cactgggcacaggagtcatc

SEQ ID NO: 26389 - RNA, 20 nt, synthetic construct
  source 1..20: mol_type = other RNA
agtcatcaggaaatgatgct

SEQ ID NO: 26390 - RNA, 20 nt, synthetic construct
  source 1..20: mol_type = other RNA
gtcatcaggaaatgatgctt

SEQ ID NO: 26391 - RNA, 20 nt, synthetic construct
  source 1..20: mol_type = other RNA
atgatgcttgggagagcgct

SEQ ID NO: 26392 - RNA, 20 nt, synthetic construct
  source 1..20: mol_type = other RNA
agagcgctaggagagcactc

SEQ ID NO: 26393 - RNA, 20 nt, synthetic construct
  source 1..20: mol_type = other RNA
cctcctgccttctcatctct

SEQ ID NO: 26394 - RNA, 20 nt, synthetic construct
  source 1..20: mol_type = other RNA
cctagagatgagaaggcagg

SEQ ID NO: 26395 - RNA, 20 nt, synthetic construct
  source 1..20: mol_type = other RNA
aggcctagagatgagaaggc

SEQ ID NO: 26396 - RNA, 20 nt, synthetic construct
  source 1..20: mol_type = other RNA
attaaggcctagagatgaga

SEQ ID NO: 26397 - RNA, 20 nt, synthetic construct
  source 1..20: mol_type = other RNA
tttcacaaatgaggaaatta

SEQ ID NO: 26398 - RNA, 20 nt, synthetic construct
  source 1..20: mol_type = other RNA
aatggcacatttcacaaatg

SEQ ID NO: 26399 - RNA, 20 nt, synthetic construct
  source 1..20: mol_type = other RNA
tcagtgaatgagtagaataa

SEQ ID NO: 26400 - RNA, 20 nt, synthetic construct
  source 1..20: mol_type = other RNA
actcagaagagccatccacc

SEQ ID NO: 26401 - RNA, 20 nt, synthetic construct
  source 1..20: mol_type = other RNA
ggagaagagtgcctggtgga

SEQ ID NO: 26402 - RNA, 20 nt, synthetic construct
  source 1..20: mol_type = other RNA
agcgggagaagagtgcctgg

SEQ ID NO: 26403 - RNA, 20 nt, synthetic construct
  source 1..20: mol_type = other RNA
tgtagcgggagaagagtgcc

SEQ ID NO: 26404 - RNA, 20 nt, synthetic construct
  source 1..20: mol_type = other RNA
gctacagaaatacactcgag

SEQ ID NO: 26405 - RNA, 20 nt, synthetic construct
  source 1..20: mol_type = other RNA
ctcgagtgtatttctgtagc

SEQ ID NO: 26406 - RNA, 20 nt, synthetic construct
  source 1..20: mol_type = other RNA
tctcgagtgtatttctgtag

SEQ ID NO: 26407 - RNA, 20 nt, synthetic construct
  source 1..20: mol_type = other RNA
aaatacactcgagaggacta

SEQ ID NO: 26408 - RNA, 20 nt, synthetic construct
  source 1..20: mol_type = other RNA
tacactcgagaggactaagg

SEQ ID NO: 26409 - RNA, 20 nt, synthetic construct
  source 1..20: mol_type = other RNA
tgctcacccccttctattct

SEQ ID NO: 26410 - RNA, 20 nt, synthetic construct
  source 1..20: mol_type = other RNA
agaatagaagggggtgagca

SEQ ID NO: 26411 - RNA, 20 nt, synthetic construct
  source 1..20: mol_type = other RNA
tagaatagaagggggtgagc

SEQ ID NO: 26412 - RNA, 20 nt, synthetic construct
  source 1..20: mol_type = other RNA
tcttttcctagaatagaagg

SEQ ID NO: 26413 - RNA, 20 nt, synthetic construct
  source 1..20: mol_type = other RNA
ctcttttcctagaatagaag

SEQ ID NO: 26414 - RNA, 20 nt, synthetic construct
  source 1..20: mol_type = other RNA
tctcttttcctagaatagaa

SEQ ID NO: 26415 - RNA, 20 nt, synthetic construct
  source 1..20: mol_type = other RNA
ttctcttttcctagaataga

SEQ ID NO: 26416 - RNA, 20 nt, synthetic construct
  source 1..20: mol_type = other RNA
tatgtatagaacttagtgtc

SEQ ID NO: 26417 - RNA, 20 nt, synthetic construct
  source 1..20: mol_type = other RNA
acgtgacagaaagtgaaaaa

SEQ ID NO: 26418 - RNA, 20 nt, synthetic construct
  source 1..20: mol_type = other RNA
cgtgacagaaagtgaaaaaa

SEQ ID NO: 26419 - RNA, 20 nt, synthetic construct
  source 1..20: mol_type = other RNA
gtgacagaaagtgaaaaaag

SEQ ID NO: 26420 - RNA, 20 nt, synthetic construct
  source 1..20: mol_type = other RNA
ctgctttgcataaaaagatc

SEQ ID NO: 26421 - RNA, 20 nt, synthetic construct
  source 1..20: mol_type = other RNA
tgctttgcataaaaagatca

SEQ ID NO: 26422 - RNA, 20 nt, synthetic construct
  source 1..20: mol_type = other RNA
ttgcataaaaagatcaggga

SEQ ID NO: 26423 - RNA, 20 nt, synthetic construct
  source 1..20: mol_type = other RNA
gatcagggaaggcccctctg

SEQ ID NO: 26424 - RNA, 20 nt, synthetic construct
  source 1..20: mol_type = other RNA
caaatgtcagctcctcagag

SEQ ID NO: 26425 - RNA, 20 nt, synthetic construct
  source 1..20: mol_type = other RNA
tcaaatgtcagctcctcaga

SEQ ID NO: 26426 - RNA, 20 nt, synthetic construct
  source 1..20: mol_type = other RNA
ctcaaatgtcagctcctcag

SEQ ID NO: 26427 - RNA, 20 nt, synthetic construct
  source 1..20: mol_type = other RNA
gagctgagacttgatcgata

SEQ ID NO: 26428 - RNA, 20 nt, synthetic construct
  source 1..20: mol_type = other RNA
cgataaggaaaaaccagcca

SEQ ID NO: 26429 - RNA, 20 nt, synthetic construct
  source 1..20: mol_type = other RNA
gataaggaaaaaccagccat

SEQ ID NO: 26430 - RNA, 20 nt, synthetic construct
  source 1..20: mol_type = other RNA
aaaaccagccatgggaaaaa

SEQ ID NO: 26431 - RNA, 20 nt, synthetic construct
  source 1..20: mol_type = other RNA
aaaccagccatgggaaaaac

SEQ ID NO: 26432 - RNA, 20 nt, synthetic construct
  source 1..20: mol_type = other RNA
aaccagccatgggaaaaacg

SEQ ID NO: 26433 - RNA, 20 nt, synthetic construct
  source 1..20: mol_type = other RNA
ttccccgtttttcccatggc

SEQ ID NO: 26434 - RNA, 20 nt, synthetic construct
  source 1..20: mol_type = other RNA
atctttccccgtttttccca

SEQ ID NO: 26435 - RNA, 20 nt, synthetic construct
  source 1..20: mol_type = other RNA
aaaaacggggaaagatgtcc

SEQ ID NO: 26436 - RNA, 20 nt, synthetic construct
  source 1..20: mol_type = other RNA
aaaacggggaaagatgtcct

SEQ ID NO: 26437 - RNA, 20 nt, synthetic construct
  source 1..20: mol_type = other RNA
gggaaagatgtcctgggcag

SEQ ID NO: 26438 - RNA, 20 nt, synthetic construct
  source 1..20: mol_type = other RNA
ggaaagatgtcctgggcaga

SEQ ID NO: 26439 - RNA, 20 nt, synthetic construct
  source 1..20: mol_type = other RNA
acatgctgttccctctgccc

SEQ ID NO: 26440 - RNA, 20 nt, synthetic construct
  source 1..20: mol_type = other RNA
acagcatgtatgaaagccta

SEQ ID NO: 26441 - RNA, 20 nt, synthetic construct
  source 1..20: mol_type = other RNA
cctaaggatgagaacaagct

SEQ ID NO: 26442 - RNA, 20 nt, synthetic construct
  source 1..20: mol_type = other RNA
ccaagcttgttctcatcctt

SEQ ID NO: 26443 - RNA, 20 nt, synthetic construct
  source 1..20: mol_type = other RNA
tgagaacaagcttggcttgc

SEQ ID NO: 26444 - RNA, 20 nt, synthetic construct
  source 1..20: mol_type = other RNA
gaacaagcttggcttgctgg

SEQ ID NO: 26445 - RNA, 20 nt, synthetic construct
  source 1..20: mol_type = other RNA
aacaagcttggcttgctgga

SEQ ID NO: 26446 - RNA, 20 nt, synthetic construct
  source 1..20: mol_type = other RNA
acaagcttggcttgctggag

SEQ ID NO: 26447 - RNA, 20 nt, synthetic construct
  source 1..20: mol_type = other RNA
caagcttggcttgctggagg

SEQ ID NO: 26448 - RNA, 20 nt, synthetic construct
  source 1..20: mol_type = other RNA
cttgctggagggggaaaagc

SEQ ID NO: 26449 - RNA, 20 nt, synthetic construct
  source 1..20: mol_type = other RNA
gggggaaaagcaggccagca

SEQ ID NO: 26450 - RNA, 20 nt, synthetic construct
  source 1..20: mol_type = other RNA
atggtgtgaccaaatcacag

SEQ ID NO: 26451 - RNA, 20 nt, synthetic construct
  source 1..20: mol_type = other RNA
tggtgtgaccaaatcacagc

SEQ ID NO: 26452 - RNA, 20 nt, synthetic construct
  source 1..20: mol_type = other RNA
gaccaaatcacagcgggtac

SEQ ID NO: 26453 - RNA, 20 nt, synthetic construct
  source 1..20: mol_type = other RNA
ctcctgtacccgctgtgatt

SEQ ID NO: 26454 - RNA, 20 nt, synthetic construct
  source 1..20: mol_type = other RNA
aggagtaaaacagtaaccag

SEQ ID NO: 26455 - RNA, 20 nt, synthetic construct
  source 1..20: mol_type = other RNA
ggagtaaaacagtaaccagt

SEQ ID NO: 26456 - RNA, 20 nt, synthetic construct
  source 1..20: mol_type = other RNA
taaaacagtaaccagtgggt

SEQ ID NO: 26457 - RNA, 20 nt, synthetic construct
  source 1..20: mol_type = other RNA
aaccagtgggttggagagag

SEQ ID NO: 26458 - RNA, 20 nt, synthetic construct
  source 1..20: mol_type = other RNA
tgcctctctctccaacccac

SEQ ID NO: 26459 - RNA, 20 nt, synthetic construct
  source 1..20: mol_type = other RNA
gagagaggcagcgttgtagg

SEQ ID NO: 26460 - RNA, 20 nt, synthetic construct
  source 1..20: mol_type = other RNA
aacgctgcctctctcaaatc

SEQ ID NO: 26461 - RNA, 20 nt, synthetic construct
  source 1..20: mol_type = other RNA
ctgcctctctcaaatcaggt

SEQ ID NO: 26462 - RNA, 20 nt, synthetic construct
  source 1..20: mol_type = other RNA
aggccgacctgatttgagag

SEQ ID NO: 26463 - RNA, 20 nt, synthetic construct
  source 1..20: mol_type = other RNA
caggtcggcctgacccaacc

SEQ ID NO: 26464 - RNA, 20 nt, synthetic construct
  source 1..20: mol_type = other RNA
cctgacccaaccaggacatc

SEQ ID NO: 26465 - RNA, 20 nt, synthetic construct
  source 1..20: mol_type = other RNA
ctgacccaaccaggacatcc

SEQ ID NO: 26466 - RNA, 20 nt, synthetic construct
  source 1..20: mol_type = other RNA
ccggatgtcctggttgggtc

SEQ ID NO: 26467 - RNA, 20 nt, synthetic construct
  source 1..20: mol_type = other RNA
ggggcccggatgtcctggtt

SEQ ID NO: 26468 - RNA, 20 nt, synthetic construct
  source 1..20: mol_type = other RNA
tggggcccggatgtcctggt

SEQ ID NO: 26469 - RNA, 20 nt, synthetic construct
  source 1..20: mol_type = other RNA
acatccgggccccaagtcac

SEQ ID NO: 26470 - RNA, 20 nt, synthetic construct
  source 1..20: mol_type = other RNA
ccccaagtcacaggcagcac

SEQ ID NO: 26471 - RNA, 20 nt, synthetic construct
  source 1..20: mol_type = other RNA
cccaagtcacaggcagcact

SEQ ID NO: 26472 - RNA, 20 nt, synthetic construct
  source 1..20: mol_type = other RNA
ccaagtcacaggcagcactg

SEQ ID NO: 26473 - RNA, 20 nt, synthetic construct
  source 1..20: mol_type = other RNA
caagtcacaggcagcactgg

SEQ ID NO: 26474 - RNA, 20 nt, synthetic construct
  source 1..20: mol_type = other RNA
ccagtgctgcctgtgacttg

SEQ ID NO: 26475 - RNA, 20 nt, synthetic construct
  source 1..20: mol_type = other RNA
cccagtgctgcctgtgactt

SEQ ID NO: 26476 - RNA, 20 nt, synthetic construct
  source 1..20: mol_type = other RNA
ccccagtgctgcctgtgact

SEQ ID NO: 26477 - RNA, 20 nt, synthetic construct
  source 1..20: mol_type = other RNA
cacaggcagcactgggggta

SEQ ID NO: 26478 - RNA, 20 nt, synthetic construct
  source 1..20: mol_type = other RNA
acaggcagcactgggggtaa

SEQ ID NO: 26479 - RNA, 20 nt, synthetic construct
  source 1..20: mol_type = other RNA
actcagaccccacagcttcc

SEQ ID NO: 26480 - RNA, 20 nt, synthetic construct
  source 1..20: mol_type = other RNA
ctcagaccccacagcttcct

SEQ ID NO: 26481 - RNA, 20 nt, synthetic construct
  source 1..20: mol_type = other RNA
tcagaccccacagcttcctg

SEQ ID NO: 26482 - RNA, 20 nt, synthetic construct
  source 1..20: mol_type = other RNA
cggggccccaggaagctgtg

SEQ ID NO: 26483 - RNA, 20 nt, synthetic construct
  source 1..20: mol_type = other RNA
tcggggccccaggaagctgt

SEQ ID NO: 26484 - RNA, 20 nt, synthetic construct
  source 1..20: mol_type = other RNA
ttcggggccccaggaagctg

SEQ ID NO: 26485 - RNA, 20 nt, synthetic construct
  source 1..20: mol_type = other RNA
tcctggggccccgaaaaaac

SEQ ID NO: 26486 - RNA, 20 nt, synthetic construct
  source 1..20: mol_type = other RNA
tggggccccgaaaaaactgg

SEQ ID NO: 26487 - RNA, 20 nt, synthetic construct
  source 1..20: mol_type = other RNA
ggggccccgaaaaaactggt

SEQ ID NO: 26488 - RNA, 20 nt, synthetic construct
  source 1..20: mol_type = other RNA
gggccccgaaaaaactggtg

SEQ ID NO: 26489 - RNA, 20 nt, synthetic construct
  source 1..20: mol_type = other RNA
ggccccgaaaaaactggtgg

SEQ ID NO: 26490 - RNA, 20 nt, synthetic construct
  source 1..20: mol_type = other RNA
tacccccaccagttttttcg

SEQ ID NO: 26491 - RNA, 20 nt, synthetic construct
  source 1..20: mol_type = other RNA
aaaaactggtgggggtatcc

SEQ ID NO: 26492 - RNA, 20 nt, synthetic construct
  source 1..20: mol_type = other RNA
aaaactggtgggggtatcca

SEQ ID NO: 26493 - RNA, 20 nt, synthetic construct
  source 1..20: mol_type = other RNA
aaactggtgggggtatccag

SEQ ID NO: 26494 - RNA, 20 nt, synthetic construct
  source 1..20: mol_type = other RNA
tggtgggggtatccaggggc

SEQ ID NO: 26495 - RNA, 20 nt, synthetic construct
  source 1..20: mol_type = other RNA
tgaaggttgatgcctgcccc

SEQ ID NO: 26496 - RNA, 20 nt, synthetic construct
  source 1..20: mol_type = other RNA
tggcatggcactcatgctga

SEQ ID NO: 26497 - RNA, 20 nt, synthetic construct
  source 1..20: mol_type = other RNA
tgagtgccatgccataccca

SEQ ID NO: 26498 - RNA, 20 nt, synthetic construct
  source 1..20: mol_type = other RNA
ccatacccatggaacaccca

SEQ ID NO: 26499 - RNA, 20 nt, synthetic construct
  source 1..20: mol_type = other RNA
acccatggaacacccaaggc

SEQ ID NO: 26500 - RNA, 20 nt, synthetic construct
  source 1..20: mol_type = other RNA
cccatggaacacccaaggct

SEQ ID NO: 26501 - RNA, 20 nt, synthetic construct
  source 1..20: mol_type = other RNA
cccagccttgggtgttccat

SEQ ID NO: 26502 - RNA, 20 nt, synthetic construct
  source 1..20: mol_type = other RNA
tcccagccttgggtgttcca

SEQ ID NO: 26503 - RNA, 20 nt, synthetic construct
  source 1..20: mol_type = other RNA
ccaaggctgggagacaaacg

SEQ ID NO: 26504 - RNA, 20 nt, synthetic construct
  source 1..20: mol_type = other RNA
cacgtttgtctcccagcctt

SEQ ID NO: 26505 - RNA, 20 nt, synthetic construct
  source 1..20: mol_type = other RNA
ccacgtttgtctcccagcct

SEQ ID NO: 26506 - RNA, 20 nt, synthetic construct
  source 1..20: mol_type = other RNA
agaacactgcacactcccag

SEQ ID NO: 26507 - RNA, 20 nt, synthetic construct
  source 1..20: mol_type = other RNA
ctcccagcggcagcttccag

SEQ ID NO: 26508 - RNA, 20 nt, synthetic construct
  source 1..20: mol_type = other RNA
tcccagcggcagcttccaga

SEQ ID NO: 26509 - RNA, 20 nt, synthetic construct
  source 1..20: mol_type = other RNA
cccagcggcagcttccagag

SEQ ID NO: 26510 - RNA, 20 nt, synthetic construct
  source 1..20: mol_type = other RNA
cccctctggaagctgccgct

SEQ ID NO: 26511 - RNA, 20 nt, synthetic construct
  source 1..20: mol_type = other RNA
gcccctctggaagctgccgc

SEQ ID NO: 26512 - RNA, 20 nt, synthetic construct
  source 1..20: mol_type = other RNA
agcacgtgatcatgcccctc

SEQ ID NO: 26513 - RNA, 20 nt, synthetic construct
  source 1..20: mol_type = other RNA
gatcagggactggcacttca

SEQ ID NO: 26514 - RNA, 20 nt, synthetic construct
  source 1..20: mol_type = other RNA
ccctgatcacattattttcc

SEQ ID NO: 26515 - RNA, 20 nt, synthetic construct
  source 1..20: mol_type = other RNA
cctgatcacattattttccc

SEQ ID NO: 26516 - RNA, 20 nt, synthetic construct
  source 1..20: mol_type = other RNA
ccgggaaaataatgtgatca

SEQ ID NO: 26517 - RNA, 20 nt, synthetic construct
  source 1..20: mol_type = other RNA
cccgggaaaataatgtgatc

SEQ ID NO: 26518 - RNA, 20 nt, synthetic construct
  source 1..20: mol_type = other RNA
tattttcccgggacacagcc

SEQ ID NO: 26519 - RNA, 20 nt, synthetic construct
  source 1..20: mol_type = other RNA
tgctgtcctggctgtgtccc

SEQ ID NO: 26520 - RNA, 20 nt, synthetic construct
  source 1..20: mol_type = other RNA
ctgctgtcctggctgtgtcc

SEQ ID NO: 26521 - RNA, 20 nt, synthetic construct
  source 1..20: mol_type = other RNA
cacagccaggacagcagcct

SEQ ID NO: 26522 - RNA, 20 nt, synthetic construct
  source 1..20: mol_type = other RNA
ccaggacagcagccttggtc

SEQ ID NO: 26523 - RNA, 20 nt, synthetic construct
  source 1..20: mol_type = other RNA
caggacagcagccttggtca

SEQ ID NO: 26524 - RNA, 20 nt, synthetic construct
  source 1..20: mol_type = other RNA
aggacagcagccttggtcag

SEQ ID NO: 26525 - RNA, 20 nt, synthetic construct
  source 1..20: mol_type = other RNA
cctgaccaaggctgctgtcc

SEQ ID NO: 26526 - RNA, 20 nt, synthetic construct
  source 1..20: mol_type = other RNA
agcagccttggtcaggggaa

SEQ ID NO: 26527 - RNA, 20 nt, synthetic construct
  source 1..20: mol_type = other RNA
gcagccttggtcaggggaaa

SEQ ID NO: 26528 - RNA, 20 nt, synthetic construct
  source 1..20: mol_type = other RNA
ttggtcaggggaaagggaac

SEQ ID NO: 26529 - RNA, 20 nt, synthetic construct
  source 1..20: mol_type = other RNA
tggtcaggggaaagggaaca

SEQ ID NO: 26530 - RNA, 20 nt, synthetic construct
  source 1..20: mol_type = other RNA
tgttccctttcccctgacca

SEQ ID NO: 26531 - RNA, 20 nt, synthetic construct
  source 1..20: mol_type = other RNA
ggggaaagggaacagggtcc

SEQ ID NO: 26532 - RNA, 20 nt, synthetic construct
  source 1..20: mol_type = other RNA
gattcaagcgttgctagtct

SEQ ID NO: 26533 - RNA, 20 nt, synthetic construct
  source 1..20: mol_type = other RNA
attcaagcgttgctagtctt

SEQ ID NO: 26534 - RNA, 20 nt, synthetic construct
  source 1..20: mol_type = other RNA
gggaaagccttaaccttctc

SEQ ID NO: 26535 - RNA, 20 nt, synthetic construct
  source 1..20: mol_type = other RNA
ggaaagccttaaccttctct

SEQ ID NO: 26536 - RNA, 20 nt, synthetic construct
  source 1..20: mol_type = other RNA
ctgaggcccagagaaggtta

SEQ ID NO: 26537 - RNA, 20 nt, synthetic construct
  source 1..20: mol_type = other RNA
aggaaactgaggcccagaga

SEQ ID NO: 26538 - RNA, 20 nt, synthetic construct
  source 1..20: mol_type = other RNA
attttcagatgaggaaactg

SEQ ID NO: 26539 - RNA, 20 nt, synthetic construct
  source 1..20: mol_type = other RNA
caactcttaattttcagatg

SEQ ID NO: 26540 - RNA, 20 nt, synthetic construct
  source 1..20: mol_type = other RNA
gttgttagaaagattaagtg

SEQ ID NO: 26541 - RNA, 20 nt, synthetic construct
  source 1..20: mol_type = other RNA
ttagaaagattaagtgaggc

SEQ ID NO: 26542 - RNA, 20 nt, synthetic construct
  source 1..20: mol_type = other RNA
tagaaagattaagtgaggcc

SEQ ID NO: 26543 - RNA, 20 nt, synthetic construct
  source 1..20: mol_type = other RNA
aaagattaagtgaggccggg

SEQ ID NO: 26544 - RNA, 20 nt, synthetic construct
  source 1..20: mol_type = other RNA
aagattaagtgaggccgggc

SEQ ID NO: 26545 - RNA, 20 nt, synthetic construct
  source 1..20: mol_type = other RNA
agattaagtgaggccgggcg

SEQ ID NO: 26546 - RNA, 20 nt, synthetic construct
  source 1..20: mol_type = other RNA
ttaagtgaggccgggcgggg

SEQ ID NO: 26547 - RNA, 20 nt, synthetic construct
  source 1..20: mol_type = other RNA
caggtgtgagccgccccgcc

SEQ ID NO: 26548 - RNA, 20 nt, synthetic construct
  source 1..20: mol_type = other RNA
acctgtgatcccagcacttt

SEQ ID NO: 26549 - RNA, 20 nt, synthetic construct
  source 1..20: mol_type = other RNA
tgtgatcccagcactttagg

SEQ ID NO: 26550 - RNA, 20 nt, synthetic construct
  source 1..20: mol_type = other RNA
tcctaaagtgctgggatcac

SEQ ID NO: 26551 - RNA, 20 nt, synthetic construct
  source 1..20: mol_type = other RNA
agcactttaggaggctgaga

SEQ ID NO: 26552 - RNA, 20 nt, synthetic construct
  source 1..20: mol_type = other RNA
gcactttaggaggctgagac

SEQ ID NO: 26553 - RNA, 20 nt, synthetic construct
  source 1..20: mol_type = other RNA
tctcagcctcctaaagtgct

SEQ ID NO: 26554 - RNA, 20 nt, synthetic construct
  source 1..20: mol_type = other RNA
gtctcagcctcctaaagtgc

SEQ ID NO: 26555 - RNA, 20 nt, synthetic construct
  source 1..20: mol_type = other RNA
ctttaggaggctgagacggg

SEQ ID NO: 26556 - RNA, 20 nt, synthetic construct
  source 1..20: mol_type = other RNA
tgagacgggcggatcacttg

SEQ ID NO: 26557 - RNA, 20 nt, synthetic construct
  source 1..20: mol_type = other RNA
cgggcggatcacttgaggtc

SEQ ID NO: 26558 - RNA, 20 nt, synthetic construct
  source 1..20: mol_type = other RNA
tcaggagtttgagaccagcc

SEQ ID NO: 26559 - RNA, 20 nt, synthetic construct
  source 1..20: mol_type = other RNA
tgagaccagcctggccaaca

SEQ ID NO: 26560 - RNA, 20 nt, synthetic construct
  source 1..20: mol_type = other RNA
tttcaccatgttggccaggc

SEQ ID NO: 26561 - RNA, 20 nt, synthetic construct
  source 1..20: mol_type = other RNA
acagtttcaccatgttggcc

SEQ ID NO: 26562 - RNA, 20 nt, synthetic construct
  source 1..20: mol_type = other RNA
tagagacagtttcaccatgt

SEQ ID NO: 26563 - RNA, 20 nt, synthetic construct
  source 1..20: mol_type = other RNA
caaaatacaaaaaaattagc

SEQ ID NO: 26564 - RNA, 20 nt, synthetic construct
  source 1..20: mol_type = other RNA
aaaatacaaaaaaattagcc

SEQ ID NO: 26565 - RNA, 20 nt, synthetic construct
  source 1..20: mol_type = other RNA
aaatacaaaaaaattagccg

SEQ ID NO: 26566 - RNA, 20 nt, synthetic construct
  source 1..20: mol_type = other RNA
acaaaaaaattagccgggga

SEQ ID NO: 26567 - RNA, 20 nt, synthetic construct
  source 1..20: mol_type = other RNA
aaaaaattagccggggatgg

SEQ ID NO: 26568 - RNA, 20 nt, synthetic construct
  source 1..20: mol_type = other RNA
caggcactcgccaccatccc

SEQ ID NO: 26569 - RNA, 20 nt, synthetic construct
  source 1..20: mol_type = other RNA
tgcctgtaatcccagctact

SEQ ID NO: 26570 - RNA, 20 nt, synthetic construct
  source 1..20: mol_type = other RNA
gcctgtaatcccagctactc

SEQ ID NO: 26571 - RNA, 20 nt, synthetic construct
  source 1..20: mol_type = other RNA
tgtaatcccagctactcggg

SEQ ID NO: 26572 - RNA, 20 nt, synthetic construct
  source 1..20: mol_type = other RNA
tcccgagtagctgggattac

SEQ ID NO: 26573 - RNA, 20 nt, synthetic construct
  source 1..20: mol_type = other RNA
cccagctactcgggaggctg

SEQ ID NO: 26574 - RNA, 20 nt, synthetic construct
  source 1..20: mol_type = other RNA
gctactcgggaggctgaggt

SEQ ID NO: 26575 - RNA, 20 nt, synthetic construct
  source 1..20: mol_type = other RNA
cctcagcctcccgagtagct

SEQ ID NO: 26576 - RNA, 20 nt, synthetic construct
  source 1..20: mol_type = other RNA
acctcagcctcccgagtagc

SEQ ID NO: 26577 - RNA, 20 nt, synthetic construct
  source 1..20: mol_type = other RNA
gtaggagaatcgcttgaacc

SEQ ID NO: 26578 - RNA, 20 nt, synthetic construct
  source 1..20: mol_type = other RNA
taggagaatcgcttgaacct

SEQ ID NO: 26579 - RNA, 20 nt, synthetic construct
  source 1..20: mol_type = other RNA
gagaatcgcttgaacctggg

SEQ ID NO: 26580 - RNA, 20 nt, synthetic construct
  source 1..20: mol_type = other RNA
ctcacggcaacttgcctccc

SEQ ID NO: 26581 - RNA, 20 nt, synthetic construct
  source 1..20: mol_type = other RNA
agtggcacgatctcggctca

SEQ ID NO: 26582 - RNA, 20 nt, synthetic construct
  source 1..20: mol_type = other RNA
ggagtgcagtggcacgatct

SEQ ID NO: 26583 - RNA, 20 nt, synthetic construct
  source 1..20: mol_type = other RNA
cgtgccactgcactccagcc

SEQ ID NO: 26584 - RNA, 20 nt, synthetic construct
  source 1..20: mol_type = other RNA
gtgccactgcactccagcct

SEQ ID NO: 26585 - RNA, 20 nt, synthetic construct
  source 1..20: mol_type = other RNA
ttacccaggctggagtgcag

SEQ ID NO: 26586 - RNA, 20 nt, synthetic construct
  source 1..20: mol_type = other RNA
tctcactctgttacccaggc

SEQ ID NO: 26587 - RNA, 20 nt, synthetic construct
  source 1..20: mol_type = other RNA
agagtctcactctgttaccc

SEQ ID NO: 26588 - RNA, 20 nt, synthetic construct
  source 1..20: mol_type = other RNA
aaaaaagattaaatgagata

SEQ ID NO: 26589 - RNA, 20 nt, synthetic construct
  source 1..20: mol_type = other RNA
tgcacacaaatgtcctacag

SEQ ID NO: 26590 - RNA, 20 nt, synthetic construct
  source 1..20: mol_type = other RNA
aaggctgagctttccactgt

SEQ ID NO: 26591 - RNA, 20 nt, synthetic construct
  source 1..20: mol_type = other RNA
cttctggggatggagtatga

SEQ ID NO: 26592 - RNA, 20 nt, synthetic construct
  source 1..20: mol_type = other RNA
tccatccccagaagcactcc

SEQ ID NO: 26593 - RNA, 20 nt, synthetic construct
  source 1..20: mol_type = other RNA
tccaggagtgcttctgggga

SEQ ID NO: 26594 - RNA, 20 nt, synthetic construct
  source 1..20: mol_type = other RNA
agtttccaggagtgcttctg

SEQ ID NO: 26595 - RNA, 20 nt, synthetic construct
  source 1..20: mol_type = other RNA
gagtttccaggagtgcttct

SEQ ID NO: 26596 - RNA, 20 nt, synthetic construct
  source 1..20: mol_type = other RNA
tgagtttccaggagtgcttc

SEQ ID NO: 26597 - RNA, 20 nt, synthetic construct
  source 1..20: mol_type = other RNA
tgcaggatggatgagtttcc

SEQ ID NO: 26598 - RNA, 20 nt, synthetic construct
  source 1..20: mol_type = other RNA
atttgtgtgcatgtgcagga

SEQ ID NO: 26599 - RNA, 20 nt, synthetic construct
  source 1..20: mol_type = other RNA
aggcatttgtgtgcatgtgc

SEQ ID NO: 26600 - RNA, 20 nt, synthetic construct
  source 1..20: mol_type = other RNA
ttttgtatgcacattgttgg

SEQ ID NO: 26601 - RNA, 20 nt, synthetic construct
  source 1..20: mol_type = other RNA
atattttgtatgcacattgt

SEQ ID NO: 26602 - RNA, 20 nt, synthetic construct
  source 1..20: mol_type = other RNA
ttcaacagaaatagtatagt

SEQ ID NO: 26603 - RNA, 20 nt, synthetic construct
  source 1..20: mol_type = other RNA
aaatagtatagtaggaactc

SEQ ID NO: 26604 - RNA, 20 nt, synthetic construct
  source 1..20: mol_type = other RNA
cagatatgaactcaggcatt

SEQ ID NO: 26605 - RNA, 20 nt, synthetic construct
  source 1..20: mol_type = other RNA
gcaaagtcagatatgaactc

SEQ ID NO: 26606 - RNA, 20 nt, synthetic construct
  source 1..20: mol_type = other RNA
acctcaagctccaagtacct

SEQ ID NO: 26607 - RNA, 20 nt, synthetic construct
  source 1..20: mol_type = other RNA
accgaggtacttggagcttg

SEQ ID NO: 26608 - RNA, 20 nt, synthetic construct
  source 1..20: mol_type = other RNA
ctttaggaaaccgaggtact

SEQ ID NO: 26609 - RNA, 20 nt, synthetic construct
  source 1..20: mol_type = other RNA
cggtttcctaaagtataaaa

SEQ ID NO: 26610 - RNA, 20 nt, synthetic construct
  source 1..20: mol_type = other RNA
ttttatactttaggaaaccg

SEQ ID NO: 26611 - RNA, 20 nt, synthetic construct
  source 1..20: mol_type = other RNA
ttatctccattttatacttt

SEQ ID NO: 26612 - RNA, 20 nt, synthetic construct
  source 1..20: mol_type = other RNA
aagccggccggcccggagcg

SEQ ID NO: 26613 - RNA, 20 nt, synthetic construct
  source 1..20: mol_type = other RNA
taagccggccggcccggagc

SEQ ID NO: 26614 - RNA, 20 nt, synthetic construct
  source 1..20: mol_type = other RNA
gtaagccggccggcccggag

SEQ ID NO: 26615 - RNA, 20 nt, synthetic construct
  source 1..20: mol_type = other RNA
cgggccggccggcttacccg

SEQ ID NO: 26616 - RNA, 20 nt, synthetic construct
  source 1..20: mol_type = other RNA
ccggccggcttacccgagga

SEQ ID NO: 26617 - RNA, 20 nt, synthetic construct
  source 1..20: mol_type = other RNA
cggccggcttacccgaggac

SEQ ID NO: 26618 - RNA, 20 nt, synthetic construct
  source 1..20: mol_type = other RNA
ggccggcttacccgaggacg

SEQ ID NO: 26619 - RNA, 20 nt, synthetic construct
  source 1..20: mol_type = other RNA
ccgtcctcgggtaagccggc

SEQ ID NO: 26620 - RNA, 20 nt, synthetic construct
  source 1..20: mol_type = other RNA
ttacccgaggacggggagct

SEQ ID NO: 26621 - RNA, 20 nt, synthetic construct
  source 1..20: mol_type = other RNA
tacccgaggacggggagctt

SEQ ID NO: 26622 - RNA, 20 nt, synthetic construct
  source 1..20: mol_type = other RNA
acccgaggacggggagcttg

SEQ ID NO: 26623 - RNA, 20 nt, synthetic construct
  source 1..20: mol_type = other RNA
tccccaagctccccgtcctc

SEQ ID NO: 26624 - RNA, 20 nt, synthetic construct
  source 1..20: mol_type = other RNA
gtccccaagctccccgtcct

SEQ ID NO: 26625 - RNA, 20 nt, synthetic construct
  source 1..20: mol_type = other RNA
ggggctggacgcagcaagcg

SEQ ID NO: 26626 - RNA, 20 nt, synthetic construct
  source 1..20: mol_type = other RNA
cggggctggacgcagcaagc

SEQ ID NO: 26627 - RNA, 20 nt, synthetic construct
  source 1..20: mol_type = other RNA
tcggggctggacgcagcaag

SEQ ID NO: 26628 - RNA, 20 nt, synthetic construct
  source 1..20: mol_type = other RNA
ctgcgtccagccccgaatcc

SEQ ID NO: 26629 - RNA, 20 nt, synthetic construct
  source 1..20: mol_type = other RNA
tgcgtccagccccgaatcca

SEQ ID NO: 26630 - RNA, 20 nt, synthetic construct
  source 1..20: mol_type = other RNA
tccagccccgaatccaggga

SEQ ID NO: 26631 - RNA, 20 nt, synthetic construct
  source 1..20: mol_type = other RNA
ccagccccgaatccagggac

SEQ ID NO: 26632 - RNA, 20 nt, synthetic construct
  source 1..20: mol_type = other RNA
cagccccgaatccagggacg

SEQ ID NO: 26633 - RNA, 20 nt, synthetic construct
  source 1..20: mol_type = other RNA
cccgtccctggattcggggc

SEQ ID NO: 26634 - RNA, 20 nt, synthetic construct
  source 1..20: mol_type = other RNA
cgaatccagggacggggcag

SEQ ID NO: 26635 - RNA, 20 nt, synthetic construct
  source 1..20: mol_type = other RNA
ctgccccgtccctggattcg

SEQ ID NO: 26636 - RNA, 20 nt, synthetic construct
  source 1..20: mol_type = other RNA
gctgccccgtccctggattc

SEQ ID NO: 26637 - RNA, 20 nt, synthetic construct
  source 1..20: mol_type = other RNA
cgctgccccgtccctggatt

SEQ ID NO: 26638 - RNA, 20 nt, synthetic construct
  source 1..20: mol_type = other RNA
ccagggacggggcagcggcc

SEQ ID NO: 26639 - RNA, 20 nt, synthetic construct
  source 1..20: mol_type = other RNA
cagggacggggcagcggccc

SEQ ID NO: 26640 - RNA, 20 nt, synthetic construct
  source 1..20: mol_type = other RNA
ccgggccgctgccccgtccc

SEQ ID NO: 26641 - RNA, 20 nt, synthetic construct
  source 1..20: mol_type = other RNA
acggggcagcggcccgggca

SEQ ID NO: 26642 - RNA, 20 nt, synthetic construct
  source 1..20: mol_type = other RNA
cagcggcccgggcaaggctc

SEQ ID NO: 26643 - RNA, 20 nt, synthetic construct
  source 1..20: mol_type = other RNA
ggggggccggagccttgccc

SEQ ID NO: 26644 - RNA, 20 nt, synthetic construct
  source 1..20: mol_type = other RNA
cggggggccggagccttgcc

SEQ ID NO: 26645 - RNA, 20 nt, synthetic construct
  source 1..20: mol_type = other RNA
cggccccccgtagcactcct

SEQ ID NO: 26646 - RNA, 20 nt, synthetic construct
  source 1..20: mol_type = other RNA
ggccccccgtagcactccta

SEQ ID NO: 26647 - RNA, 20 nt, synthetic construct
  source 1..20: mol_type = other RNA
ctaggagtgctacggggggc

SEQ ID NO: 26648 - RNA, 20 nt, synthetic construct
  source 1..20: mol_type = other RNA
cgtagcactcctagggctcc

SEQ ID NO: 26649 - RNA, 20 nt, synthetic construct
  source 1..20: mol_type = other RNA
gagccctaggagtgctacgg

SEQ ID NO: 26650 - RNA, 20 nt, synthetic construct
  source 1..20: mol_type = other RNA
ggagccctaggagtgctacg

SEQ ID NO: 26651 - RNA, 20 nt, synthetic construct
  source 1..20: mol_type = other RNA
aggagccctaggagtgctac

SEQ ID NO: 26652 - RNA, 20 nt, synthetic construct
  source 1..20: mol_type = other RNA
gcactcctagggctcctgga

SEQ ID NO: 26653 - RNA, 20 nt, synthetic construct
  source 1..20: mol_type = other RNA
cactcctagggctcctggac

SEQ ID NO: 26654 - RNA, 20 nt, synthetic construct
  source 1..20: mol_type = other RNA
actcctagggctcctggacg

SEQ ID NO: 26655 - RNA, 20 nt, synthetic construct
  source 1..20: mol_type = other RNA
ctcctagggctcctggacgg

SEQ ID NO: 26656 - RNA, 20 nt, synthetic construct
  source 1..20: mol_type = other RNA
tagggctcctggacgggggc

SEQ ID NO: 26657 - RNA, 20 nt, synthetic construct
  source 1..20: mol_type = other RNA
agggctcctggacgggggca

SEQ ID NO: 26658 - RNA, 20 nt, synthetic construct
  source 1..20: mol_type = other RNA
tgcccccgtccaggagccct

SEQ ID NO: 26659 - RNA, 20 nt, synthetic construct
  source 1..20: mol_type = other RNA
ctggacgggggcagggcacc

SEQ ID NO: 26660 - RNA, 20 nt, synthetic construct
  source 1..20: mol_type = other RNA
tggacgggggcagggcaccc

SEQ ID NO: 26661 - RNA, 20 nt, synthetic construct
  source 1..20: mol_type = other RNA
cgggtgccctgcccccgtcc

SEQ ID NO: 26662 - RNA, 20 nt, synthetic construct
  source 1..20: mol_type = other RNA
ggggcagggcacccgggccg

SEQ ID NO: 26663 - RNA, 20 nt, synthetic construct
  source 1..20: mol_type = other RNA
gggcacccgggccgaggacg

SEQ ID NO: 26664 - RNA, 20 nt, synthetic construct
  source 1..20: mol_type = other RNA
ggccgaggacgaggaagtgc

SEQ ID NO: 26665 - RNA, 20 nt, synthetic construct
  source 1..20: mol_type = other RNA
gccgaggacgaggaagtgcc

SEQ ID NO: 26666 - RNA, 20 nt, synthetic construct
  source 1..20: mol_type = other RNA
ccgaggacgaggaagtgccg

SEQ ID NO: 26667 - RNA, 20 nt, synthetic construct
  source 1..20: mol_type = other RNA
cgaggacgaggaagtgccgg

SEQ ID NO: 26668 - RNA, 20 nt, synthetic construct
  source 1..20: mol_type = other RNA
ccccggcacttcctcgtcct

SEQ ID NO: 26669 - RNA, 20 nt, synthetic construct
  source 1..20: mol_type = other RNA
acgaggaagtgccgggggcc

SEQ ID NO: 26670 - RNA, 20 nt, synthetic construct
  source 1..20: mol_type = other RNA
ggaagtgccgggggcctggc

SEQ ID NO: 26671 - RNA, 20 nt, synthetic construct
  source 1..20: mol_type = other RNA
gaagtgccgggggcctggcc

SEQ ID NO: 26672 - RNA, 20 nt, synthetic construct
  source 1..20: mol_type = other RNA
gtgactagatgggggccggt

SEQ ID NO: 26673 - RNA, 20 nt, synthetic construct
  source 1..20: mol_type = other RNA
agtgactagatgggggccgg

SEQ ID NO: 26674 - RNA, 20 nt, synthetic construct
  source 1..20: mol_type = other RNA
cccccatctagtcactcacc

SEQ ID NO: 26675 - RNA, 20 nt, synthetic construct
  source 1..20: mol_type = other RNA
ccccatctagtcactcacct

SEQ ID NO: 26676 - RNA, 20 nt, synthetic construct
  source 1..20: mol_type = other RNA
cccatctagtcactcacctg

SEQ ID NO: 26677 - RNA, 20 nt, synthetic construct
  source 1..20: mol_type = other RNA
ccaggtgagtgactagatgg

SEQ ID NO: 26678 - RNA, 20 nt, synthetic construct
  source 1..20: mol_type = other RNA
tctagtcactcacctgggga

SEQ ID NO: 26679 - RNA, 20 nt, synthetic construct
  source 1..20: mol_type = other RNA
ctagtcactcacctggggaa

SEQ ID NO: 26680 - RNA, 20 nt, synthetic construct
  source 1..20: mol_type = other RNA
tccccaggtgagtgactaga

SEQ ID NO: 26681 - RNA, 20 nt, synthetic construct
  source 1..20: mol_type = other RNA
tcactcacctggggaagggc

SEQ ID NO: 26682 - RNA, 20 nt, synthetic construct
  source 1..20: mol_type = other RNA
gggaagggcaggagaatacg

SEQ ID NO: 26683 - RNA, 20 nt, synthetic construct
  source 1..20: mol_type = other RNA
ggaagggcaggagaatacga

SEQ ID NO: 26684 - RNA, 20 nt, synthetic construct
  source 1..20: mol_type = other RNA
aatacgagggtgtgtgcacc

SEQ ID NO: 26685 - RNA, 20 nt, synthetic construct
  source 1..20: mol_type = other RNA
atacgagggtgtgtgcacca

SEQ ID NO: 26686 - RNA, 20 nt, synthetic construct
  source 1..20: mol_type = other RNA
tacgagggtgtgtgcaccag

SEQ ID NO: 26687 - RNA, 20 nt, synthetic construct
  source 1..20: mol_type = other RNA
gagggtgtgtgcaccagggg

SEQ ID NO: 26688 - RNA, 20 nt, synthetic construct
  source 1..20: mol_type = other RNA
aggggcggctgtccctatga

SEQ ID NO: 26689 - RNA, 20 nt, synthetic construct
  source 1..20: mol_type = other RNA
ttcatagggacagccgcccc

SEQ ID NO: 26690 - RNA, 20 nt, synthetic construct
  source 1..20: mol_type = other RNA
ctgtccctatgaaggctcct

SEQ ID NO: 26691 - RNA, 20 nt, synthetic construct
  source 1..20: mol_type = other RNA
tgagccgaggagccttcata

SEQ ID NO: 26692 - RNA, 20 nt, synthetic construct
  source 1..20: mol_type = other RNA
gtgagccgaggagccttcat

SEQ ID NO: 26693 - RNA, 20 nt, synthetic construct
  source 1..20: mol_type = other RNA
tcggctcactgtgcttctgc

SEQ ID NO: 26694 - RNA, 20 nt, synthetic construct
  source 1..20: mol_type = other RNA
tgcagaagcacagtgagccg

SEQ ID NO: 26695 - RNA, 20 nt, synthetic construct
  source 1..20: mol_type = other RNA
ctcactgtgcttctgcagga

SEQ ID NO: 26696 - RNA, 20 nt, synthetic construct
  source 1..20: mol_type = other RNA
actgtgcttctgcaggaagg

SEQ ID NO: 26697 - RNA, 20 nt, synthetic construct
  source 1..20: mol_type = other RNA
ctgtgcttctgcaggaagga

SEQ ID NO: 26698 - RNA, 20 nt, synthetic construct
  source 1..20: mol_type = other RNA
gcttctgcaggaaggagggc

SEQ ID NO: 26699 - RNA, 20 nt, synthetic construct
  source 1..20: mol_type = other RNA
cttctgcaggaaggagggct

SEQ ID NO: 26700 - RNA, 20 nt, synthetic construct
  source 1..20: mol_type = other RNA
taggataggaacggggtggg

SEQ ID NO: 26701 - RNA, 20 nt, synthetic construct
  source 1..20: mol_type = other RNA
aggtaggataggaacggggt

SEQ ID NO: 26702 - RNA, 20 nt, synthetic construct
  source 1..20: mol_type = other RNA
caggtaggataggaacgggg

SEQ ID NO: 26703 - RNA, 20 nt, synthetic construct
  source 1..20: mol_type = other RNA
caacaggtaggataggaacg

SEQ ID NO: 26704 - RNA, 20 nt, synthetic construct
  source 1..20: mol_type = other RNA
gcaacaggtaggataggaac

SEQ ID NO: 26705 - RNA, 20 nt, synthetic construct
  source 1..20: mol_type = other RNA
ggcaacaggtaggataggaa

SEQ ID NO: 26706 - RNA, 20 nt, synthetic construct
  source 1..20: mol_type = other RNA
taagtggcaacaggtaggat

SEQ ID NO: 26707 - RNA, 20 nt, synthetic construct
  source 1..20: mol_type = other RNA
ctgttgccacttactctctg

SEQ ID NO: 26708 - RNA, 20 nt, synthetic construct
  source 1..20: mol_type = other RNA
ctcagagagtaagtggcaac

SEQ ID NO: 26709 - RNA, 20 nt, synthetic construct
  source 1..20: mol_type = other RNA
gagaagcctcagagagtaag

SEQ ID NO: 26710 - RNA, 20 nt, synthetic construct
  source 1..20: mol_type = other RNA
ttctccatccatagtgaaga

SEQ ID NO: 26711 - RNA, 20 nt, synthetic construct
  source 1..20: mol_type = other RNA
tctccatccatagtgaagaa

SEQ ID NO: 26712 - RNA, 20 nt, synthetic construct
  source 1..20: mol_type = other RNA
ctccatccatagtgaagaag

SEQ ID NO: 26713 - RNA, 20 nt, synthetic construct
  source 1..20: mol_type = other RNA
ggccccttcttcactatgga

SEQ ID NO: 26714 - RNA, 20 nt, synthetic construct
  source 1..20: mol_type = other RNA
agtgggccccttcttcacta

SEQ ID NO: 26715 - RNA, 20 nt, synthetic construct
  source 1..20: mol_type = other RNA
gaaggggcccactccttcct

SEQ ID NO: 26716 - RNA, 20 nt, synthetic construct
  source 1..20: mol_type = other RNA
gcatgcaccaaggaaggagt

SEQ ID NO: 26717 - RNA, 20 nt, synthetic construct
  source 1..20: mol_type = other RNA
ggcatgcaccaaggaaggag

SEQ ID NO: 26718 - RNA, 20 nt, synthetic construct
  source 1..20: mol_type = other RNA
gactcggcatgcaccaagga

SEQ ID NO: 26719 - RNA, 20 nt, synthetic construct
  source 1..20: mol_type = other RNA
ggtgcatgccgagtcacatt

SEQ ID NO: 26720 - RNA, 20 nt, synthetic construct
  source 1..20: mol_type = other RNA
atgtgactcggcatgcacca

SEQ ID NO: 26721 - RNA, 20 nt, synthetic construct
  source 1..20: mol_type = other RNA
tcacatttggatgtcaagta

SEQ ID NO: 26722 - RNA, 20 nt, synthetic construct
  source 1..20: mol_type = other RNA
gccttagaaaccgcagccca

SEQ ID NO: 26723 - RNA, 20 nt, synthetic construct
  source 1..20: mol_type = other RNA
tccttgggctgcggtttcta

SEQ ID NO: 26724 - RNA, 20 nt, synthetic construct
  source 1..20: mol_type = other RNA
gtgcagaattccttgggctg

SEQ ID NO: 26725 - RNA, 20 nt, synthetic construct
  source 1..20: mol_type = other RNA
ggaattctgcactgaccagc

SEQ ID NO: 26726 - RNA, 20 nt, synthetic construct
  source 1..20: mol_type = other RNA
ctggtcagtgcagaattcct

SEQ ID NO: 26727 - RNA, 20 nt, synthetic construct
  source 1..20: mol_type = other RNA
acttgttcaggatctccagc

SEQ ID NO: 26728 - RNA, 20 nt, synthetic construct
  source 1..20: mol_type = other RNA
gatgatgaggtgacttgttc

SEQ ID NO: 26729 - RNA, 20 nt, synthetic construct
  source 1..20: mol_type = other RNA
cactagggctcaggatgatg

SEQ ID NO: 26730 - RNA, 20 nt, synthetic construct
  source 1..20: mol_type = other RNA
gcaggagatcactagggctc

SEQ ID NO: 26731 - RNA, 20 nt, synthetic construct
  source 1..20: mol_type = other RNA
cattaagcaggagatcacta

SEQ ID NO: 26732 - RNA, 20 nt, synthetic construct
  source 1..20: mol_type = other RNA
tcattaagcaggagatcact

SEQ ID NO: 26733 - RNA, 20 nt, synthetic construct
  source 1..20: mol_type = other RNA
caaagcaggactcattaagc

SEQ ID NO: 26734 - RNA, 20 nt, synthetic construct
  source 1..20: mol_type = other RNA
tggcaggagtcaggcaaagc

SEQ ID NO: 26735 - RNA, 20 nt, synthetic construct
  source 1..20: mol_type = other RNA
gcctgactcctgccatttaa

SEQ ID NO: 26736 - RNA, 20 nt, synthetic construct
  source 1..20: mol_type = other RNA
accattaaatggcaggagtc

SEQ ID NO: 26737 - RNA, 20 nt, synthetic construct
  source 1..20: mol_type = other RNA
tttaattaccattaaatggc

SEQ ID NO: 26738 - RNA, 20 nt, synthetic construct
  source 1..20: mol_type = other RNA
ttattttaattaccattaaa

SEQ ID NO: 26739 - RNA, 20 nt, synthetic construct
  source 1..20: mol_type = other RNA
tggtaattaaaataaaatga

SEQ ID NO: 26740 - RNA, 20 nt, synthetic construct
  source 1..20: mol_type = other RNA
ggtaattaaaataaaatgat

SEQ ID NO: 26741 - RNA, 20 nt, synthetic construct
  source 1..20: mol_type = other RNA
attaaaataaaatgatgggc

SEQ ID NO: 26742 - RNA, 20 nt, synthetic construct
  source 1..20: mol_type = other RNA
aaaatgatgggccggcaccg

SEQ ID NO: 26743 - RNA, 20 nt, synthetic construct
  source 1..20: mol_type = other RNA
ataggcgtgagccacggtgc

SEQ ID NO: 26744 - RNA, 20 nt, synthetic construct
  source 1..20: mol_type = other RNA
tggctcacgcctattaatct

SEQ ID NO: 26745 - RNA, 20 nt, synthetic construct
  source 1..20: mol_type = other RNA
agattaataggcgtgagcca

SEQ ID NO: 26746 - RNA, 20 nt, synthetic construct
  source 1..20: mol_type = other RNA
attaatcttggcactatgtg

SEQ ID NO: 26747 - RNA, 20 nt, synthetic construct
  source 1..20: mol_type = other RNA
cacatagtgccaagattaat

SEQ ID NO: 26748 - RNA, 20 nt, synthetic construct
  source 1..20: mol_type = other RNA
ttggcactatgtgaggcctg

SEQ ID NO: 26749 - RNA, 20 nt, synthetic construct
  source 1..20: mol_type = other RNA
cactatgtgaggcctgaggc

SEQ ID NO: 26750 - RNA, 20 nt, synthetic construct
  source 1..20: mol_type = other RNA
cctgaggcaggcttaagcct

SEQ ID NO: 26751 - RNA, 20 nt, synthetic construct
  source 1..20: mol_type = other RNA
cctaggcttaagcctgcctc

SEQ ID NO: 26752 - RNA, 20 nt, synthetic construct
  source 1..20: mol_type = other RNA
caggctggtctcaaactcct

SEQ ID NO: 26753 - RNA, 20 nt, synthetic construct
  source 1..20: mol_type = other RNA
tgagaccagcctgtgcaaca

SEQ ID NO: 26754 - RNA, 20 nt, synthetic construct
  source 1..20: mol_type = other RNA
ttttaccatgttgcacaggc

SEQ ID NO: 26755 - RNA, 20 nt, synthetic construct
  source 1..20: mol_type = other RNA
gtgtttttaccatgttgcac

SEQ ID NO: 26756 - RNA, 20 nt, synthetic construct
  source 1..20: mol_type = other RNA
caaaaaatacaaaaactagc

SEQ ID NO: 26757 - RNA, 20 nt, synthetic construct
  source 1..20: mol_type = other RNA
aaaaaatacaaaaactagct

SEQ ID NO: 26758 - RNA, 20 nt, synthetic construct
  source 1..20: mol_type = other RNA
gctagtttttgtattttttg

SEQ ID NO: 26759 - RNA, 20 nt, synthetic construct
  source 1..20: mol_type = other RNA
atacaaaaactagctgggtg

SEQ ID NO: 26760 - RNA, 20 nt, synthetic construct
  source 1..20: mol_type = other RNA
caaaaactagctgggtgtgg

SEQ ID NO: 26761 - RNA, 20 nt, synthetic construct
  source 1..20: mol_type = other RNA
tgcctgtagtcccagctact

SEQ ID NO: 26762 - RNA, 20 nt, synthetic construct
  source 1..20: mol_type = other RNA
gcctgtagtcccagctactc

SEQ ID NO: 26763 - RNA, 20 nt, synthetic construct
  source 1..20: mol_type = other RNA
tgtagtcccagctactcggg

SEQ ID NO: 26764 - RNA, 20 nt, synthetic construct
  source 1..20: mol_type = other RNA
tcccgagtagctgggactac

SEQ ID NO: 26765 - RNA, 20 nt, synthetic construct
  source 1..20: mol_type = other RNA
cccagctactcgggaggctg

SEQ ID NO: 26766 - RNA, 20 nt, synthetic construct
  source 1..20: mol_type = other RNA
agctactcgggaggctgagg

SEQ ID NO: 26767 - RNA, 20 nt, synthetic construct
  source 1..20: mol_type = other RNA
gctactcgggaggctgaggt

SEQ ID NO: 26768 - RNA, 20 nt, synthetic construct
  source 1..20: mol_type = other RNA
cctcagcctcccgagtagct

SEQ ID NO: 26769 - RNA, 20 nt, synthetic construct
  source 1..20: mol_type = other RNA
acctcagcctcccgagtagc

SEQ ID NO: 26770 - RNA, 20 nt, synthetic construct
  source 1..20: mol_type = other RNA
tgggagaattgcttgagccc

SEQ ID NO: 26771 - RNA, 20 nt, synthetic construct
  source 1..20: mol_type = other RNA
gagaattgcttgagcccagg

SEQ ID NO: 26772 - RNA, 20 nt, synthetic construct
  source 1..20: mol_type = other RNA
tgcttgagcccaggaggttg

SEQ ID NO: 26773 - RNA, 20 nt, synthetic construct
  source 1..20: mol_type = other RNA
cactgcagcctcaacctcct

SEQ ID NO: 26774 - RNA, 20 nt, synthetic construct
  source 1..20: mol_type = other RNA
tcactgcagcctcaacctcc

SEQ ID NO: 26775 - RNA, 20 nt, synthetic construct
  source 1..20: mol_type = other RNA
gaggctgcagtgaaccatta

SEQ ID NO: 26776 - RNA, 20 nt, synthetic construct
  source 1..20: mol_type = other RNA
ggagtgcagtggcgccataa

SEQ ID NO: 26777 - RNA, 20 nt, synthetic construct
  source 1..20: mol_type = other RNA
ggcgccactgcactccagcc

SEQ ID NO: 26778 - RNA, 20 nt, synthetic construct
  source 1..20: mol_type = other RNA
gcgccactgcactccagcct

SEQ ID NO: 26779 - RNA, 20 nt, synthetic construct
  source 1..20: mol_type = other RNA
ttgcccaggctggagtgcag

SEQ ID NO: 26780 - RNA, 20 nt, synthetic construct
  source 1..20: mol_type = other RNA
tctcactctgttgcccaggc

SEQ ID NO: 26781 - RNA, 20 nt, synthetic construct
  source 1..20: mol_type = other RNA
agggtctcactctgttgccc

SEQ ID NO: 26782 - RNA, 20 nt, synthetic construct
  source 1..20: mol_type = other RNA
ttattatcatttttgagaca

SEQ ID NO: 26783 - RNA, 20 nt, synthetic construct
  source 1..20: mol_type = other RNA
tttattatcatttttgagac

SEQ ID NO: 26784 - RNA, 20 nt, synthetic construct
  source 1..20: mol_type = other RNA
aagcagtcagtagtttacaa

SEQ ID NO: 26785 - RNA, 20 nt, synthetic construct
  source 1..20: mol_type = other RNA
ttatcccctgaaaatatgcc

SEQ ID NO: 26786 - RNA, 20 nt, synthetic construct
  source 1..20: mol_type = other RNA
tatcccctgaaaatatgcct

SEQ ID NO: 26787 - RNA, 20 nt, synthetic construct
  source 1..20: mol_type = other RNA
atcccctgaaaatatgcctg

SEQ ID NO: 26788 - RNA, 20 nt, synthetic construct
  source 1..20: mol_type = other RNA
aggcatattttcaggggata

SEQ ID NO: 26789 - RNA, 20 nt, synthetic construct
  source 1..20: mol_type = other RNA
ccctgaaaatatgcctgggg

SEQ ID NO: 26790 - RNA, 20 nt, synthetic construct
  source 1..20: mol_type = other RNA
cctgaaaatatgcctgggga

SEQ ID NO: 26791 - RNA, 20 nt, synthetic construct
  source 1..20: mol_type = other RNA
ctgaaaatatgcctggggag

SEQ ID NO: 26792 - RNA, 20 nt, synthetic construct
  source 1..20: mol_type = other RNA
ctccccaggcatattttcag

SEQ ID NO: 26793 - RNA, 20 nt, synthetic construct
  source 1..20: mol_type = other RNA
cctccccaggcatattttca

SEQ ID NO: 26794 - RNA, 20 nt, synthetic construct
  source 1..20: mol_type = other RNA
ccctccccaggcatattttc

SEQ ID NO: 26795 - RNA, 20 nt, synthetic construct
  source 1..20: mol_type = other RNA
tgcctggggaggggatgaag

SEQ ID NO: 26796 - RNA, 20 nt, synthetic construct
  source 1..20: mol_type = other RNA
gcctggggaggggatgaaga

SEQ ID NO: 26797 - RNA, 20 nt, synthetic construct
  source 1..20: mol_type = other RNA
gccctcttcatcccctcccc

SEQ ID NO: 26798 - RNA, 20 nt, synthetic construct
  source 1..20: mol_type = other RNA
aggggatgaagagggccgtt

SEQ ID NO: 26799 - RNA, 20 nt, synthetic construct
  source 1..20: mol_type = other RNA
tgaagagggccgtttggatg

SEQ ID NO: 26800 - RNA, 20 nt, synthetic construct
  source 1..20: mol_type = other RNA
agggccgtttggatgaggtg

SEQ ID NO: 26801 - RNA, 20 nt, synthetic construct
  source 1..20: mol_type = other RNA
aaggccacacctcatccaaa

SEQ ID NO: 26802 - RNA, 20 nt, synthetic construct
  source 1..20: mol_type = other RNA
tggcctttcttcatcattcc

SEQ ID NO: 26803 - RNA, 20 nt, synthetic construct
  source 1..20: mol_type = other RNA
gaaccaggaatgatgaagaa

SEQ ID NO: 26804 - RNA, 20 nt, synthetic construct
  source 1..20: mol_type = other RNA
aatgaggaaactctggaacc

SEQ ID NO: 26805 - RNA, 20 nt, synthetic construct
  source 1..20: mol_type = other RNA
ccagagtttcctcattctta

SEQ ID NO: 26806 - RNA, 20 nt, synthetic construct
  source 1..20: mol_type = other RNA
ccataagaatgaggaaactc

SEQ ID NO: 26807 - RNA, 20 nt, synthetic construct
  source 1..20: mol_type = other RNA
cattcttatggtaacattta

SEQ ID NO: 26808 - RNA, 20 nt, synthetic construct
  source 1..20: mol_type = other RNA
taaatgttaccataagaatg

SEQ ID NO: 26809 - RNA, 20 nt, synthetic construct
  source 1..20: mol_type = other RNA
gtaacatttatggaccactg

SEQ ID NO: 26810 - RNA, 20 nt, synthetic construct
  source 1..20: mol_type = other RNA
gaccactgaggatacaagag

SEQ ID NO: 26811 - RNA, 20 nt, synthetic construct
  source 1..20: mol_type = other RNA
gtccactcttgtatcctcag

SEQ ID NO: 26812 - RNA, 20 nt, synthetic construct
  source 1..20: mol_type = other RNA
actctgagaaggcaggaagc

SEQ ID NO: 26813 - RNA, 20 nt, synthetic construct
  source 1..20: mol_type = other RNA
aactctgagaaggcaggaag

SEQ ID NO: 26814 - RNA, 20 nt, synthetic construct
  source 1..20: mol_type = other RNA
tctgtgaactctgagaaggc

SEQ ID NO: 26815 - RNA, 20 nt, synthetic construct
  source 1..20: mol_type = other RNA
ctcagagttcacagactctg

SEQ ID NO: 26816 - RNA, 20 nt, synthetic construct
  source 1..20: mol_type = other RNA
agagtctgtgaactctgaga

SEQ ID NO: 26817 - RNA, 20 nt, synthetic construct
  source 1..20: mol_type = other RNA
acagactctgaggagccata

SEQ ID NO: 26818 - RNA, 20 nt, synthetic construct
  source 1..20: mol_type = other RNA
cagactctgaggagccatat

SEQ ID NO: 26819 - RNA, 20 nt, synthetic construct
  source 1..20: mol_type = other RNA
agactctgaggagccatatg

SEQ ID NO: 26820 - RNA, 20 nt, synthetic construct
  source 1..20: mol_type = other RNA
tatatttaaatagccccata

SEQ ID NO: 26821 - RNA, 20 nt, synthetic construct
  source 1..20: mol_type = other RNA
aaatgcagcttgtgctactg

SEQ ID NO: 26822 - RNA, 20 nt, synthetic construct
  source 1..20: mol_type = other RNA
tctaatgtagtaggtgcatg

SEQ ID NO: 26823 - RNA, 20 nt, synthetic construct
  source 1..20: mol_type = other RNA
tgcatgtagtctaatgtagt

SEQ ID NO: 26824 - RNA, 20 nt, synthetic construct
  source 1..20: mol_type = other RNA
attattatagaaagttctat

SEQ ID NO: 26825 - RNA, 20 nt, synthetic construct
  source 1..20: mol_type = other RNA
aatagaactttctataataa

SEQ ID NO: 26826 - RNA, 20 nt, synthetic construct
  source 1..20: mol_type = other RNA
tctattggatagcactgctc

SEQ ID NO: 26827 - RNA, 20 nt, synthetic construct
  source 1..20: mol_type = other RNA
ctattggatagcactgctct

SEQ ID NO: 26828 - RNA, 20 nt, synthetic construct
  source 1..20: mol_type = other RNA
tattggatagcactgctctg

SEQ ID NO: 26829 - RNA, 20 nt, synthetic construct
  source 1..20: mol_type = other RNA
attggatagcactgctctgg

SEQ ID NO: 26830 - RNA, 20 nt, synthetic construct
  source 1..20: mol_type = other RNA
agcactgctctgggggctac

SEQ ID NO: 26831 - RNA, 20 nt, synthetic construct
  source 1..20: mol_type = other RNA
ctgggggctacaggtaaatg

SEQ ID NO: 26832 - RNA, 20 nt, synthetic construct
  source 1..20: mol_type = other RNA
ggggctacaggtaaatgagg

SEQ ID NO: 26833 - RNA, 20 nt, synthetic construct
  source 1..20: mol_type = other RNA
aggagattacaataaagtac

SEQ ID NO: 26834 - RNA, 20 nt, synthetic construct
  source 1..20: mol_type = other RNA
agtacaggaaagatgtgttt

SEQ ID NO: 26835 - RNA, 20 nt, synthetic construct
  source 1..20: mol_type = other RNA
caggaaagatgtgttttggc

SEQ ID NO: 26836 - RNA, 20 nt, synthetic construct
  source 1..20: mol_type = other RNA
tgttttggcaggagaaatgc

SEQ ID NO: 26837 - RNA, 20 nt, synthetic construct
  source 1..20: mol_type = other RNA
gttttggcaggagaaatgca

SEQ ID NO: 26838 - RNA, 20 nt, synthetic construct
  source 1..20: mol_type = other RNA
ttttggcaggagaaatgcag

SEQ ID NO: 26839 - RNA, 20 nt, synthetic construct
  source 1..20: mol_type = other RNA
tttggcaggagaaatgcagg

SEQ ID NO: 26840 - RNA, 20 nt, synthetic construct
  source 1..20: mol_type = other RNA
aggagaaatgcagggggctt

SEQ ID NO: 26841 - RNA, 20 nt, synthetic construct
  source 1..20: mol_type = other RNA
ggagaaatgcagggggcttt

SEQ ID NO: 26842 - RNA, 20 nt, synthetic construct
  source 1..20: mol_type = other RNA
tgcagggggctttgggagcc

SEQ ID NO: 26843 - RNA, 20 nt, synthetic construct
  source 1..20: mol_type = other RNA
agcctggacaaaagagtatc

SEQ ID NO: 26844 - RNA, 20 nt, synthetic construct
  source 1..20: mol_type = other RNA
ggacaaaagagtatctggtc

SEQ ID NO: 26845 - RNA, 20 nt, synthetic construct
  source 1..20: mol_type = other RNA
gaccagatactcttttgtcc

SEQ ID NO: 26846 - RNA, 20 nt, synthetic construct
  source 1..20: mol_type = other RNA
aagagtatctggtcaggata

SEQ ID NO: 26847 - RNA, 20 nt, synthetic construct
  source 1..20: mol_type = other RNA
agagtatctggtcaggatat

SEQ ID NO: 26848 - RNA, 20 nt, synthetic construct
  source 1..20: mol_type = other RNA
gagtatctggtcaggatatg

SEQ ID NO: 26849 - RNA, 20 nt, synthetic construct
  source 1..20: mol_type = other RNA
ctggtcaggatatggggatc

SEQ ID NO: 26850 - RNA, 20 nt, synthetic construct
  source 1..20: mol_type = other RNA
tggtcaggatatggggatct

SEQ ID NO: 26851 - RNA, 20 nt, synthetic construct
  source 1..20: mol_type = other RNA
ggggatctgggaagtcttcc

SEQ ID NO: 26852 - RNA, 20 nt, synthetic construct
  source 1..20: mol_type = other RNA
gatctgggaagtcttcctgg

SEQ ID NO: 26853 - RNA, 20 nt, synthetic construct
  source 1..20: mol_type = other RNA
gtttaggtgtcacttcctcc

SEQ ID NO: 26854 - RNA, 20 nt, synthetic construct
  source 1..20: mol_type = other RNA
ctactttcaggtctcagttt

SEQ ID NO: 26855 - RNA, 20 nt, synthetic construct
  source 1..20: mol_type = other RNA
cttctttcttggctactttc

SEQ ID NO: 26856 - RNA, 20 nt, synthetic construct
  source 1..20: mol_type = other RNA
agtagccaagaaagaagata

SEQ ID NO: 26857 - RNA, 20 nt, synthetic construct
  source 1..20: mol_type = other RNA
ctcttccttatcttctttct

SEQ ID NO: 26858 - RNA, 20 nt, synthetic construct
  source 1..20: mol_type = other RNA
aggaagagtgttctccacaa

SEQ ID NO: 26859 - RNA, 20 nt, synthetic construct
  source 1..20: mol_type = other RNA
ggaagagtgttctccacaaa

SEQ ID NO: 26860 - RNA, 20 nt, synthetic construct
  source 1..20: mol_type = other RNA
tgaatattctattccctttg

SEQ ID NO: 26861 - RNA, 20 nt, synthetic construct
  source 1..20: mol_type = other RNA
tactcagactgaacagttca

SEQ ID NO: 26862 - RNA, 20 nt, synthetic construct
  source 1..20: mol_type = other RNA
tgttcagtctgagtagacca

SEQ ID NO: 26863 - RNA, 20 nt, synthetic construct
  source 1..20: mol_type = other RNA
gttcagtctgagtagaccaa

SEQ ID NO: 26864 - RNA, 20 nt, synthetic construct
  source 1..20: mol_type = other RNA
tgagtagaccaagggatttg

SEQ ID NO: 26865 - RNA, 20 nt, synthetic construct
  source 1..20: mol_type = other RNA
ccaagggatttgaggcagac

SEQ ID NO: 26866 - RNA, 20 nt, synthetic construct
  source 1..20: mol_type = other RNA
caagggatttgaggcagact

SEQ ID NO: 26867 - RNA, 20 nt, synthetic construct
  source 1..20: mol_type = other RNA
aagggatttgaggcagactg

SEQ ID NO: 26868 - RNA, 20 nt, synthetic construct
  source 1..20: mol_type = other RNA
agggatttgaggcagactgg

SEQ ID NO: 26869 - RNA, 20 nt, synthetic construct
  source 1..20: mol_type = other RNA
ccagtctgcctcaaatccct

SEQ ID NO: 26870 - RNA, 20 nt, synthetic construct
  source 1..20: mol_type = other RNA
cagactgggggaagtgacag

SEQ ID NO: 26871 - RNA, 20 nt, synthetic construct
  source 1..20: mol_type = other RNA
ggaagtgacagaggtagacc

SEQ ID NO: 26872 - RNA, 20 nt, synthetic construct
  source 1..20: mol_type = other RNA
gtagacctggagaaataaac

SEQ ID NO: 26873 - RNA, 20 nt, synthetic construct
  source 1..20: mol_type = other RNA
ctggagaaataaacaggtcc

SEQ ID NO: 26874 - RNA, 20 nt, synthetic construct
  source 1..20: mol_type = other RNA
ctggacctgtttatttctcc

SEQ ID NO: 26875 - RNA, 20 nt, synthetic construct
  source 1..20: mol_type = other RNA
ataaacaggtccaggtcaca

SEQ ID NO: 26876 - RNA, 20 nt, synthetic construct
  source 1..20: mol_type = other RNA
taaacaggtccaggtcacaa

SEQ ID NO: 26877 - RNA, 20 nt, synthetic construct
  source 1..20: mol_type = other RNA
aaacaggtccaggtcacaag

SEQ ID NO: 26878 - RNA, 20 nt, synthetic construct
  source 1..20: mol_type = other RNA
gcatgtggccccttgtgacc

SEQ ID NO: 26879 - RNA, 20 nt, synthetic construct
  source 1..20: mol_type = other RNA
gggccacatgcagcctctgc

SEQ ID NO: 26880 - RNA, 20 nt, synthetic construct
  source 1..20: mol_type = other RNA
ccacatgcagcctctgcagg

SEQ ID NO: 26881 - RNA, 20 nt, synthetic construct
  source 1..20: mol_type = other RNA
tgcagcctctgcaggaggag

SEQ ID NO: 26882 - RNA, 20 nt, synthetic construct
  source 1..20: mol_type = other RNA
ttgctcctctcctcctgcag

SEQ ID NO: 26883 - RNA, 20 nt, synthetic construct
  source 1..20: mol_type = other RNA
aggaggagaggagcaataag

SEQ ID NO: 26884 - RNA, 20 nt, synthetic construct
  source 1..20: mol_type = other RNA
aggagaggagcaataagagg

SEQ ID NO: 26885 - RNA, 20 nt, synthetic construct
  source 1..20: mol_type = other RNA
ggagaggagcaataagaggt

SEQ ID NO: 26886 - RNA, 20 nt, synthetic construct
  source 1..20: mol_type = other RNA
gagaggagcaataagaggtg

SEQ ID NO: 26887 - RNA, 20 nt, synthetic construct
  source 1..20: mol_type = other RNA
agaggagcaataagaggtgg

SEQ ID NO: 26888 - RNA, 20 nt, synthetic construct
  source 1..20: mol_type = other RNA
ggagcaataagaggtggggg

SEQ ID NO: 26889 - RNA, 20 nt, synthetic construct
  source 1..20: mol_type = other RNA
ataagaggtgggggcggaga

SEQ ID NO: 26890 - RNA, 20 nt, synthetic construct
  source 1..20: mol_type = other RNA
taagaggtgggggcggagaa

SEQ ID NO: 26891 - RNA, 20 nt, synthetic construct
  source 1..20: mol_type = other RNA
tgcagttggatgggattcaa

SEQ ID NO: 26892 - RNA, 20 nt, synthetic construct
  source 1..20: mol_type = other RNA
gggcacagatgcagttggat

SEQ ID NO: 26893 - RNA, 20 nt, synthetic construct
  source 1..20: mol_type = other RNA
agggcacagatgcagttgga

SEQ ID NO: 26894 - RNA, 20 nt, synthetic construct
  source 1..20: mol_type = other RNA
ctgaagggcacagatgcagt

SEQ ID NO: 26895 - RNA, 20 nt, synthetic construct
  source 1..20: mol_type = other RNA
gcatctgtgcccttcagatc

SEQ ID NO: 26896 - RNA, 20 nt, synthetic construct
  source 1..20: mol_type = other RNA
cccttcagatcaggattaca

SEQ ID NO: 26897 - RNA, 20 nt, synthetic construct
  source 1..20: mol_type = other RNA
ccttcagatcaggattacac

SEQ ID NO: 26898 - RNA, 20 nt, synthetic construct
  source 1..20: mol_type = other RNA
cttcagatcaggattacacg

SEQ ID NO: 26899 - RNA, 20 nt, synthetic construct
  source 1..20: mol_type = other RNA
ccgtgtaatcctgatctgaa

SEQ ID NO: 26900 - RNA, 20 nt, synthetic construct
  source 1..20: mol_type = other RNA
cccgtgtaatcctgatctga

SEQ ID NO: 26901 - RNA, 20 nt, synthetic construct
  source 1..20: mol_type = other RNA
tgctaaatctcctagcccaa

SEQ ID NO: 26902 - RNA, 20 nt, synthetic construct
  source 1..20: mol_type = other RNA
taaagtgaggccattgggct

SEQ ID NO: 26903 - RNA, 20 nt, synthetic construct
  source 1..20: mol_type = other RNA
atggcctcactttacagaca

SEQ ID NO: 26904 - RNA, 20 nt, synthetic construct
  source 1..20: mol_type = other RNA
gtctgtaaagtgaggccatt

SEQ ID NO: 26905 - RNA, 20 nt, synthetic construct
  source 1..20: mol_type = other RNA
tgtctgtaaagtgaggccat

SEQ ID NO: 26906 - RNA, 20 nt, synthetic construct
  source 1..20: mol_type = other RNA
tcactttacagacaaggaag

SEQ ID NO: 26907 - RNA, 20 nt, synthetic construct
  source 1..20: mol_type = other RNA
ctttacagacaaggaagtgg

SEQ ID NO: 26908 - RNA, 20 nt, synthetic construct
  source 1..20: mol_type = other RNA
caaggaagtggaggccagac

SEQ ID NO: 26909 - RNA, 20 nt, synthetic construct
  source 1..20: mol_type = other RNA
aaggaagtggaggccagaca

SEQ ID NO: 26910 - RNA, 20 nt, synthetic construct
  source 1..20: mol_type = other RNA
aggaagtggaggccagacag

SEQ ID NO: 26911 - RNA, 20 nt, synthetic construct
  source 1..20: mol_type = other RNA
ggaaatttatttcccctgtc

SEQ ID NO: 26912 - RNA, 20 nt, synthetic construct
  source 1..20: mol_type = other RNA
atttccaagtgagtaaatag

SEQ ID NO: 26913 - RNA, 20 nt, synthetic construct
  source 1..20: mol_type = other RNA
tttccaagtgagtaaataga

SEQ ID NO: 26914 - RNA, 20 nt, synthetic construct
  source 1..20: mol_type = other RNA
agtccctctatttactcact

SEQ ID NO: 26915 - RNA, 20 nt, synthetic construct
  source 1..20: mol_type = other RNA
agagcactggactaggagtc

SEQ ID NO: 26916 - RNA, 20 nt, synthetic construct
  source 1..20: mol_type = other RNA
gtgggaaagagcactggact

SEQ ID NO: 26917 - RNA, 20 nt, synthetic construct
  source 1..20: mol_type = other RNA
tgtggtgtgggaaagagcac

SEQ ID NO: 26918 - DNA, 28 bp, synthetic construct
  source 1..28: mol_type = other DNA
gtcagaatgttgatcttcttcaacttgg

SEQ ID NO: 26919 - DNA, 28 bp, synthetic construct
  source 1..28: mol_type = other DNA
ccatgattcgtgcaaatagctatccagg

SEQ ID NO: 26920 - DNA, 28 bp, synthetic construct
  source 1..28: mol_type = other DNA
catgattcgtgcaaatagctatccaggg

SEQ ID NO: 26921 - DNA, 28 bp, synthetic construct
  source 1..28: mol_type = other DNA
attcgtgcaaatagctatccagggatgg

SEQ ID NO: 26922 - DNA, 28 bp, synthetic construct
  source 1..28: mol_type = other DNA
ccagggatggacagccaccctaatctgg

SEQ ID NO: 26923 - DNA, 28 bp, synthetic construct
  source 1..28: mol_type = other DNA
cagggatggacagccaccctaatctggg

SEQ ID NO: 26924 - DNA, 28 bp, synthetic construct
  source 1..28: mol_type = other DNA
ggacagccaccctaatctgggcttctgg

SEQ ID NO: 26925 - DNA, 28 bp, synthetic construct
  source 1..28: mol_type = other DNA
gtggtgccagaagcccagattagggtgg

SEQ ID NO: 26926 - DNA, 28 bp, synthetic construct
  source 1..28: mol_type = other DNA
ccctaatctgggcttctggcaccacagg

SEQ ID NO: 26927 - DNA, 28 bp, synthetic construct
  source 1..28: mol_type = other DNA
gcctgtggtgccagaagcccagattagg

SEQ ID NO: 26928 - DNA, 28 bp, synthetic construct
  source 1..28: mol_type = other DNA
ttctggcaccacaggcctccagctatgg

SEQ ID NO: 26929 - DNA, 28 bp, synthetic construct
  source 1..28: mol_type = other DNA
tctggcaccacaggcctccagctatggg

SEQ ID NO: 26930 - DNA, 28 bp, synthetic construct
  source 1..28: mol_type = other DNA
ctggcaccacaggcctccagctatgggg

SEQ ID NO: 26931 - DNA, 28 bp, synthetic construct
  source 1..28: mol_type = other DNA
ccacaggcctccagctatggggtccagg

SEQ ID NO: 26932 - DNA, 28 bp, synthetic construct
  source 1..28: mol_type = other DNA
cacaggcctccagctatggggtccaggg

SEQ ID NO: 26933 - DNA, 28 bp, synthetic construct
  source 1..28: mol_type = other DNA
ttcagaccctggaccccatagctggagg

SEQ ID NO: 26934 - DNA, 28 bp, synthetic construct
  source 1..28: mol_type = other DNA
aggttcagaccctggaccccatagctgg

SEQ ID NO: 26935 - DNA, 28 bp, synthetic construct
  source 1..28: mol_type = other DNA
ctatggggtccagggtctgaacctcagg

SEQ ID NO: 26936 - DNA, 28 bp, synthetic construct
  source 1..28: mol_type = other DNA
tatggggtccagggtctgaacctcaggg

SEQ ID NO: 26937 - DNA, 28 bp, synthetic construct
  source 1..28: mol_type = other DNA
ggtccagggtctgaacctcagggcctgg

SEQ ID NO: 26938 - DNA, 28 bp, synthetic construct
  source 1..28: mol_type = other DNA
ctgccaggccctgaggttcagaccctgg

SEQ ID NO: 26939 - DNA, 28 bp, synthetic construct
  source 1..28: mol_type = other DNA
ctgaacctcagggcctggcagcttcagg

SEQ ID NO: 26940 - DNA, 28 bp, synthetic construct
  source 1..28: mol_type = other DNA
acctcagggcctggcagcttcaggctgg

SEQ ID NO: 26941 - DNA, 28 bp, synthetic construct
  source 1..28: mol_type = other DNA
gccagcctgaagctgccaggccctgagg

SEQ ID NO: 26942 - DNA, 28 bp, synthetic construct
  source 1..28: mol_type = other DNA
cgaggggcgccagcctgaagctgccagg

SEQ ID NO: 26943 - DNA, 28 bp, synthetic construct
  source 1..28: mol_type = other DNA
ctggcagcttcaggctggcgcccctcgg

SEQ ID NO: 26944 - DNA, 28 bp, synthetic construct
  source 1..28: mol_type = other DNA
gcagcttcaggctggcgcccctcggcgg

SEQ ID NO: 26945 - DNA, 28 bp, synthetic construct
  source 1..28: mol_type = other DNA
tcaggctggcgcccctcggcggacgtgg

SEQ ID NO: 26946 - DNA, 28 bp, synthetic construct
  source 1..28: mol_type = other DNA
gctggcgcccctcggcggacgtggctgg

SEQ ID NO: 26947 - DNA, 28 bp, synthetic construct
  source 1..28: mol_type = other DNA
cgcccctcggcggacgtggctggcatgg

SEQ ID NO: 26948 - DNA, 28 bp, synthetic construct
  source 1..28: mol_type = other DNA
ggccatgccagccacgtccgccgagggg

SEQ ID NO: 26949 - DNA, 28 bp, synthetic construct
  source 1..28: mol_type = other DNA
aggccatgccagccacgtccgccgaggg

SEQ ID NO: 26950 - DNA, 28 bp, synthetic construct
  source 1..28: mol_type = other DNA
aaggccatgccagccacgtccgccgagg

SEQ ID NO: 26951 - DNA, 28 bp, synthetic construct
  source 1..28: mol_type = other DNA
tggcatggccttctcccatctgtgatgg

SEQ ID NO: 26952 - DNA, 28 bp, synthetic construct
  source 1..28: mol_type = other DNA
tgctgaagccatcacagatgggagaagg

SEQ ID NO: 26953 - DNA, 28 bp, synthetic construct
  source 1..28: mol_type = other DNA
tctcccatctgtgatggcttcagcaagg

SEQ ID NO: 26954 - DNA, 28 bp, synthetic construct
  source 1..28: mol_type = other DNA
tagccttgctgaagccatcacagatggg

SEQ ID NO: 26955 - DNA, 28 bp, synthetic construct
  source 1..28: mol_type = other DNA
gtagccttgctgaagccatcacagatgg

SEQ ID NO: 26956 - DNA, 28 bp, synthetic construct
  source 1..28: mol_type = other DNA
atggcttcagcaaggctactgtgagtgg

SEQ ID NO: 26957 - DNA, 28 bp, synthetic construct
  source 1..28: mol_type = other DNA
gcttcagcaaggctactgtgagtggtgg

SEQ ID NO: 26958 - DNA, 28 bp, synthetic construct
  source 1..28: mol_type = other DNA
tcagcaaggctactgtgagtggtggtgg

SEQ ID NO: 26959 - DNA, 28 bp, synthetic construct
  source 1..28: mol_type = other DNA
aaggctactgtgagtggtggtggagagg

SEQ ID NO: 26960 - DNA, 28 bp, synthetic construct
  source 1..28: mol_type = other DNA
aggctactgtgagtggtggtggagaggg

SEQ ID NO: 26961 - DNA, 28 bp, synthetic construct
  source 1..28: mol_type = other DNA
gagaatgatggatattctggctctgggg

SEQ ID NO: 26962 - DNA, 28 bp, synthetic construct
  source 1..28: mol_type = other DNA
agagaatgatggatattctggctctggg

SEQ ID NO: 26963 - DNA, 28 bp, synthetic construct
  source 1..28: mol_type = other DNA
aagagaatgatggatattctggctctgg

SEQ ID NO: 26964 - DNA, 28 bp, synthetic construct
  source 1..28: mol_type = other DNA
gaacagaagagaatgatggatattctgg

SEQ ID NO: 26965 - DNA, 28 bp, synthetic construct
  source 1..28: mol_type = other DNA
gaatatccatcattctcttctgttctgg

SEQ ID NO: 26966 - DNA, 28 bp, synthetic construct
  source 1..28: mol_type = other DNA
ttgtctccagaacagaagagaatgatgg

SEQ ID NO: 26967 - DNA, 28 bp, synthetic construct
  source 1..28: mol_type = other DNA
ctctgtgaggagctgtgggaagtgtggg

SEQ ID NO: 26968 - DNA, 28 bp, synthetic construct
  source 1..28: mol_type = other DNA
ccacacttcccacagctcctcacagagg

SEQ ID NO: 26969 - DNA, 28 bp, synthetic construct
  source 1..28: mol_type = other DNA
cacacttcccacagctcctcacagaggg

SEQ ID NO: 26970 - DNA, 28 bp, synthetic construct
  source 1..28: mol_type = other DNA
acacttcccacagctcctcacagagggg

SEQ ID NO: 26971 - DNA, 28 bp, synthetic construct
  source 1..28: mol_type = other DNA
ttcccacagctcctcacagaggggtagg

SEQ ID NO: 26972 - DNA, 28 bp, synthetic construct
  source 1..28: mol_type = other DNA
tcccacagctcctcacagaggggtaggg

SEQ ID NO: 26973 - DNA, 28 bp, synthetic construct
  source 1..28: mol_type = other DNA
cccacagctcctcacagaggggtagggg

SEQ ID NO: 26974 - DNA, 28 bp, synthetic construct
  source 1..28: mol_type = other DNA
acccctacccctctgtgaggagctgtgg

SEQ ID NO: 26975 - DNA, 28 bp, synthetic construct
  source 1..28: mol_type = other DNA
cctcacagaggggtaggggtgtgcgtgg

SEQ ID NO: 26976 - DNA, 28 bp, synthetic construct
  source 1..28: mol_type = other DNA
ctcacagaggggtaggggtgtgcgtggg

SEQ ID NO: 26977 - DNA, 28 bp, synthetic construct
  source 1..28: mol_type = other DNA
tcacagaggggtaggggtgtgcgtgggg

SEQ ID NO: 26978 - DNA, 28 bp, synthetic construct
  source 1..28: mol_type = other DNA
agaggggtaggggtgtgcgtggggcagg

SEQ ID NO: 26979 - DNA, 28 bp, synthetic construct
  source 1..28: mol_type = other DNA
taatttttgcttcaagctctgtagcagg

SEQ ID NO: 26980 - DNA, 28 bp, synthetic construct
  source 1..28: mol_type = other DNA
gcaaaaattaaacacacacacaaattgg

SEQ ID NO: 26981 - DNA, 28 bp, synthetic construct
  source 1..28: mol_type = other DNA
attaaacacacacacaaattggtcatgg

SEQ ID NO: 26982 - DNA, 28 bp, synthetic construct
  source 1..28: mol_type = other DNA
cacacaaattggtcatggcaactagagg

SEQ ID NO: 26983 - DNA, 28 bp, synthetic construct
  source 1..28: mol_type = other DNA
acacaaattggtcatggcaactagaggg

SEQ ID NO: 26984 - DNA, 28 bp, synthetic construct
  source 1..28: mol_type = other DNA
caactagagggcctgaaaccacttccgg

SEQ ID NO: 26985 - DNA, 28 bp, synthetic construct
  source 1..28: mol_type = other DNA
aactagagggcctgaaaccacttccggg

SEQ ID NO: 26986 - DNA, 28 bp, synthetic construct
  source 1..28: mol_type = other DNA
tagagggcctgaaaccacttccgggagg

SEQ ID NO: 26987 - DNA, 28 bp, synthetic construct
  source 1..28: mol_type = other DNA
ttcaaaacctcccggaagtggtttcagg

SEQ ID NO: 26988 - DNA, 28 bp, synthetic construct
  source 1..28: mol_type = other DNA
tgaaaccacttccgggaggttttgaagg

SEQ ID NO: 26989 - DNA, 28 bp, synthetic construct
  source 1..28: mol_type = other DNA
accacttccgggaggttttgaaggaagg

SEQ ID NO: 26990 - DNA, 28 bp, synthetic construct
  source 1..28: mol_type = other DNA
ccacttccgggaggttttgaaggaaggg

SEQ ID NO: 26991 - DNA, 28 bp, synthetic construct
  source 1..28: mol_type = other DNA
cacttccgggaggttttgaaggaagggg

SEQ ID NO: 26992 - DNA, 28 bp, synthetic construct
  source 1..28: mol_type = other DNA
acttccgggaggttttgaaggaaggggg

SEQ ID NO: 26993 - DNA, 28 bp, synthetic construct
  source 1..28: mol_type = other DNA
aagacccccttccttcaaaacctcccgg

SEQ ID NO: 26994 - DNA, 28 bp, synthetic construct
  source 1..28: mol_type = other DNA
gggaggttttgaaggaagggggtcttgg

SEQ ID NO: 26995 - DNA, 28 bp, synthetic construct
  source 1..28: mol_type = other DNA
ggggtcttggctgcctcccactcttagg

SEQ ID NO: 26996 - DNA, 28 bp, synthetic construct
  source 1..28: mol_type = other DNA
caggagcagcaatcctaagagtgggagg

SEQ ID NO: 26997 - DNA, 28 bp, synthetic construct
  source 1..28: mol_type = other DNA
ctcccactcttaggattgctgctcctgg

SEQ ID NO: 26998 - DNA, 28 bp, synthetic construct
  source 1..28: mol_type = other DNA
ctccaggagcagcaatcctaagagtggg

SEQ ID NO: 26999 - DNA, 28 bp, synthetic construct
  source 1..28: mol_type = other DNA
ccactcttaggattgctgctcctggagg

SEQ ID NO: 27000 - DNA, 28 bp, synthetic construct
  source 1..28: mol_type = other DNA
ttgctgctcctggaggcttctgcaacgg

SEQ ID NO: 27001 - DNA, 28 bp, synthetic construct
  source 1..28: mol_type = other DNA
tgctcctggaggcttctgcaacggatgg

SEQ ID NO: 27002 - DNA, 28 bp, synthetic construct
  source 1..28: mol_type = other DNA
tcctggaggcttctgcaacggatggtgg

SEQ ID NO: 27003 - DNA, 28 bp, synthetic construct
  source 1..28: mol_type = other DNA
cctggaggcttctgcaacggatggtggg

SEQ ID NO: 27004 - DNA, 28 bp, synthetic construct
  source 1..28: mol_type = other DNA
tctgcaacggatggtgggtcaaagccgg

SEQ ID NO: 27005 - DNA, 28 bp, synthetic construct
  source 1..28: mol_type = other DNA
acggatggtgggtcaaagccggatgagg

SEQ ID NO: 27006 - DNA, 28 bp, synthetic construct
  source 1..28: mol_type = other DNA
ctgctgagtggagagaggcctcatccgg

SEQ ID NO: 27007 - DNA, 28 bp, synthetic construct
  source 1..28: mol_type = other DNA
atgaggcctctctccactcagcagcagg

SEQ ID NO: 27008 - DNA, 28 bp, synthetic construct
  source 1..28: mol_type = other DNA
tgaggcctctctccactcagcagcaggg

SEQ ID NO: 27009 - DNA, 28 bp, synthetic construct
  source 1..28: mol_type = other DNA
gcctctctccactcagcagcagggaagg

SEQ ID NO: 27010 - DNA, 28 bp, synthetic construct
  source 1..28: mol_type = other DNA
tccttccctgctgctgagtggagagagg

SEQ ID NO: 27011 - DNA, 28 bp, synthetic construct
  source 1..28: mol_type = other DNA
gaaaaactccttccctgctgctgagtgg

SEQ ID NO: 27012 - DNA, 28 bp, synthetic construct
  source 1..28: mol_type = other DNA
catttgtactctgctgggagtgactggg

SEQ ID NO: 27013 - DNA, 28 bp, synthetic construct
  source 1..28: mol_type = other DNA
tcatttgtactctgctgggagtgactgg

SEQ ID NO: 27014 - DNA, 28 bp, synthetic construct
  source 1..28: mol_type = other DNA
agaaggctttcatttgtactctgctggg

SEQ ID NO: 27015 - DNA, 28 bp, synthetic construct
  source 1..28: mol_type = other DNA
cagaaggctttcatttgtactctgctgg

SEQ ID NO: 27016 - DNA, 28 bp, synthetic construct
  source 1..28: mol_type = other DNA
cagcagagtacaaatgaaagccttctgg

SEQ ID NO: 27017 - DNA, 28 bp, synthetic construct
  source 1..28: mol_type = other DNA
agcagagtacaaatgaaagccttctggg

SEQ ID NO: 27018 - DNA, 28 bp, synthetic construct
  source 1..28: mol_type = other DNA
agagtacaaatgaaagccttctgggtgg

SEQ ID NO: 27019 - DNA, 28 bp, synthetic construct
  source 1..28: mol_type = other DNA
caggactggggaggctccacccagaagg

SEQ ID NO: 27020 - DNA, 28 bp, synthetic construct
  source 1..28: mol_type = other DNA
aactgagctgtttacaggactggggagg

SEQ ID NO: 27021 - DNA, 28 bp, synthetic construct
  source 1..28: mol_type = other DNA
ctgaactgagctgtttacaggactgggg

SEQ ID NO: 27022 - DNA, 28 bp, synthetic construct
  source 1..28: mol_type = other DNA
cccagtcctgtaaacagctcagttcagg

SEQ ID NO: 27023 - DNA, 28 bp, synthetic construct
  source 1..28: mol_type = other DNA
ccagtcctgtaaacagctcagttcaggg

SEQ ID NO: 27024 - DNA, 28 bp, synthetic construct
  source 1..28: mol_type = other DNA
cctgtaaacagctcagttcagggactgg

SEQ ID NO: 27025 - DNA, 28 bp, synthetic construct
  source 1..28: mol_type = other DNA
tcagttcagggactggtgtacaagctgg

SEQ ID NO: 27026 - DNA, 28 bp, synthetic construct
  source 1..28: mol_type = other DNA
cagctggatgagaggctgagatgggtgg

SEQ ID NO: 27027 - DNA, 28 bp, synthetic construct
  source 1..28: mol_type = other DNA
cccatctcagcctctcatccagctgagg

SEQ ID NO: 27028 - DNA, 28 bp, synthetic construct
  source 1..28: mol_type = other DNA
gcctcagctggatgagaggctgagatgg

SEQ ID NO: 27029 - DNA, 28 bp, synthetic construct
  source 1..28: mol_type = other DNA
tcagcctctcatccagctgaggctctgg

SEQ ID NO: 27030 - DNA, 28 bp, synthetic construct
  source 1..28: mol_type = other DNA
gtggccagagcctcagctggatgagagg

SEQ ID NO: 27031 - DNA, 28 bp, synthetic construct
  source 1..28: mol_type = other DNA
tgcacggtgtggccagagcctcagctgg

SEQ ID NO: 27032 - DNA, 28 bp, synthetic construct
  source 1..28: mol_type = other DNA
tgaggctctggccacaccgtgcaagtgg

SEQ ID NO: 27033 - DNA, 28 bp, synthetic construct
  source 1..28: mol_type = other DNA
gaaactagaagccacttgcacggtgtgg

SEQ ID NO: 27034 - DNA, 28 bp, synthetic construct
  source 1..28: mol_type = other DNA
accgtgcaagtggcttctagtttcttgg

SEQ ID NO: 27035 - DNA, 28 bp, synthetic construct
  source 1..28: mol_type = other DNA
gccaagaaactagaagccacttgcacgg

SEQ ID NO: 27036 - DNA, 28 bp, synthetic construct
  source 1..28: mol_type = other DNA
agtttcttggcaatctgagatcagctgg

SEQ ID NO: 27037 - DNA, 28 bp, synthetic construct
  source 1..28: mol_type = other DNA
gagatcagctggctctgcaagatgaagg

SEQ ID NO: 27038 - DNA, 28 bp, synthetic construct
  source 1..28: mol_type = other DNA
atcagctggctctgcaagatgaaggtgg

SEQ ID NO: 27039 - DNA, 28 bp, synthetic construct
  source 1..28: mol_type = other DNA
gaaggtggagccaaatgacacaatctgg

SEQ ID NO: 27040 - DNA, 28 bp, synthetic construct
  source 1..28: mol_type = other DNA
ctcagtgagaccagattgtgtcatttgg

SEQ ID NO: 27041 - DNA, 28 bp, synthetic construct
  source 1..28: mol_type = other DNA
caaatgacacaatctggtctcactgagg

SEQ ID NO: 27042 - DNA, 28 bp, synthetic construct
  source 1..28: mol_type = other DNA
aatctggtctcactgaggcccctcacgg

SEQ ID NO: 27043 - DNA, 28 bp, synthetic construct
  source 1..28: mol_type = other DNA
actgaggcccctcacggtcattttttgg

SEQ ID NO: 27044 - DNA, 28 bp, synthetic construct
  source 1..28: mol_type = other DNA
agagtctccaaaaaatgaccgtgagggg

SEQ ID NO: 27045 - DNA, 28 bp, synthetic construct
  source 1..28: mol_type = other DNA
tagagtctccaaaaaatgaccgtgaggg

SEQ ID NO: 27046 - DNA, 28 bp, synthetic construct
  source 1..28: mol_type = other DNA
ttagagtctccaaaaaatgaccgtgagg

SEQ ID NO: 27047 - DNA, 28 bp, synthetic construct
  source 1..28: mol_type = other DNA
agactctaaataaacaaaaattttgagg

SEQ ID NO: 27048 - DNA, 28 bp, synthetic construct
  source 1..28: mol_type = other DNA
caggtgagcccctaatactgagtcttgg

SEQ ID NO: 27049 - DNA, 28 bp, synthetic construct
  source 1..28: mol_type = other DNA
caagactcagtattaggggctcacctgg

SEQ ID NO: 27050 - DNA, 28 bp, synthetic construct
  source 1..28: mol_type = other DNA
gtattaggggctcacctggttctgtagg

SEQ ID NO: 27051 - DNA, 28 bp, synthetic construct
  source 1..28: mol_type = other DNA
aggggctcacctggttctgtaggcctgg

SEQ ID NO: 27052 - DNA, 28 bp, synthetic construct
  source 1..28: mol_type = other DNA
tcacctggttctgtaggcctggctgtgg

SEQ ID NO: 27053 - DNA, 28 bp, synthetic construct
  source 1..28: mol_type = other DNA
cacctggttctgtaggcctggctgtggg

SEQ ID NO: 27054 - DNA, 28 bp, synthetic construct
  source 1..28: mol_type = other DNA
ctcccacagccaggcctacagaaccagg

SEQ ID NO: 27055 - DNA, 28 bp, synthetic construct
  source 1..28: mol_type = other DNA
ctggttctgtaggcctggctgtgggagg

SEQ ID NO: 27056 - DNA, 28 bp, synthetic construct
  source 1..28: mol_type = other DNA
tggttctgtaggcctggctgtgggaggg

SEQ ID NO: 27057 - DNA, 28 bp, synthetic construct
  source 1..28: mol_type = other DNA
cctggctgtgggagggtccatcacttgg

SEQ ID NO: 27058 - DNA, 28 bp, synthetic construct
  source 1..28: mol_type = other DNA
ctggctgtgggagggtccatcacttggg

SEQ ID NO: 27059 - DNA, 28 bp, synthetic construct
  source 1..28: mol_type = other DNA
ggtccatcacttgggagctctgatttgg

SEQ ID NO: 27060 - DNA, 28 bp, synthetic construct
  source 1..28: mol_type = other DNA
aatccaaatcagagctcccaagtgatgg

SEQ ID NO: 27061 - DNA, 28 bp, synthetic construct
  source 1..28: mol_type = other DNA
tgatttggatttcgaacccctccacagg

SEQ ID NO: 27062 - DNA, 28 bp, synthetic construct
  source 1..28: mol_type = other DNA
gatttggatttcgaacccctccacaggg

SEQ ID NO: 27063 - DNA, 28 bp, synthetic construct
  source 1..28: mol_type = other DNA
cgaacccctccacagggtagacgccagg

SEQ ID NO: 27064 - DNA, 28 bp, synthetic construct
  source 1..28: mol_type = other DNA
tacacctggcgtctaccctgtggagggg

SEQ ID NO: 27065 - DNA, 28 bp, synthetic construct
  source 1..28: mol_type = other DNA
atacacctggcgtctaccctgtggaggg

SEQ ID NO: 27066 - DNA, 28 bp, synthetic construct
  source 1..28: mol_type = other DNA
aatacacctggcgtctaccctgtggagg

SEQ ID NO: 27067 - DNA, 28 bp, synthetic construct
  source 1..28: mol_type = other DNA
cggaatacacctggcgtctaccctgtgg

SEQ ID NO: 27068 - DNA, 28 bp, synthetic construct
  source 1..28: mol_type = other DNA
cacagggtagacgccaggtgtattccgg

SEQ ID NO: 27069 - DNA, 28 bp, synthetic construct
  source 1..28: mol_type = other DNA
agttttgtcgcagccggaatacacctgg

SEQ ID NO: 27070 - DNA, 28 bp, synthetic construct
  source 1..28: mol_type = other DNA
aggtgtattccggctgcgacaaaactgg

SEQ ID NO: 27071 - DNA, 28 bp, synthetic construct
  source 1..28: mol_type = other DNA
tattaagcaccagttttgtcgcagccgg

SEQ ID NO: 27072 - DNA, 28 bp, synthetic construct
  source 1..28: mol_type = other DNA
aagggagggacacagactcaccagatgg

SEQ ID NO: 27073 - DNA, 28 bp, synthetic construct
  source 1..28: mol_type = other DNA
gggacacagactcaccagatggaagagg

SEQ ID NO: 27074 - DNA, 28 bp, synthetic construct
  source 1..28: mol_type = other DNA
ctcaccagatggaagaggcgcgagttgg

SEQ ID NO: 27075 - DNA, 28 bp, synthetic construct
  source 1..28: mol_type = other DNA
tcaccagatggaagaggcgcgagttggg

SEQ ID NO: 27076 - DNA, 28 bp, synthetic construct
  source 1..28: mol_type = other DNA
caccagatggaagaggcgcgagttgggg

SEQ ID NO: 27077 - DNA, 28 bp, synthetic construct
  source 1..28: mol_type = other DNA
ctccccaactcgcgcctcttccatctgg

SEQ ID NO: 27078 - DNA, 28 bp, synthetic construct
  source 1..28: mol_type = other DNA
gatggaagaggcgcgagttggggagtgg

SEQ ID NO: 27079 - DNA, 28 bp, synthetic construct
  source 1..28: mol_type = other DNA
atggaagaggcgcgagttggggagtggg

SEQ ID NO: 27080 - DNA, 28 bp, synthetic construct
  source 1..28: mol_type = other DNA
tggaagaggcgcgagttggggagtgggg

SEQ ID NO: 27081 - DNA, 28 bp, synthetic construct
  source 1..28: mol_type = other DNA
ggaagaggcgcgagttggggagtggggg

SEQ ID NO: 27082 - DNA, 28 bp, synthetic construct
  source 1..28: mol_type = other DNA
agaggcgcgagttggggagtgggggcgg

SEQ ID NO: 27083 - DNA, 28 bp, synthetic construct
  source 1..28: mol_type = other DNA
gaggcgcgagttggggagtgggggcggg

SEQ ID NO: 27084 - DNA, 28 bp, synthetic construct
  source 1..28: mol_type = other DNA
ttggggagtgggggcgggtgctccatgg

SEQ ID NO: 27085 - DNA, 28 bp, synthetic construct
  source 1..28: mol_type = other DNA
agtgggggcgggtgctccatggccatgg

SEQ ID NO: 27086 - DNA, 28 bp, synthetic construct
  source 1..28: mol_type = other DNA
gtgggggcgggtgctccatggccatggg

SEQ ID NO: 27087 - DNA, 28 bp, synthetic construct
  source 1..28: mol_type = other DNA
tgggggcgggtgctccatggccatgggg

SEQ ID NO: 27088 - DNA, 28 bp, synthetic construct
  source 1..28: mol_type = other DNA
gggggcgggtgctccatggccatggggg

SEQ ID NO: 27089 - DNA, 28 bp, synthetic construct
  source 1..28: mol_type = other DNA
ggggcgggtgctccatggccatgggggg

SEQ ID NO: 27090 - DNA, 28 bp, synthetic construct
  source 1..28: mol_type = other DNA
gcgggtgctccatggccatggggggagg

SEQ ID NO: 27091 - DNA, 28 bp, synthetic construct
  source 1..28: mol_type = other DNA
cgggtgctccatggccatggggggaggg

SEQ ID NO: 27092 - DNA, 28 bp, synthetic construct
  source 1..28: mol_type = other DNA
gggtgctccatggccatggggggagggg

SEQ ID NO: 27093 - DNA, 28 bp, synthetic construct
  source 1..28: mol_type = other DNA
ggtgctccatggccatggggggaggggg

SEQ ID NO: 27094 - DNA, 28 bp, synthetic construct
  source 1..28: mol_type = other DNA
gtgctccatggccatggggggagggggg

SEQ ID NO: 27095 - DNA, 28 bp, synthetic construct
  source 1..28: mol_type = other DNA
cgctacccccctccccccatggccatgg

SEQ ID NO: 27096 - DNA, 28 bp, synthetic construct
  source 1..28: mol_type = other DNA
catggccatggggggaggggggtagcgg

SEQ ID NO: 27097 - DNA, 28 bp, synthetic construct
  source 1..28: mol_type = other DNA
cagatccgctacccccctccccccatgg

SEQ ID NO: 27098 - DNA, 28 bp, synthetic construct
  source 1..28: mol_type = other DNA
catggggggaggggggtagcggatctgg

SEQ ID NO: 27099 - DNA, 28 bp, synthetic construct
  source 1..28: mol_type = other DNA
atggggggaggggggtagcggatctggg

SEQ ID NO: 27100 - DNA, 28 bp, synthetic construct
  source 1..28: mol_type = other DNA
gatctgggaccagtcctcgaagccatgg

SEQ ID NO: 27101 - DNA, 28 bp, synthetic construct
  source 1..28: mol_type = other DNA
gggaccagtcctcgaagccatggtgtgg

SEQ ID NO: 27102 - DNA, 28 bp, synthetic construct
  source 1..28: mol_type = other DNA
ggtgccacaccatggcttcgaggactgg

SEQ ID NO: 27103 - DNA, 28 bp, synthetic construct
  source 1..28: mol_type = other DNA
tcctcgaagccatggtgtggcaccatgg

SEQ ID NO: 27104 - DNA, 28 bp, synthetic construct
  source 1..28: mol_type = other DNA
gccatggtgccacaccatggcttcgagg

SEQ ID NO: 27105 - DNA, 28 bp, synthetic construct
  source 1..28: mol_type = other DNA
cgaagccatggtgtggcaccatggctgg

SEQ ID NO: 27106 - DNA, 28 bp, synthetic construct
  source 1..28: mol_type = other DNA
ccatggtgtggcaccatggctggcatgg

SEQ ID NO: 27107 - DNA, 28 bp, synthetic construct
  source 1..28: mol_type = other DNA
catggtgtggcaccatggctggcatggg

SEQ ID NO: 27108 - DNA, 28 bp, synthetic construct
  source 1..28: mol_type = other DNA
ggtgtggcaccatggctggcatgggcgg

SEQ ID NO: 27109 - DNA, 28 bp, synthetic construct
  source 1..28: mol_type = other DNA
gtgtggcaccatggctggcatgggcggg

SEQ ID NO: 27110 - DNA, 28 bp, synthetic construct
  source 1..28: mol_type = other DNA
ggcaccatggctggcatgggcgggtagg

SEQ ID NO: 27111 - DNA, 28 bp, synthetic construct
  source 1..28: mol_type = other DNA
tacgcctacccgcccatgccagccatgg

SEQ ID NO: 27112 - DNA, 28 bp, synthetic construct
  source 1..28: mol_type = other DNA
atggctggcatgggcgggtaggcgtagg

SEQ ID NO: 27113 - DNA, 28 bp, synthetic construct
  source 1..28: mol_type = other DNA
tggctggcatgggcgggtaggcgtaggg

SEQ ID NO: 27114 - DNA, 28 bp, synthetic construct
  source 1..28: mol_type = other DNA
ggctggcatgggcgggtaggcgtagggg

SEQ ID NO: 27115 - DNA, 28 bp, synthetic construct
  source 1..28: mol_type = other DNA
ggcatgggcgggtaggcgtaggggtagg

SEQ ID NO: 27116 - DNA, 28 bp, synthetic construct
  source 1..28: mol_type = other DNA
aggggtaggccccgcagagatgttctgg

SEQ ID NO: 27117 - DNA, 28 bp, synthetic construct
  source 1..28: mol_type = other DNA
ggggtaggccccgcagagatgttctggg

SEQ ID NO: 27118 - DNA, 28 bp, synthetic construct
  source 1..28: mol_type = other DNA
gtaggccccgcagagatgttctgggtgg

SEQ ID NO: 27119 - DNA, 28 bp, synthetic construct
  source 1..28: mol_type = other DNA
taggccccgcagagatgttctgggtggg

SEQ ID NO: 27120 - DNA, 28 bp, synthetic construct
  source 1..28: mol_type = other DNA
aggccccgcagagatgttctgggtgggg

SEQ ID NO: 27121 - DNA, 28 bp, synthetic construct
  source 1..28: mol_type = other DNA
gagccccacccagaacatctctgcgggg

SEQ ID NO: 27122 - DNA, 28 bp, synthetic construct
  source 1..28: mol_type = other DNA
ggagccccacccagaacatctctgcggg

SEQ ID NO: 27123 - DNA, 28 bp, synthetic construct
  source 1..28: mol_type = other DNA
tggagccccacccagaacatctctgcgg

SEQ ID NO: 27124 - DNA, 28 bp, synthetic construct
  source 1..28: mol_type = other DNA
gagatgttctgggtggggctccacatgg

SEQ ID NO: 27125 - DNA, 28 bp, synthetic construct
  source 1..28: mol_type = other DNA
ggctccacatggtaacgctctcctgagg

SEQ ID NO: 27126 - DNA, 28 bp, synthetic construct
  source 1..28: mol_type = other DNA
caggcctcaggagagcgttaccatgtgg

SEQ ID NO: 27127 - DNA, 28 bp, synthetic construct
  source 1..28: mol_type = other DNA
aacgctctcctgaggcctgcaagaaagg

SEQ ID NO: 27128 - DNA, 28 bp, synthetic construct
  source 1..28: mol_type = other DNA
gacgtcagcctttcttgcaggcctcagg

SEQ ID NO: 27129 - DNA, 28 bp, synthetic construct
  source 1..28: mol_type = other DNA
gaggcctgcaagaaaggctgacgtctgg

SEQ ID NO: 27130 - DNA, 28 bp, synthetic construct
  source 1..28: mol_type = other DNA
aaagccagacgtcagcctttcttgcagg

SEQ ID NO: 27131 - DNA, 28 bp, synthetic construct
  source 1..28: mol_type = other DNA
aagcaaaggtgaggaggcttgagggagg

SEQ ID NO: 27132 - DNA, 28 bp, synthetic construct
  source 1..28: mol_type = other DNA
ggaaagcaaaggtgaggaggcttgaggg

SEQ ID NO: 27133 - DNA, 28 bp, synthetic construct
  source 1..28: mol_type = other DNA
aggaaagcaaaggtgaggaggcttgagg

SEQ ID NO: 27134 - DNA, 28 bp, synthetic construct
  source 1..28: mol_type = other DNA
gcagaagaggaaagcaaaggtgaggagg

SEQ ID NO: 27135 - DNA, 28 bp, synthetic construct
  source 1..28: mol_type = other DNA
acagcagaagaggaaagcaaaggtgagg

SEQ ID NO: 27136 - DNA, 28 bp, synthetic construct
  source 1..28: mol_type = other DNA
ctcagacagcagaagaggaaagcaaagg

SEQ ID NO: 27137 - DNA, 28 bp, synthetic construct
  source 1..28: mol_type = other DNA
ctttgctttcctcttctgctgtctgagg

SEQ ID NO: 27138 - DNA, 28 bp, synthetic construct
  source 1..28: mol_type = other DNA
tttgctttcctcttctgctgtctgaggg

SEQ ID NO: 27139 - DNA, 28 bp, synthetic construct
  source 1..28: mol_type = other DNA
aagagaagccctcagacagcagaagagg

SEQ ID NO: 27140 - DNA, 28 bp, synthetic construct
  source 1..28: mol_type = other DNA
ctaaaagcattcaaagatgaggagaagg

SEQ ID NO: 27141 - DNA, 28 bp, synthetic construct
  source 1..28: mol_type = other DNA
tctcagctaaaagcattcaaagatgagg

SEQ ID NO: 27142 - DNA, 28 bp, synthetic construct
  source 1..28: mol_type = other DNA
ttgaatgcttttagctgagagaagaagg

SEQ ID NO: 27143 - DNA, 28 bp, synthetic construct
  source 1..28: mol_type = other DNA
tgaatgcttttagctgagagaagaaggg

SEQ ID NO: 27144 - DNA, 28 bp, synthetic construct
  source 1..28: mol_type = other DNA
atgcttttagctgagagaagaagggagg

SEQ ID NO: 27145 - DNA, 28 bp, synthetic construct
  source 1..28: mol_type = other DNA
tgcttttagctgagagaagaagggaggg

SEQ ID NO: 27146 - DNA, 28 bp, synthetic construct
  source 1..28: mol_type = other DNA
aggtaagagtgactggacccaggaaggg

SEQ ID NO: 27147 - DNA, 28 bp, synthetic construct
  source 1..28: mol_type = other DNA
caggtaagagtgactggacccaggaagg

SEQ ID NO: 27148 - DNA, 28 bp, synthetic construct
  source 1..28: mol_type = other DNA
cttcctgggtccagtcactcttacctgg

SEQ ID NO: 27149 - DNA, 28 bp, synthetic construct
  source 1..28: mol_type = other DNA
ttcctgggtccagtcactcttacctggg

SEQ ID NO: 27150 - DNA, 28 bp, synthetic construct
  source 1..28: mol_type = other DNA
tgcccaggtaagagtgactggacccagg

SEQ ID NO: 27151 - DNA, 28 bp, synthetic construct
  source 1..28: mol_type = other DNA
tgtcaaatgcccaggtaagagtgactgg

SEQ ID NO: 27152 - DNA, 28 bp, synthetic construct
  source 1..28: mol_type = other DNA
agtcactcttacctgggcatttgacagg

SEQ ID NO: 27153 - DNA, 28 bp, synthetic construct
  source 1..28: mol_type = other DNA
gtcactcttacctgggcatttgacaggg

SEQ ID NO: 27154 - DNA, 28 bp, synthetic construct
  source 1..28: mol_type = other DNA
tacctgggcatttgacagggtgacctgg

SEQ ID NO: 27155 - DNA, 28 bp, synthetic construct
  source 1..28: mol_type = other DNA
acctgggcatttgacagggtgacctggg

SEQ ID NO: 27156 - DNA, 28 bp, synthetic construct
  source 1..28: mol_type = other DNA
gcccaggtcaccctgtcaaatgcccagg

SEQ ID NO: 27157 - DNA, 28 bp, synthetic construct
  source 1..28: mol_type = other DNA
aagcaagtggagaagctgcaggcccagg

SEQ ID NO: 27158 - DNA, 28 bp, synthetic construct
  source 1..28: mol_type = other DNA
ctgaagaagcaagtggagaagctgcagg

SEQ ID NO: 27159 - DNA, 28 bp, synthetic construct
  source 1..28: mol_type = other DNA
gagaaggaagagctgaagaagcaagtgg

SEQ ID NO: 27160 - DNA, 28 bp, synthetic construct
  source 1..28: mol_type = other DNA
gatcgtgagcgcatgaatgaggagaagg

SEQ ID NO: 27161 - DNA, 28 bp, synthetic construct
  source 1..28: mol_type = other DNA
cgcagtgatcgtgagcgcatgaatgagg

SEQ ID NO: 27162 - DNA, 28 bp, synthetic construct
  source 1..28: mol_type = other DNA
gcgctcacgatcactgcgctccctctgg

SEQ ID NO: 27163 - DNA, 28 bp, synthetic construct
  source 1..28: mol_type = other DNA
aagatcttcgaggaggacttccagaggg

SEQ ID NO: 27164 - DNA, 28 bp, synthetic construct
  source 1..28: mol_type = other DNA
gaagatcttcgaggaggacttccagagg

SEQ ID NO: 27165 - DNA, 28 bp, synthetic construct
  source 1..28: mol_type = other DNA
gaagtcctcctcgaagatcttcacctgg

SEQ ID NO: 27166 - DNA, 28 bp, synthetic construct
  source 1..28: mol_type = other DNA
cctcctcgaagatcttcacctggtgtgg

SEQ ID NO: 27167 - DNA, 28 bp, synthetic construct
  source 1..28: mol_type = other DNA
cctcgaagatcttcacctggtgtggagg

SEQ ID NO: 27168 - DNA, 28 bp, synthetic construct
  source 1..28: mol_type = other DNA
ctcgaagatcttcacctggtgtggaggg

SEQ ID NO: 27169 - DNA, 28 bp, synthetic construct
  source 1..28: mol_type = other DNA
gaagatcttcacctggtgtggagggagg

SEQ ID NO: 27170 - DNA, 28 bp, synthetic construct
  source 1..28: mol_type = other DNA
aagatcttcacctggtgtggagggaggg

SEQ ID NO: 27171 - DNA, 28 bp, synthetic construct
  source 1..28: mol_type = other DNA
cctggtgtggagggagggtgaagagagg

SEQ ID NO: 27172 - DNA, 28 bp, synthetic construct
  source 1..28: mol_type = other DNA
caggtgaggcttccgggaggaaatcagg

SEQ ID NO: 27173 - DNA, 28 bp, synthetic construct
  source 1..28: mol_type = other DNA
tgaaacagcaggtgaggcttccgggagg

SEQ ID NO: 27174 - DNA, 28 bp, synthetic construct
  source 1..28: mol_type = other DNA
tgctgaaacagcaggtgaggcttccggg

SEQ ID NO: 27175 - DNA, 28 bp, synthetic construct
  source 1..28: mol_type = other DNA
ttgctgaaacagcaggtgaggcttccgg

SEQ ID NO: 27176 - DNA, 28 bp, synthetic construct
  source 1..28: mol_type = other DNA
gaatgagttgctgaaacagcaggtgagg

SEQ ID NO: 27177 - DNA, 28 bp, synthetic construct
  source 1..28: mol_type = other DNA
acgcagaatgagttgctgaaacagcagg

SEQ ID NO: 27178 - DNA, 28 bp, synthetic construct
  source 1..28: mol_type = other DNA
ctgcgtgaccagctcctgtttccttagg

SEQ ID NO: 27179 - DNA, 28 bp, synthetic construct
  source 1..28: mol_type = other DNA
cgtgaccagctcctgtttccttaggagg

SEQ ID NO: 27180 - DNA, 28 bp, synthetic construct
  source 1..28: mol_type = other DNA
gtgaccagctcctgtttccttaggaggg

SEQ ID NO: 27181 - DNA, 28 bp, synthetic construct
  source 1..28: mol_type = other DNA
ggggccctcctaaggaaacaggagctgg

SEQ ID NO: 27182 - DNA, 28 bp, synthetic construct
  source 1..28: mol_type = other DNA
ggagcaggggccctcctaaggaaacagg

SEQ ID NO: 27183 - DNA, 28 bp, synthetic construct
  source 1..28: mol_type = other DNA
tccttaggagggcccctgctccttctgg

SEQ ID NO: 27184 - DNA, 28 bp, synthetic construct
  source 1..28: mol_type = other DNA
ccttaggagggcccctgctccttctggg

SEQ ID NO: 27185 - DNA, 28 bp, synthetic construct
  source 1..28: mol_type = other DNA
gcatttgggagcccagaaggagcagggg

SEQ ID NO: 27186 - DNA, 28 bp, synthetic construct
  source 1..28: mol_type = other DNA
agcatttgggagcccagaaggagcaggg

SEQ ID NO: 27187 - DNA, 28 bp, synthetic construct
  source 1..28: mol_type = other DNA
cagcatttgggagcccagaaggagcagg

SEQ ID NO: 27188 - DNA, 28 bp, synthetic construct
  source 1..28: mol_type = other DNA
ctccttctgggctcccaaatgctgttgg

SEQ ID NO: 27189 - DNA, 28 bp, synthetic construct
  source 1..28: mol_type = other DNA
caccaacagcatttgggagcccagaagg

SEQ ID NO: 27190 - DNA, 28 bp, synthetic construct
  source 1..28: mol_type = other DNA
cttctgggctcccaaatgctgttggtgg

SEQ ID NO: 27191 - DNA, 28 bp, synthetic construct
  source 1..28: mol_type = other DNA
tcccaaatgctgttggtggagatgatgg

SEQ ID NO: 27192 - DNA, 28 bp, synthetic construct
  source 1..28: mol_type = other DNA
gccatcatctccaccaacagcatttggg

SEQ ID NO: 27193 - DNA, 28 bp, synthetic construct
  source 1..28: mol_type = other DNA
cgccatcatctccaccaacagcatttgg

SEQ ID NO: 27194 - DNA, 28 bp, synthetic construct
  source 1..28: mol_type = other DNA
caaatgctgttggtggagatgatggcgg

SEQ ID NO: 27195 - DNA, 28 bp, synthetic construct
  source 1..28: mol_type = other DNA
aaatgctgttggtggagatgatggcggg

SEQ ID NO: 27196 - DNA, 28 bp, synthetic construct
  source 1..28: mol_type = other DNA
aatgctgttggtggagatgatggcgggg

SEQ ID NO: 27197 - DNA, 28 bp, synthetic construct
  source 1..28: mol_type = other DNA
tgttggtggagatgatggcggggtttgg

SEQ ID NO: 27198 - DNA, 28 bp, synthetic construct
  source 1..28: mol_type = other DNA
ggtttggatgctcagtgcttcctccagg

SEQ ID NO: 27199 - DNA, 28 bp, synthetic construct
  source 1..28: mol_type = other DNA
gtttggatgctcagtgcttcctccaggg

SEQ ID NO: 27200 - DNA, 28 bp, synthetic construct
  source 1..28: mol_type = other DNA
gatgctcagtgcttcctccagggcctgg

SEQ ID NO: 27201 - DNA, 28 bp, synthetic construct
  source 1..28: mol_type = other DNA
agtgcttcctccagggcctggaatcagg

SEQ ID NO: 27202 - DNA, 28 bp, synthetic construct
  source 1..28: mol_type = other DNA
atcttttcctgattccaggccctggagg

SEQ ID NO: 27203 - DNA, 28 bp, synthetic construct
  source 1..28: mol_type = other DNA
tccagggcctggaatcaggaaaagatgg

SEQ ID NO: 27204 - DNA, 28 bp, synthetic construct
  source 1..28: mol_type = other DNA
ccagggcctggaatcaggaaaagatggg

SEQ ID NO: 27205 - DNA, 28 bp, synthetic construct
  source 1..28: mol_type = other DNA
gatggtcccatcttttcctgattccagg

SEQ ID NO: 27206 - DNA, 28 bp, synthetic construct
  source 1..28: mol_type = other DNA
ggtgggtgccttggcccgggtcccttgg

SEQ ID NO: 27207 - DNA, 28 bp, synthetic construct
  source 1..28: mol_type = other DNA
ctcaacaaggtgggtgccttggcccggg

SEQ ID NO: 27208 - DNA, 28 bp, synthetic construct
  source 1..28: mol_type = other DNA
gctcaacaaggtgggtgccttggcccgg

SEQ ID NO: 27209 - DNA, 28 bp, synthetic construct
  source 1..28: mol_type = other DNA
cagcggctcaacaaggtgggtgccttgg

SEQ ID NO: 27210 - DNA, 28 bp, synthetic construct
  source 1..28: mol_type = other DNA
caaggcacccaccttgttgagccgctgg

SEQ ID NO: 27211 - DNA, 28 bp, synthetic construct
  source 1..28: mol_type = other DNA
aggagatccagcggctcaacaaggtggg

SEQ ID NO: 27212 - DNA, 28 bp, synthetic construct
  source 1..28: mol_type = other DNA
aaggagatccagcggctcaacaaggtgg

SEQ ID NO: 27213 - DNA, 28 bp, synthetic construct
  source 1..28: mol_type = other DNA
gaaaaggagatccagcggctcaacaagg

SEQ ID NO: 27214 - DNA, 28 bp, synthetic construct
  source 1..28: mol_type = other DNA
gttgagccgctggatctccttttcctgg

SEQ ID NO: 27215 - DNA, 28 bp, synthetic construct
  source 1..28: mol_type = other DNA
tgagtaccaggaaaaggagatccagcgg

SEQ ID NO: 27216 - DNA, 28 bp, synthetic construct
  source 1..28: mol_type = other DNA
ctccttttcctggtactcacgctgtcgg

SEQ ID NO: 27217 - DNA, 28 bp, synthetic construct
  source 1..28: mol_type = other DNA
tccttttcctggtactcacgctgtcggg

SEQ ID NO: 27218 - DNA, 28 bp, synthetic construct
  source 1..28: mol_type = other DNA
acccgacagcgtgagtaccaggaaaagg

SEQ ID NO: 27219 - DNA, 28 bp, synthetic construct
  source 1..28: mol_type = other DNA
cctggtactcacgctgtcgggtgagtgg

SEQ ID NO: 27220 - DNA, 28 bp, synthetic construct
  source 1..28: mol_type = other DNA
ctggtactcacgctgtcgggtgagtggg

SEQ ID NO: 27221 - DNA, 28 bp, synthetic construct
  source 1..28: mol_type = other DNA
ggtgagtgggctcagctgatcctgcagg

SEQ ID NO: 27222 - DNA, 28 bp, synthetic construct
  source 1..28: mol_type = other DNA
ctgatcctgcaggtacttgaccttttgg

SEQ ID NO: 27223 - DNA, 28 bp, synthetic construct
  source 1..28: mol_type = other DNA
ctgcgccaaaaggtcaagtacctgcagg

SEQ ID NO: 27224 - DNA, 28 bp, synthetic construct
  source 1..28: mol_type = other DNA
tacttgaccttttggcgcagctccttgg

SEQ ID NO: 27225 - DNA, 28 bp, synthetic construct
  source 1..28: mol_type = other DNA
gcagaggccaaggagctgcgccaaaagg

SEQ ID NO: 27226 - DNA, 28 bp, synthetic construct
  source 1..28: mol_type = other DNA
aaggagcagctgacagcagaggccaagg

SEQ ID NO: 27227 - DNA, 28 bp, synthetic construct
  source 1..28: mol_type = other DNA
gcctctgctgtcagctgctccttgtcgg

SEQ ID NO: 27228 - DNA, 28 bp, synthetic construct
  source 1..28: mol_type = other DNA
accgacaaggagcagctgacagcagagg

SEQ ID NO: 27229 - DNA, 28 bp, synthetic construct
  source 1..28: mol_type = other DNA
tgtcagctgctccttgtcggtctgcagg

SEQ ID NO: 27230 - DNA, 28 bp, synthetic construct
  source 1..28: mol_type = other DNA
gtcagctgctccttgtcggtctgcaggg

SEQ ID NO: 27231 - DNA, 28 bp, synthetic construct
  source 1..28: mol_type = other DNA
tccttgtcggtctgcagggaatacaagg

SEQ ID NO: 27232 - DNA, 28 bp, synthetic construct
  source 1..28: mol_type = other DNA
accttgtattccctgcagaccgacaagg

SEQ ID NO: 27233 - DNA, 28 bp, synthetic construct
  source 1..28: mol_type = other DNA
tgtcggtctgcagggaatacaaggttgg

SEQ ID NO: 27234 - DNA, 28 bp, synthetic construct
  source 1..28: mol_type = other DNA
aaatggaggaggcaagtgtgactgctgg

SEQ ID NO: 27235 - DNA, 28 bp, synthetic construct
  source 1..28: mol_type = other DNA
acacttgcctcctccatttcaatcttgg

SEQ ID NO: 27236 - DNA, 28 bp, synthetic construct
  source 1..28: mol_type = other DNA
gcctcctccatttcaatcttggacttgg

SEQ ID NO: 27237 - DNA, 28 bp, synthetic construct
  source 1..28: mol_type = other DNA
gccaagtccaagattgaaatggaggagg

SEQ ID NO: 27238 - DNA, 28 bp, synthetic construct
  source 1..28: mol_type = other DNA
ctggccaagtccaagattgaaatggagg

SEQ ID NO: 27239 - DNA, 28 bp, synthetic construct
  source 1..28: mol_type = other DNA
ctccatttcaatcttggacttggccagg

SEQ ID NO: 27240 - DNA, 28 bp, synthetic construct
  source 1..28: mol_type = other DNA
ctcctggccaagtccaagattgaaatgg

SEQ ID NO: 27241 - DNA, 28 bp, synthetic construct
  source 1..28: mol_type = other DNA
catttcaatcttggacttggccaggagg

SEQ ID NO: 27242 - DNA, 28 bp, synthetic construct
  source 1..28: mol_type = other DNA
cttggacttggccaggaggagcttgcgg

SEQ ID NO: 27243 - DNA, 28 bp, synthetic construct
  source 1..28: mol_type = other DNA
cgtgactttgaccgcaagctcctcctgg

SEQ ID NO: 27244 - DNA, 28 bp, synthetic construct
  source 1..28: mol_type = other DNA
aagtcacgctgcttctgctcccgctcgg

SEQ ID NO: 27245 - DNA, 28 bp, synthetic construct
  source 1..28: mol_type = other DNA
ctgcttctgctcccgctcggcctccagg

SEQ ID NO: 27246 - DNA, 28 bp, synthetic construct
  source 1..28: mol_type = other DNA
caggtgactgacctggaggccgagcggg

SEQ ID NO: 27247 - DNA, 28 bp, synthetic construct
  source 1..28: mol_type = other DNA
gcaggtgactgacctggaggccgagcgg

SEQ ID NO: 27248 - DNA, 28 bp, synthetic construct
  source 1..28: mol_type = other DNA
ttgcagaagcaggtgactgacctggagg

SEQ ID NO: 27249 - DNA, 28 bp, synthetic construct
  source 1..28: mol_type = other DNA
gatttgcagaagcaggtgactgacctgg

SEQ ID NO: 27250 - DNA, 28 bp, synthetic construct
  source 1..28: mol_type = other DNA
cagaagctggctgatttgcagaagcagg

SEQ ID NO: 27251 - DNA, 28 bp, synthetic construct
  source 1..28: mol_type = other DNA
cagatcactgagctgcgtcagaagctgg

SEQ ID NO: 27252 - DNA, 28 bp, synthetic construct
  source 1..28: mol_type = other DNA
cagcttctgacgcagctcagtgatctgg

SEQ ID NO: 27253 - DNA, 28 bp, synthetic construct
  source 1..28: mol_type = other DNA
agcttctgacgcagctcagtgatctggg

SEQ ID NO: 27254 - DNA, 28 bp, synthetic construct
  source 1..28: mol_type = other DNA
acgcagctcagtgatctgggttcagagg

SEQ ID NO: 27255 - DNA, 28 bp, synthetic construct
  source 1..28: mol_type = other DNA
cagtgatctgggttcagaggcagagagg

SEQ ID NO: 27256 - DNA, 28 bp, synthetic construct
  source 1..28: mol_type = other DNA
tgagcagaaggtaatgtggggttcctgg

SEQ ID NO: 27257 - DNA, 28 bp, synthetic construct
  source 1..28: mol_type = other DNA
agcagtatgagcagaaggtaatgtgggg

SEQ ID NO: 27258 - DNA, 28 bp, synthetic construct
  source 1..28: mol_type = other DNA
cagcagtatgagcagaaggtaatgtggg

SEQ ID NO: 27259 - DNA, 28 bp, synthetic construct
  source 1..28: mol_type = other DNA
gcagcagtatgagcagaaggtaatgtgg

SEQ ID NO: 27260 - DNA, 28 bp, synthetic construct
  source 1..28: mol_type = other DNA
accttctgctcatactgctgcttcatgg

SEQ ID NO: 27261 - DNA, 28 bp, synthetic construct
  source 1..28: mol_type = other DNA
tccatgaagcagcagtatgagcagaagg

SEQ ID NO: 27262 - DNA, 28 bp, synthetic construct
  source 1..28: mol_type = other DNA
ctgctcatactgctgcttcatggaccgg

SEQ ID NO: 27263 - DNA, 28 bp, synthetic construct
  source 1..28: mol_type = other DNA
ctgctgcttcatggaccggaaatgctgg

SEQ ID NO: 27264 - DNA, 28 bp, synthetic construct
  source 1..28: mol_type = other DNA
gaacaagcagtgggaccagcatttccgg

SEQ ID NO: 27265 - DNA, 28 bp, synthetic construct
  source 1..28: mol_type = other DNA
cagctgctggaagtgaacaagcagtggg

SEQ ID NO: 27266 - DNA, 28 bp, synthetic construct
  source 1..28: mol_type = other DNA
acagctgctggaagtgaacaagcagtgg

SEQ ID NO: 27267 - DNA, 28 bp, synthetic construct
  source 1..28: mol_type = other DNA
actgcttgttcacttccagcagctgtgg

SEQ ID NO: 27268 - DNA, 28 bp, synthetic construct
  source 1..28: mol_type = other DNA
ctgcttgttcacttccagcagctgtggg

SEQ ID NO: 27269 - DNA, 28 bp, synthetic construct
  source 1..28: mol_type = other DNA
tgcttgttcacttccagcagctgtgggg

SEQ ID NO: 27270 - DNA, 28 bp, synthetic construct
  source 1..28: mol_type = other DNA
acttccagcagctgtggggagagactgg

SEQ ID NO: 27271 - DNA, 28 bp, synthetic construct
  source 1..28: mol_type = other DNA
aactccagtctctccccacagctgctgg

SEQ ID NO: 27272 - DNA, 28 bp, synthetic construct
  source 1..28: mol_type = other DNA
gctgtggggagagactggagttagcagg

SEQ ID NO: 27273 - DNA, 28 bp, synthetic construct
  source 1..28: mol_type = other DNA
ggtaggtggccgaggtggcagtagtggg

SEQ ID NO: 27274 - DNA, 28 bp, synthetic construct
  source 1..28: mol_type = other DNA
aggtaggtggccgaggtggcagtagtgg

SEQ ID NO: 27275 - DNA, 28 bp, synthetic construct
  source 1..28: mol_type = other DNA
agcgcagtgaggtaggtggccgaggtgg

SEQ ID NO: 27276 - DNA, 28 bp, synthetic construct
  source 1..28: mol_type = other DNA
agcagcgcagtgaggtaggtggccgagg

SEQ ID NO: 27277 - DNA, 28 bp, synthetic construct
  source 1..28: mol_type = other DNA
tggagcagcagcgcagtgaggtaggtgg

SEQ ID NO: 27278 - DNA, 28 bp, synthetic construct
  source 1..28: mol_type = other DNA
tgctggagcagcagcgcagtgaggtagg

SEQ ID NO: 27279 - DNA, 28 bp, synthetic construct
  source 1..28: mol_type = other DNA
aagatgctggagcagcagcgcagtgagg

SEQ ID NO: 27280 - DNA, 28 bp, synthetic construct
  source 1..28: mol_type = other DNA
tgctccagcatcttcaccttcttctcgg

SEQ ID NO: 27281 - DNA, 28 bp, synthetic construct
  source 1..28: mol_type = other DNA
gcagccgagaagaaggtgaagatgctgg

SEQ ID NO: 27282 - DNA, 28 bp, synthetic construct
  source 1..28: mol_type = other DNA
ttcaccttcttctcggctgcgcccaagg

SEQ ID NO: 27283 - DNA, 28 bp, synthetic construct
  source 1..28: mol_type = other DNA
gtggccttgggcgcagccgagaagaagg

SEQ ID NO: 27284 - DNA, 28 bp, synthetic construct
  source 1..28: mol_type = other DNA
cggctgcgcccaaggccaccacctctgg

SEQ ID NO: 27285 - DNA, 28 bp, synthetic construct
  source 1..28: mol_type = other DNA
ggctgcgcccaaggccaccacctctggg

SEQ ID NO: 27286 - DNA, 28 bp, synthetic construct
  source 1..28: mol_type = other DNA
gtaaggtcccagaggtggtggccttggg

SEQ ID NO: 27287 - DNA, 28 bp, synthetic construct
  source 1..28: mol_type = other DNA
ggtaaggtcccagaggtggtggccttgg

SEQ ID NO: 27288 - DNA, 28 bp, synthetic construct
  source 1..28: mol_type = other DNA
acggcaggtaaggtcccagaggtggtgg

SEQ ID NO: 27289 - DNA, 28 bp, synthetic construct
  source 1..28: mol_type = other DNA
gtgacggcaggtaaggtcccagaggtgg

SEQ ID NO: 27290 - DNA, 28 bp, synthetic construct
  source 1..28: mol_type = other DNA
agtgtgacggcaggtaaggtcccagagg

SEQ ID NO: 27291 - DNA, 28 bp, synthetic construct
  source 1..28: mol_type = other DNA
gaccttacctgccgtcacactagcctgg

SEQ ID NO: 27292 - DNA, 28 bp, synthetic construct
  source 1..28: mol_type = other DNA
accttacctgccgtcacactagcctggg

SEQ ID NO: 27293 - DNA, 28 bp, synthetic construct
  source 1..28: mol_type = other DNA
ccttacctgccgtcacactagcctgggg

SEQ ID NO: 27294 - DNA, 28 bp, synthetic construct
  source 1..28: mol_type = other DNA
cttctccccaggctagtgtgacggcagg

SEQ ID NO: 27295 - DNA, 28 bp, synthetic construct
  source 1..28: mol_type = other DNA
tgtgcttctccccaggctagtgtgacgg

SEQ ID NO: 27296 - DNA, 28 bp, synthetic construct
  source 1..28: mol_type = other DNA
cacactagcctggggagaagcacagagg

SEQ ID NO: 27297 - DNA, 28 bp, synthetic construct
  source 1..28: mol_type = other DNA
tgaaggctcctctgtgcttctccccagg

SEQ ID NO: 27298 - DNA, 28 bp, synthetic construct
  source 1..28: mol_type = other DNA
cagtggctggacagcagcaggtatgtgg

SEQ ID NO: 27299 - DNA, 28 bp, synthetic construct
  source 1..28: mol_type = other DNA
aagaaggcagtggctggacagcagcagg

SEQ ID NO: 27300 - DNA, 28 bp, synthetic construct
  source 1..28: mol_type = other DNA
aagggacaggcaagaaggcagtggctgg

SEQ ID NO: 27301 - DNA, 28 bp, synthetic construct
  source 1..28: mol_type = other DNA
atggaagggacaggcaagaaggcagtgg

SEQ ID NO: 27302 - DNA, 28 bp, synthetic construct
  source 1..28: mol_type = other DNA
ccttcttgcctgtcccttccatcttcgg

SEQ ID NO: 27303 - DNA, 28 bp, synthetic construct
  source 1..28: mol_type = other DNA
caggctcaccgaagatggaagggacagg

SEQ ID NO: 27304 - DNA, 28 bp, synthetic construct
  source 1..28: mol_type = other DNA
ctgtcccttccatcttcggtgagcctgg

SEQ ID NO: 27305 - DNA, 28 bp, synthetic construct
  source 1..28: mol_type = other DNA
gcggccaggctcaccgaagatggaaggg

SEQ ID NO: 27306 - DNA, 28 bp, synthetic construct
  source 1..28: mol_type = other DNA
ggcggccaggctcaccgaagatggaagg

SEQ ID NO: 27307 - DNA, 28 bp, synthetic construct
  source 1..28: mol_type = other DNA
tctgggcggccaggctcaccgaagatgg

SEQ ID NO: 27308 - DNA, 28 bp, synthetic construct
  source 1..28: mol_type = other DNA
acaaagagggtgcgtctgggcggccagg

SEQ ID NO: 27309 - DNA, 28 bp, synthetic construct
  source 1..28: mol_type = other DNA
tggcaacaaagagggtgcgtctgggcgg

SEQ ID NO: 27310 - DNA, 28 bp, synthetic construct
  source 1..28: mol_type = other DNA
caatggcaacaaagagggtgcgtctggg

SEQ ID NO: 27311 - DNA, 28 bp, synthetic construct
  source 1..28: mol_type = other DNA
gcaatggcaacaaagagggtgcgtctgg

SEQ ID NO: 27312 - DNA, 28 bp, synthetic construct
  source 1..28: mol_type = other DNA
tgttgatgagcaatggcaacaaagaggg

SEQ ID NO: 27313 - DNA, 28 bp, synthetic construct
  source 1..28: mol_type = other DNA
ttgttgatgagcaatggcaacaaagagg

SEQ ID NO: 27314 - DNA, 28 bp, synthetic construct
  source 1..28: mol_type = other DNA
agctcaagaagttgttgatgagcaatgg

SEQ ID NO: 27315 - DNA, 28 bp, synthetic construct
  source 1..28: mol_type = other DNA
ttcttgagctccaaattttcctccctgg

SEQ ID NO: 27316 - DNA, 28 bp, synthetic construct
  source 1..28: mol_type = other DNA
tcttgagctccaaattttcctccctggg

SEQ ID NO: 27317 - DNA, 28 bp, synthetic construct
  source 1..28: mol_type = other DNA
gagctccaaattttcctccctgggatgg

SEQ ID NO: 27318 - DNA, 28 bp, synthetic construct
  source 1..28: mol_type = other DNA
ctccaaattttcctccctgggatggagg

SEQ ID NO: 27319 - DNA, 28 bp, synthetic construct
  source 1..28: mol_type = other DNA
tacctccatcccagggaggaaaatttgg

SEQ ID NO: 27320 - DNA, 28 bp, synthetic construct
  source 1..28: mol_type = other DNA
ttctctgtttacctccatcccagggagg

SEQ ID NO: 27321 - DNA, 28 bp, synthetic construct
  source 1..28: mol_type = other DNA
gatttctctgtttacctccatcccaggg

SEQ ID NO: 27322 - DNA, 28 bp, synthetic construct
  source 1..28: mol_type = other DNA
tgatttctctgtttacctccatcccagg

SEQ ID NO: 27323 - DNA, 28 bp, synthetic construct
  source 1..28: mol_type = other DNA
ggtaagttcaggcccctcagagaagggg

SEQ ID NO: 27324 - DNA, 28 bp, synthetic construct
  source 1..28: mol_type = other DNA
cggtaagttcaggcccctcagagaaggg

SEQ ID NO: 27325 - DNA, 28 bp, synthetic construct
  source 1..28: mol_type = other DNA
gcggtaagttcaggcccctcagagaagg

SEQ ID NO: 27326 - DNA, 28 bp, synthetic construct
  source 1..28: mol_type = other DNA
ggggcctgaacttaccgcagcctctcgg

SEQ ID NO: 27327 - DNA, 28 bp, synthetic construct
  source 1..28: mol_type = other DNA
gctgccgagaggctgcggtaagttcagg

SEQ ID NO: 27328 - DNA, 28 bp, synthetic construct
  source 1..28: mol_type = other DNA
gcgggatcaggctgccgagaggctgcgg

SEQ ID NO: 27329 - DNA, 28 bp, synthetic construct
  source 1..28: mol_type = other DNA
ggaacagcgggatcaggctgccgagagg

SEQ ID NO: 27330 - DNA, 28 bp, synthetic construct
  source 1..28: mol_type = other DNA
ctcggcagcctgatcccgctgttccagg

SEQ ID NO: 27331 - DNA, 28 bp, synthetic construct
  source 1..28: mol_type = other DNA
gataagggcctggaacagcgggatcagg

SEQ ID NO: 27332 - DNA, 28 bp, synthetic construct
  source 1..28: mol_type = other DNA
aagttggataagggcctggaacagcggg

SEQ ID NO: 27333 - DNA, 28 bp, synthetic construct
  source 1..28: mol_type = other DNA
caagttggataagggcctggaacagcgg

SEQ ID NO: 27334 - DNA, 28 bp, synthetic construct
  source 1..28: mol_type = other DNA
cgctgttccaggcccttatccaacttgg

SEQ ID NO: 27335 - DNA, 28 bp, synthetic construct
  source 1..28: mol_type = other DNA
ctgaaggccaagttggataagggcctgg

SEQ ID NO: 27336 - DNA, 28 bp, synthetic construct
  source 1..28: mol_type = other DNA
aggctctgaaggccaagttggataaggg

SEQ ID NO: 27337 - DNA, 28 bp, synthetic construct
  source 1..28: mol_type = other DNA
gaggctctgaaggccaagttggataagg

SEQ ID NO: 27338 - DNA, 28 bp, synthetic construct
  source 1..28: mol_type = other DNA
gagaacgaggctctgaaggccaagttgg

SEQ ID NO: 27339 - DNA, 28 bp, synthetic construct
  source 1..28: mol_type = other DNA
cttcggaaggagaacgaggctctgaagg

SEQ ID NO: 27340 - DNA, 28 bp, synthetic construct
  source 1..28: mol_type = other DNA
tgtgagcagcttcggaaggagaacgagg

SEQ ID NO: 27341 - DNA, 28 bp, synthetic construct
  source 1..28: mol_type = other DNA
gttctccttccgaagctgctcacacagg

SEQ ID NO: 27342 - DNA, 28 bp, synthetic construct
  source 1..28: mol_type = other DNA
ttctccttccgaagctgctcacacaggg

SEQ ID NO: 27343 - DNA, 28 bp, synthetic construct
  source 1..28: mol_type = other DNA
cagaccctgtgtgagcagcttcggaagg

SEQ ID NO: 27344 - DNA, 28 bp, synthetic construct
  source 1..28: mol_type = other DNA
tccgaagctgctcacacagggtctgtgg

SEQ ID NO: 27345 - DNA, 28 bp, synthetic construct
  source 1..28: mol_type = other DNA
ccgaagctgctcacacagggtctgtggg

SEQ ID NO: 27346 - DNA, 28 bp, synthetic construct
  source 1..28: mol_type = other DNA
cgaagctgctcacacagggtctgtgggg

SEQ ID NO: 27347 - DNA, 28 bp, synthetic construct
  source 1..28: mol_type = other DNA
gctgctcacacagggtctgtggggcagg

SEQ ID NO: 27348 - DNA, 28 bp, synthetic construct
  source 1..28: mol_type = other DNA
ctgctcacacagggtctgtggggcaggg

SEQ ID NO: 27349 - DNA, 28 bp, synthetic construct
  source 1..28: mol_type = other DNA
tgctcacacagggtctgtggggcagggg

SEQ ID NO: 27350 - DNA, 28 bp, synthetic construct
  source 1..28: mol_type = other DNA
gggtctgtggggcaggggaacagacagg

SEQ ID NO: 27351 - DNA, 28 bp, synthetic construct
  source 1..28: mol_type = other DNA
ggtctgtggggcaggggaacagacaggg

SEQ ID NO: 27352 - DNA, 28 bp, synthetic construct
  source 1..28: mol_type = other DNA
attctgcaggtgaggcgcgtggggaggg

SEQ ID NO: 27353 - DNA, 28 bp, synthetic construct
  source 1..28: mol_type = other DNA
cattctgcaggtgaggcgcgtggggagg

SEQ ID NO: 27354 - DNA, 28 bp, synthetic construct
  source 1..28: mol_type = other DNA
ctccccacgcgcctcacctgcagaatgg

SEQ ID NO: 27355 - DNA, 28 bp, synthetic construct
  source 1..28: mol_type = other DNA
ctccattctgcaggtgaggcgcgtgggg

SEQ ID NO: 27356 - DNA, 28 bp, synthetic construct
  source 1..28: mol_type = other DNA
cccacgcgcctcacctgcagaatggagg

SEQ ID NO: 27357 - DNA, 28 bp, synthetic construct
  source 1..28: mol_type = other DNA
acctccattctgcaggtgaggcgcgtgg

SEQ ID NO: 27358 - DNA, 28 bp, synthetic construct
  source 1..28: mol_type = other DNA
gcagcgcacctccattctgcaggtgagg

SEQ ID NO: 27359 - DNA, 28 bp, synthetic construct
  source 1..28: mol_type = other DNA
aatgagcagcgcacctccattctgcagg

SEQ ID NO: 27360 - DNA, 28 bp, synthetic construct
  source 1..28: mol_type = other DNA
gtgcgctgctcattcttgtgcaccttgg

SEQ ID NO: 27361 - DNA, 28 bp, synthetic construct
  source 1..28: mol_type = other DNA
attcttgtgcaccttggatgccagtcgg

SEQ ID NO: 27362 - DNA, 28 bp, synthetic construct
  source 1..28: mol_type = other DNA
ctggagttcaaccgactggcatccaagg

SEQ ID NO: 27363 - DNA, 28 bp, synthetic construct
  source 1..28: mol_type = other DNA
cttggatgccagtcggttgaactccagg

SEQ ID NO: 27364 - DNA, 28 bp, synthetic construct
  source 1..28: mol_type = other DNA
ttggatgccagtcggttgaactccaggg

SEQ ID NO: 27365 - DNA, 28 bp, synthetic construct
  source 1..28: mol_type = other DNA
cgcatggccctggagttcaaccgactgg

SEQ ID NO: 27366 - DNA, 28 bp, synthetic construct
  source 1..28: mol_type = other DNA
cagtcggttgaactccagggccatgcgg

SEQ ID NO: 27367 - DNA, 28 bp, synthetic construct
  source 1..28: mol_type = other DNA
gttgaactccagggccatgcggcccagg

SEQ ID NO: 27368 - DNA, 28 bp, synthetic construct
  source 1..28: mol_type = other DNA
gaactccagggccatgcggcccaggtgg

SEQ ID NO: 27369 - DNA, 28 bp, synthetic construct
  source 1..28: mol_type = other DNA
aactccagggccatgcggcccaggtggg

SEQ ID NO: 27370 - DNA, 28 bp, synthetic construct
  source 1..28: mol_type = other DNA
ttcacccacctgggccgcatggccctgg

SEQ ID NO: 27371 - DNA, 28 bp, synthetic construct
  source 1..28: mol_type = other DNA
cagctcttcacccacctgggccgcatgg

SEQ ID NO: 27372 - DNA, 28 bp, synthetic construct
  source 1..28: mol_type = other DNA
catgcggcccaggtgggtgaagagctgg

SEQ ID NO: 27373 - DNA, 28 bp, synthetic construct
  source 1..28: mol_type = other DNA
gcccaggtgggtgaagagctggccgtgg

SEQ ID NO: 27374 - DNA, 28 bp, synthetic construct
  source 1..28: mol_type = other DNA
accacggccagctcttcacccacctggg

SEQ ID NO: 27375 - DNA, 28 bp, synthetic construct
  source 1..28: mol_type = other DNA
gaccacggccagctcttcacccacctgg

SEQ ID NO: 27376 - DNA, 28 bp, synthetic construct
  source 1..28: mol_type = other DNA
ggtgggtgaagagctggccgtggtccgg

SEQ ID NO: 27377 - DNA, 28 bp, synthetic construct
  source 1..28: mol_type = other DNA
aagagctggccgtggtccggctcctcgg

SEQ ID NO: 27378 - DNA, 28 bp, synthetic construct
  source 1..28: mol_type = other DNA
gtgtgtgtgccgaggagccggaccacgg

SEQ ID NO: 27379 - DNA, 28 bp, synthetic construct
  source 1..28: mol_type = other DNA
acgctgagtgtgtgtgccgaggagccgg

SEQ ID NO: 27380 - DNA, 28 bp, synthetic construct
  source 1..28: mol_type = other DNA
ggctcctcggcacacacactcagcgtgg

SEQ ID NO: 27381 - DNA, 28 bp, synthetic construct
  source 1..28: mol_type = other DNA
gagaccacgctgagtgtgtgtgccgagg

SEQ ID NO: 27382 - DNA, 28 bp, synthetic construct
  source 1..28: mol_type = other DNA
ggcacacacactcagcgtggtctccagg

SEQ ID NO: 27383 - DNA, 28 bp, synthetic construct
  source 1..28: mol_type = other DNA
actcagcgtggtctccaggcgctgcagg

SEQ ID NO: 27384 - DNA, 28 bp, synthetic construct
  source 1..28: mol_type = other DNA
ctccaggcgctgcaggtgcagcatcagg

SEQ ID NO: 27385 - DNA, 28 bp, synthetic construct
  source 1..28: mol_type = other DNA
aacctgatgctgcacctgcagcgcctgg

SEQ ID NO: 27386 - DNA, 28 bp, synthetic construct
  source 1..28: mol_type = other DNA
gtgcagcatcaggttgccgtcctcacgg

SEQ ID NO: 27387 - DNA, 28 bp, synthetic construct
  source 1..28: mol_type = other DNA
tgcagcatcaggttgccgtcctcacggg

SEQ ID NO: 27388 - DNA, 28 bp, synthetic construct
  source 1..28: mol_type = other DNA
gcagcatcaggttgccgtcctcacgggg

SEQ ID NO: 27389 - DNA, 28 bp, synthetic construct
  source 1..28: mol_type = other DNA
catcaggttgccgtcctcacggggcagg

SEQ ID NO: 27390 - DNA, 28 bp, synthetic construct
  source 1..28: mol_type = other DNA
atcaggttgccgtcctcacggggcaggg

SEQ ID NO: 27391 - DNA, 28 bp, synthetic construct
  source 1..28: mol_type = other DNA
tcaggttgccgtcctcacggggcagggg

SEQ ID NO: 27392 - DNA, 28 bp, synthetic construct
  source 1..28: mol_type = other DNA
caggttgccgtcctcacggggcaggggg

SEQ ID NO: 27393 - DNA, 28 bp, synthetic construct
  source 1..28: mol_type = other DNA
cgctgggccccctgccccgtgaggacgg

SEQ ID NO: 27394 - DNA, 28 bp, synthetic construct
  source 1..28: mol_type = other DNA
caggcgctgggccccctgccccgtgagg

SEQ ID NO: 27395 - DNA, 28 bp, synthetic construct
  source 1..28: mol_type = other DNA
ctcacggggcagggggcccagcgcctgg

SEQ ID NO: 27396 - DNA, 28 bp, synthetic construct
  source 1..28: mol_type = other DNA
ggggcagggggcccagcgcctggagagg

SEQ ID NO: 27397 - DNA, 28 bp, synthetic construct
  source 1..28: mol_type = other DNA
gggcagggggcccagcgcctggagaggg

SEQ ID NO: 27398 - DNA, 28 bp, synthetic construct
  source 1..28: mol_type = other DNA
gggggcccagcgcctggagagggaaagg

SEQ ID NO: 27399 - DNA, 28 bp, synthetic construct
  source 1..28: mol_type = other DNA
ggggcccagcgcctggagagggaaaggg

SEQ ID NO: 27400 - DNA, 28 bp, synthetic construct
  source 1..28: mol_type = other DNA
tgtgccctttccctctccaggcgctggg

SEQ ID NO: 27401 - DNA, 28 bp, synthetic construct
  source 1..28: mol_type = other DNA
gtgtgccctttccctctccaggcgctgg

SEQ ID NO: 27402 - DNA, 28 bp, synthetic construct
  source 1..28: mol_type = other DNA
agcgcctggagagggaaagggcacacgg

SEQ ID NO: 27403 - DNA, 28 bp, synthetic construct
  source 1..28: mol_type = other DNA
tgggccgtgtgccctttccctctccagg

SEQ ID NO: 27404 - DNA, 28 bp, synthetic construct
  source 1..28: mol_type = other DNA
atggtgagtggacgggcaggaccccggg

SEQ ID NO: 27405 - DNA, 28 bp, synthetic construct
  source 1..28: mol_type = other DNA
gatggtgagtggacgggcaggaccccgg

SEQ ID NO: 27406 - DNA, 28 bp, synthetic construct
  source 1..28: mol_type = other DNA
cctgcccgtccactcaccatcgcattgg

SEQ ID NO: 27407 - DNA, 28 bp, synthetic construct
  source 1..28: mol_type = other DNA
catgccaatgcgatggtgagtggacggg

SEQ ID NO: 27408 - DNA, 28 bp, synthetic construct
  source 1..28: mol_type = other DNA
ccgtccactcaccatcgcattggcatgg

SEQ ID NO: 27409 - DNA, 28 bp, synthetic construct
  source 1..28: mol_type = other DNA
gcagccatgccaatgcgatggtgagtgg

SEQ ID NO: 27410 - DNA, 28 bp, synthetic construct
  source 1..28: mol_type = other DNA
gagagcagcagccatgccaatgcgatgg

SEQ ID NO: 27411 - DNA, 28 bp, synthetic construct
  source 1..28: mol_type = other DNA
tcgcattggcatggctgctgctctctgg

SEQ ID NO: 27412 - DNA, 28 bp, synthetic construct
  source 1..28: mol_type = other DNA
tgctctctggtgaattctgctcctcagg

SEQ ID NO: 27413 - DNA, 28 bp, synthetic construct
  source 1..28: mol_type = other DNA
tctgaatttgaagtggtcactcctgagg

SEQ ID NO: 27414 - DNA, 28 bp, synthetic construct
  source 1..28: mol_type = other DNA
tcaggagtgaccacttcaaattcagagg

SEQ ID NO: 27415 - DNA, 28 bp, synthetic construct
  source 1..28: mol_type = other DNA
ggagtgaccacttcaaattcagaggagg

SEQ ID NO: 27416 - DNA, 28 bp, synthetic construct
  source 1..28: mol_type = other DNA
cagggcacctcctctgaatttgaagtgg

SEQ ID NO: 27417 - DNA, 28 bp, synthetic construct
  source 1..28: mol_type = other DNA
ttcagaggaggtgccctgtgcagaaagg

SEQ ID NO: 27418 - DNA, 28 bp, synthetic construct
  source 1..28: mol_type = other DNA
aggtgccctgtgcagaaaggaagttagg

SEQ ID NO: 27419 - DNA, 28 bp, synthetic construct
  source 1..28: mol_type = other DNA
cagcacctaacttcctttctgcacaggg

SEQ ID NO: 27420 - DNA, 28 bp, synthetic construct
  source 1..28: mol_type = other DNA
gcagcacctaacttcctttctgcacagg

SEQ ID NO: 27421 - DNA, 28 bp, synthetic construct
  source 1..28: mol_type = other DNA
tgtaagttttatttggagtcatgggtgg

SEQ ID NO: 27422 - DNA, 28 bp, synthetic construct
  source 1..28: mol_type = other DNA
cagtgtaagttttatttggagtcatggg

SEQ ID NO: 27423 - DNA, 28 bp, synthetic construct
  source 1..28: mol_type = other DNA
ccatgactccaaataaaacttacactgg

SEQ ID NO: 27424 - DNA, 28 bp, synthetic construct
  source 1..28: mol_type = other DNA
gactccaaataaaacttacactggatgg

SEQ ID NO: 27425 - DNA, 28 bp, synthetic construct
  source 1..28: mol_type = other DNA
tccaaataaaacttacactggatggagg

SEQ ID NO: 27426 - DNA, 28 bp, synthetic construct
  source 1..28: mol_type = other DNA
gcctccatccagtgtaagttttatttgg

SEQ ID NO: 27427 - DNA, 28 bp, synthetic construct
  source 1..28: mol_type = other DNA
aaaacttacactggatggaggcttctgg

SEQ ID NO: 27428 - DNA, 28 bp, synthetic construct
  source 1..28: mol_type = other DNA
ttacactggatggaggcttctggactgg

SEQ ID NO: 27429 - DNA, 28 bp, synthetic construct
  source 1..28: mol_type = other DNA
tggatggaggcttctggactggtgctgg

SEQ ID NO: 27430 - DNA, 28 bp, synthetic construct
  source 1..28: mol_type = other DNA
ttctggactggtgctggcttgtcactgg

SEQ ID NO: 27431 - DNA, 28 bp, synthetic construct
  source 1..28: mol_type = other DNA
tctggactggtgctggcttgtcactggg

SEQ ID NO: 27432 - DNA, 28 bp, synthetic construct
  source 1..28: mol_type = other DNA
ctggactggtgctggcttgtcactgggg

SEQ ID NO: 27433 - DNA, 28 bp, synthetic construct
  source 1..28: mol_type = other DNA
gtgctggcttgtcactggggcatgcagg

SEQ ID NO: 27434 - DNA, 28 bp, synthetic construct
  source 1..28: mol_type = other DNA
tgctggcttgtcactggggcatgcaggg

SEQ ID NO: 27435 - DNA, 28 bp, synthetic construct
  source 1..28: mol_type = other DNA
gctggcttgtcactggggcatgcagggg

SEQ ID NO: 27436 - DNA, 28 bp, synthetic construct
  source 1..28: mol_type = other DNA
ttgtcactggggcatgcaggggctgtgg

SEQ ID NO: 27437 - DNA, 28 bp, synthetic construct
  source 1..28: mol_type = other DNA
tgtcactggggcatgcaggggctgtggg

SEQ ID NO: 27438 - DNA, 28 bp, synthetic construct
  source 1..28: mol_type = other DNA
atgctgtgacatttgagtcctttcctgg

SEQ ID NO: 27439 - DNA, 28 bp, synthetic construct
  source 1..28: mol_type = other DNA
ctgtgctttcttgattctccaggaaagg

SEQ ID NO: 27440 - DNA, 28 bp, synthetic construct
  source 1..28: mol_type = other DNA
ttcatctgtgctttcttgattctccagg

SEQ ID NO: 27441 - DNA, 28 bp, synthetic construct
  source 1..28: mol_type = other DNA
gagctcacaggtataagaggagtctggg

SEQ ID NO: 27442 - DNA, 28 bp, synthetic construct
  source 1..28: mol_type = other DNA
tgagctcacaggtataagaggagtctgg

SEQ ID NO: 27443 - DNA, 28 bp, synthetic construct
  source 1..28: mol_type = other DNA
tcctcttatacctgtgagctcagccagg

SEQ ID NO: 27444 - DNA, 28 bp, synthetic construct
  source 1..28: mol_type = other DNA
cctcttatacctgtgagctcagccaggg

SEQ ID NO: 27445 - DNA, 28 bp, synthetic construct
  source 1..28: mol_type = other DNA
ctcttatacctgtgagctcagccagggg

SEQ ID NO: 27446 - DNA, 28 bp, synthetic construct
  source 1..28: mol_type = other DNA
tcttatacctgtgagctcagccaggggg

SEQ ID NO: 27447 - DNA, 28 bp, synthetic construct
  source 1..28: mol_type = other DNA
cctgtgagctcagccagggggtcgaagg

SEQ ID NO: 27448 - DNA, 28 bp, synthetic construct
  source 1..28: mol_type = other DNA
tcagccagggggtcgaaggagcccaagg

SEQ ID NO: 27449 - DNA, 28 bp, synthetic construct
  source 1..28: mol_type = other DNA
gccagggggtcgaaggagcccaaggagg

SEQ ID NO: 27450 - DNA, 28 bp, synthetic construct
  source 1..28: mol_type = other DNA
ccagggggtcgaaggagcccaaggaggg

SEQ ID NO: 27451 - DNA, 28 bp, synthetic construct
  source 1..28: mol_type = other DNA
ggtcgaaggagcccaaggagggagaagg

SEQ ID NO: 27452 - DNA, 28 bp, synthetic construct
  source 1..28: mol_type = other DNA
cgaaggagcccaaggagggagaaggtgg

SEQ ID NO: 27453 - DNA, 28 bp, synthetic construct
  source 1..28: mol_type = other DNA
aggagcccaaggagggagaaggtggtgg

SEQ ID NO: 27454 - DNA, 28 bp, synthetic construct
  source 1..28: mol_type = other DNA
ggagcccaaggagggagaaggtggtggg

SEQ ID NO: 27455 - DNA, 28 bp, synthetic construct
  source 1..28: mol_type = other DNA
tgctcccaccaccttctccctccttggg

SEQ ID NO: 27456 - DNA, 28 bp, synthetic construct
  source 1..28: mol_type = other DNA
ctgctcccaccaccttctccctccttgg

SEQ ID NO: 27457 - DNA, 28 bp, synthetic construct
  source 1..28: mol_type = other DNA
cggcagaaggcagaggagctagtgaagg

SEQ ID NO: 27458 - DNA, 28 bp, synthetic construct
  source 1..28: mol_type = other DNA
cttcactagctcctctgccttctgccgg

SEQ ID NO: 27459 - DNA, 28 bp, synthetic construct
  source 1..28: mol_type = other DNA
agctcctctgccttctgccggagcctgg

SEQ ID NO: 27460 - DNA, 28 bp, synthetic construct
  source 1..28: mol_type = other DNA
gcgaccaggctccggcagaaggcagagg

SEQ ID NO: 27461 - DNA, 28 bp, synthetic construct
  source 1..28: mol_type = other DNA
atggaagcgaccaggctccggcagaagg

SEQ ID NO: 27462 - DNA, 28 bp, synthetic construct
  source 1..28: mol_type = other DNA
ctgccggagcctggtcgcttccatctgg

SEQ ID NO: 27463 - DNA, 28 bp, synthetic construct
  source 1..28: mol_type = other DNA
tgccggagcctggtcgcttccatctggg

SEQ ID NO: 27464 - DNA, 28 bp, synthetic construct
  source 1..28: mol_type = other DNA
gtcccagatggaagcgaccaggctccgg

SEQ ID NO: 27465 - DNA, 28 bp, synthetic construct
  source 1..28: mol_type = other DNA
ggaagagtcccagatggaagcgaccagg

SEQ ID NO: 27466 - DNA, 28 bp, synthetic construct
  source 1..28: mol_type = other DNA
ggggagcttttggaagagtcccagatgg

SEQ ID NO: 27467 - DNA, 28 bp, synthetic construct
  source 1..28: mol_type = other DNA
cttccaaaagctcccctagagttattgg

SEQ ID NO: 27468 - DNA, 28 bp, synthetic construct
  source 1..28: mol_type = other DNA
ttccaaaagctcccctagagttattggg

SEQ ID NO: 27469 - DNA, 28 bp, synthetic construct
  source 1..28: mol_type = other DNA
tccaaaagctcccctagagttattgggg

SEQ ID NO: 27470 - DNA, 28 bp, synthetic construct
  source 1..28: mol_type = other DNA
tccccaataactctaggggagcttttgg

SEQ ID NO: 27471 - DNA, 28 bp, synthetic construct
  source 1..28: mol_type = other DNA
agctcccctagagttattggggaagagg

SEQ ID NO: 27472 - DNA, 28 bp, synthetic construct
  source 1..28: mol_type = other DNA
gcttcctcttccccaataactctagggg

SEQ ID NO: 27473 - DNA, 28 bp, synthetic construct
  source 1..28: mol_type = other DNA
tgcttcctcttccccaataactctaggg

SEQ ID NO: 27474 - DNA, 28 bp, synthetic construct
  source 1..28: mol_type = other DNA
ttgcttcctcttccccaataactctagg

SEQ ID NO: 27475 - DNA, 28 bp, synthetic construct
  source 1..28: mol_type = other DNA
aaaaaatgcaagggataaagatgttagg

SEQ ID NO: 27476 - DNA, 28 bp, synthetic construct
  source 1..28: mol_type = other DNA
tatcccttgcattttttccttcagccgg

SEQ ID NO: 27477 - DNA, 28 bp, synthetic construct
  source 1..28: mol_type = other DNA
atcccttgcattttttccttcagccggg

SEQ ID NO: 27478 - DNA, 28 bp, synthetic construct
  source 1..28: mol_type = other DNA
ttcccggctgaaggaaaaaatgcaaggg

SEQ ID NO: 27479 - DNA, 28 bp, synthetic construct
  source 1..28: mol_type = other DNA
attcccggctgaaggaaaaaatgcaagg

SEQ ID NO: 27480 - DNA, 28 bp, synthetic construct
  source 1..28: mol_type = other DNA
ctagtgaaggagaattcccggctgaagg

SEQ ID NO: 27481 - DNA, 28 bp, synthetic construct
  source 1..28: mol_type = other DNA
cttcagccgggaattctccttcactagg

SEQ ID NO: 27482 - DNA, 28 bp, synthetic construct
  source 1..28: mol_type = other DNA
tgagcgcctagtgaaggagaattcccgg

SEQ ID NO: 27483 - DNA, 28 bp, synthetic construct
  source 1..28: mol_type = other DNA
tccttcactaggcgctcaaaagctgcgg

SEQ ID NO: 27484 - DNA, 28 bp, synthetic construct
  source 1..28: mol_type = other DNA
tccgcagcttttgagcgcctagtgaagg

SEQ ID NO: 27485 - DNA, 28 bp, synthetic construct
  source 1..28: mol_type = other DNA
tcaaaagctgcggatgcctctcctgagg

SEQ ID NO: 27486 - DNA, 28 bp, synthetic construct
  source 1..28: mol_type = other DNA
caaaagctgcggatgcctctcctgaggg

SEQ ID NO: 27487 - DNA, 28 bp, synthetic construct
  source 1..28: mol_type = other DNA
cctctcctgagggcacgctgcccccagg

SEQ ID NO: 27488 - DNA, 28 bp, synthetic construct
  source 1..28: mol_type = other DNA
ctctcctgagggcacgctgcccccaggg

SEQ ID NO: 27489 - DNA, 28 bp, synthetic construct
  source 1..28: mol_type = other DNA
acgaccctgggggcagcgtgccctcagg

SEQ ID NO: 27490 - DNA, 28 bp, synthetic construct
  source 1..28: mol_type = other DNA
cacgctgcccccagggtcgtagatccgg

SEQ ID NO: 27491 - DNA, 28 bp, synthetic construct
  source 1..28: mol_type = other DNA
tgcccccagggtcgtagatccggtacgg

SEQ ID NO: 27492 - DNA, 28 bp, synthetic construct
  source 1..28: mol_type = other DNA
gaccgtaccggatctacgaccctggggg

SEQ ID NO: 27493 - DNA, 28 bp, synthetic construct
  source 1..28: mol_type = other DNA
ggaccgtaccggatctacgaccctgggg

SEQ ID NO: 27494 - DNA, 28 bp, synthetic construct
  source 1..28: mol_type = other DNA
aggaccgtaccggatctacgaccctggg

SEQ ID NO: 27495 - DNA, 28 bp, synthetic construct
  source 1..28: mol_type = other DNA
gaggaccgtaccggatctacgaccctgg

SEQ ID NO: 27496 - DNA, 28 bp, synthetic construct
  source 1..28: mol_type = other DNA
ccggtacggtcctctcccttccatgagg

SEQ ID NO: 27497 - DNA, 28 bp, synthetic construct
  source 1..28: mol_type = other DNA
cggtacggtcctctcccttccatgaggg

SEQ ID NO: 27498 - DNA, 28 bp, synthetic construct
  source 1..28: mol_type = other DNA
gctgagctaccctcatggaagggagagg

SEQ ID NO: 27499 - DNA, 28 bp, synthetic construct
  source 1..28: mol_type = other DNA
caggggctgagctaccctcatggaaggg

SEQ ID NO: 27500 - DNA, 28 bp, synthetic construct
  source 1..28: mol_type = other DNA
gcaggggctgagctaccctcatggaagg

SEQ ID NO: 27501 - DNA, 28 bp, synthetic construct
  source 1..28: mol_type = other DNA
cacggcaggggctgagctaccctcatgg

SEQ ID NO: 27502 - DNA, 28 bp, synthetic construct
  source 1..28: mol_type = other DNA
catgagggtagctcagcccctgccgtgg

SEQ ID NO: 27503 - DNA, 28 bp, synthetic construct
  source 1..28: mol_type = other DNA
ctcagcccctgccgtggtgcccgcctgg

SEQ ID NO: 27504 - DNA, 28 bp, synthetic construct
  source 1..28: mol_type = other DNA
tacagccaggcgggcaccacggcagggg

SEQ ID NO: 27505 - DNA, 28 bp, synthetic construct
  source 1..28: mol_type = other DNA
ttacagccaggcgggcaccacggcaggg

SEQ ID NO: 27506 - DNA, 28 bp, synthetic construct
  source 1..28: mol_type = other DNA
cttacagccaggcgggcaccacggcagg

SEQ ID NO: 27507 - DNA, 28 bp, synthetic construct
  source 1..28: mol_type = other DNA
ctgccgtggtgcccgcctggctgtaagg

SEQ ID NO: 27508 - DNA, 28 bp, synthetic construct
  source 1..28: mol_type = other DNA
tgtccttacagccaggcgggcaccacgg

SEQ ID NO: 27509 - DNA, 28 bp, synthetic construct
  source 1..28: mol_type = other DNA
gctgctgttgtccttacagccaggcggg

SEQ ID NO: 27510 - DNA, 28 bp, synthetic construct
  source 1..28: mol_type = other DNA
tgctgctgttgtccttacagccaggcgg

SEQ ID NO: 27511 - DNA, 28 bp, synthetic construct
  source 1..28: mol_type = other DNA
atatgctgctgttgtccttacagccagg

SEQ ID NO: 27512 - DNA, 28 bp, synthetic construct
  source 1..28: mol_type = other DNA
atgtctgccttgtcctgtagattagagg

SEQ ID NO: 27513 - DNA, 28 bp, synthetic construct
  source 1..28: mol_type = other DNA
catgcagcctctaatctacaggacaagg

SEQ ID NO: 27514 - DNA, 28 bp, synthetic construct
  source 1..28: mol_type = other DNA
tgtcctgtagattagaggctgcatgagg

SEQ ID NO: 27515 - DNA, 28 bp, synthetic construct
  source 1..28: mol_type = other DNA
tgtcctcatgcagcctctaatctacagg

SEQ ID NO: 27516 - DNA, 28 bp, synthetic construct
  source 1..28: mol_type = other DNA
tgtagattagaggctgcatgaggacagg

SEQ ID NO: 27517 - DNA, 28 bp, synthetic construct
  source 1..28: mol_type = other DNA
gtagattagaggctgcatgaggacaggg

SEQ ID NO: 27518 - DNA, 28 bp, synthetic construct
  source 1..28: mol_type = other DNA
agggagcaagtccatcctgtgtgccagg

SEQ ID NO: 27519 - DNA, 28 bp, synthetic construct
  source 1..28: mol_type = other DNA
gggagcaagtccatcctgtgtgccaggg

SEQ ID NO: 27520 - DNA, 28 bp, synthetic construct
  source 1..28: mol_type = other DNA
tctgaagataccctggcacacaggatgg

SEQ ID NO: 27521 - DNA, 28 bp, synthetic construct
  source 1..28: mol_type = other DNA
cctgtgtgccagggtatcttcagagtgg

SEQ ID NO: 27522 - DNA, 28 bp, synthetic construct
  source 1..28: mol_type = other DNA
actctgggccactctgaagataccctgg

SEQ ID NO: 27523 - DNA, 28 bp, synthetic construct
  source 1..28: mol_type = other DNA
gggtatcttcagagtggcccagagtagg

SEQ ID NO: 27524 - DNA, 28 bp, synthetic construct
  source 1..28: mol_type = other DNA
ggtatcttcagagtggcccagagtaggg

SEQ ID NO: 27525 - DNA, 28 bp, synthetic construct
  source 1..28: mol_type = other DNA
ttcagagtggcccagagtagggcctcgg

SEQ ID NO: 27526 - DNA, 28 bp, synthetic construct
  source 1..28: mol_type = other DNA
tcaaggtttaccgaggccctactctggg

SEQ ID NO: 27527 - DNA, 28 bp, synthetic construct
  source 1..28: mol_type = other DNA
ttcaaggtttaccgaggccctactctgg

SEQ ID NO: 27528 - DNA, 28 bp, synthetic construct
  source 1..28: mol_type = other DNA
acttctctgaattcaaggtttaccgagg

SEQ ID NO: 27529 - DNA, 28 bp, synthetic construct
  source 1..28: mol_type = other DNA
cttcagtctgacttctctgaattcaagg

SEQ ID NO: 27530 - DNA, 28 bp, synthetic construct
  source 1..28: mol_type = other DNA
cttgaattcagagaagtcagactgaagg

SEQ ID NO: 27531 - DNA, 28 bp, synthetic construct
  source 1..28: mol_type = other DNA
ttgaattcagagaagtcagactgaaggg

SEQ ID NO: 27532 - DNA, 28 bp, synthetic construct
  source 1..28: mol_type = other DNA
ttgcaggaggcggggtcggggtcaaggg

SEQ ID NO: 27533 - DNA, 28 bp, synthetic construct
  source 1..28: mol_type = other DNA
cttgcaggaggcggggtcggggtcaagg

SEQ ID NO: 27534 - DNA, 28 bp, synthetic construct
  source 1..28: mol_type = other DNA
cttgaccccgaccccgcctcctgcaagg

SEQ ID NO: 27535 - DNA, 28 bp, synthetic construct
  source 1..28: mol_type = other DNA
catggccttgcaggaggcggggtcgggg

SEQ ID NO: 27536 - DNA, 28 bp, synthetic construct
  source 1..28: mol_type = other DNA
acatggccttgcaggaggcggggtcggg

SEQ ID NO: 27537 - DNA, 28 bp, synthetic construct
  source 1..28: mol_type = other DNA
gacatggccttgcaggaggcggggtcgg

SEQ ID NO: 27538 - DNA, 28 bp, synthetic construct
  source 1..28: mol_type = other DNA
gttggacatggccttgcaggaggcgggg

SEQ ID NO: 27539 - DNA, 28 bp, synthetic construct
  source 1..28: mol_type = other DNA
tgttggacatggccttgcaggaggcggg

SEQ ID NO: 27540 - DNA, 28 bp, synthetic construct
  source 1..28: mol_type = other DNA
atgttggacatggccttgcaggaggcgg

SEQ ID NO: 27541 - DNA, 28 bp, synthetic construct
  source 1..28: mol_type = other DNA
gggatgttggacatggccttgcaggagg

SEQ ID NO: 27542 - DNA, 28 bp, synthetic construct
  source 1..28: mol_type = other DNA
tctgggatgttggacatggccttgcagg

SEQ ID NO: 27543 - DNA, 28 bp, synthetic construct
  source 1..28: mol_type = other DNA
taggctttctctgggatgttggacatgg

SEQ ID NO: 27544 - DNA, 28 bp, synthetic construct
  source 1..28: mol_type = other DNA
cagggttaggctttctctgggatgttgg

SEQ ID NO: 27545 - DNA, 28 bp, synthetic construct
  source 1..28: mol_type = other DNA
agtgggtcagggttaggctttctctggg

SEQ ID NO: 27546 - DNA, 28 bp, synthetic construct
  source 1..28: mol_type = other DNA
cagtgggtcagggttaggctttctctgg

SEQ ID NO: 27547 - DNA, 28 bp, synthetic construct
  source 1..28: mol_type = other DNA
tgcgtctggtcagtgggtcagggttagg

SEQ ID NO: 27548 - DNA, 28 bp, synthetic construct
  source 1..28: mol_type = other DNA
ccctgacccactgaccagacgcacttgg

SEQ ID NO: 27549 - DNA, 28 bp, synthetic construct
  source 1..28: mol_type = other DNA
tccaagtgcgtctggtcagtgggtcagg

SEQ ID NO: 27550 - DNA, 28 bp, synthetic construct
  source 1..28: mol_type = other DNA
gggcgtccaagtgcgtctggtcagtggg

SEQ ID NO: 27551 - DNA, 28 bp, synthetic construct
  source 1..28: mol_type = other DNA
tgggcgtccaagtgcgtctggtcagtgg

SEQ ID NO: 27552 - DNA, 28 bp, synthetic construct
  source 1..28: mol_type = other DNA
aagtgtctgggcgtccaagtgcgtctgg

SEQ ID NO: 27553 - DNA, 28 bp, synthetic construct
  source 1..28: mol_type = other DNA
ggacgcccagacacttctagaatccagg

SEQ ID NO: 27554 - DNA, 28 bp, synthetic construct
  source 1..28: mol_type = other DNA
gcccagacacttctagaatccaggctgg

SEQ ID NO: 27555 - DNA, 28 bp, synthetic construct
  source 1..28: mol_type = other DNA
cccagacacttctagaatccaggctggg

SEQ ID NO: 27556 - DNA, 28 bp, synthetic construct
  source 1..28: mol_type = other DNA
gcccagcctggattctagaagtgtctgg

SEQ ID NO: 27557 - DNA, 28 bp, synthetic construct
  source 1..28: mol_type = other DNA
ctgagggagcatggctggcccagcctgg

SEQ ID NO: 27558 - DNA, 28 bp, synthetic construct
  source 1..28: mol_type = other DNA
ctgggccagccatgctccctcagagagg

SEQ ID NO: 27559 - DNA, 28 bp, synthetic construct
  source 1..28: mol_type = other DNA
ctgggcctctctgagggagcatggctgg

SEQ ID NO: 27560 - DNA, 28 bp, synthetic construct
  source 1..28: mol_type = other DNA
acatctgggcctctctgagggagcatgg

SEQ ID NO: 27561 - DNA, 28 bp, synthetic construct
  source 1..28: mol_type = other DNA
gctccctcagagaggcccagatgtaagg

SEQ ID NO: 27562 - DNA, 28 bp, synthetic construct
  source 1..28: mol_type = other DNA
tcgccttacatctgggcctctctgaggg

SEQ ID NO: 27563 - DNA, 28 bp, synthetic construct
  source 1..28: mol_type = other DNA
ttcgccttacatctgggcctctctgagg

SEQ ID NO: 27564 - DNA, 28 bp, synthetic construct
  source 1..28: mol_type = other DNA
tcagagaggcccagatgtaaggcgaagg

SEQ ID NO: 27565 - DNA, 28 bp, synthetic construct
  source 1..28: mol_type = other DNA
cagagaggcccagatgtaaggcgaaggg

SEQ ID NO: 27566 - DNA, 28 bp, synthetic construct
  source 1..28: mol_type = other DNA
tgctttgtcccttcgccttacatctggg

SEQ ID NO: 27567 - DNA, 28 bp, synthetic construct
  source 1..28: mol_type = other DNA
ctgctttgtcccttcgccttacatctgg

SEQ ID NO: 27568 - DNA, 28 bp, synthetic construct
  source 1..28: mol_type = other DNA
cagatgtaaggcgaagggacaaagcagg

SEQ ID NO: 27569 - DNA, 28 bp, synthetic construct
  source 1..28: mol_type = other DNA
aaggcgaagggacaaagcaggatgcagg

SEQ ID NO: 27570 - DNA, 28 bp, synthetic construct
  source 1..28: mol_type = other DNA
aagggacaaagcaggatgcaggatgtgg

SEQ ID NO: 27571 - DNA, 28 bp, synthetic construct
  source 1..28: mol_type = other DNA
agggacaaagcaggatgcaggatgtggg

SEQ ID NO: 27572 - DNA, 28 bp, synthetic construct
  source 1..28: mol_type = other DNA
ttgcgtgttttggaggacgtggggtggg

SEQ ID NO: 27573 - DNA, 28 bp, synthetic construct
  source 1..28: mol_type = other DNA
gttgcgtgttttggaggacgtggggtgg

SEQ ID NO: 27574 - DNA, 28 bp, synthetic construct
  source 1..28: mol_type = other DNA
agtgttgcgtgttttggaggacgtgggg

SEQ ID NO: 27575 - DNA, 28 bp, synthetic construct
  source 1..28: mol_type = other DNA
gagtgttgcgtgttttggaggacgtggg

SEQ ID NO: 27576 - DNA, 28 bp, synthetic construct
  source 1..28: mol_type = other DNA
tgagtgttgcgtgttttggaggacgtgg

SEQ ID NO: 27577 - DNA, 28 bp, synthetic construct
  source 1..28: mol_type = other DNA
agaaactgagtgttgcgtgttttggagg

SEQ ID NO: 27578 - DNA, 28 bp, synthetic construct
  source 1..28: mol_type = other DNA
aagagaaactgagtgttgcgtgttttgg

SEQ ID NO: 27579 - DNA, 28 bp, synthetic construct
  source 1..28: mol_type = other DNA
aaaacacgcaacactcagtttctcttgg

SEQ ID NO: 27580 - DNA, 28 bp, synthetic construct
  source 1..28: mol_type = other DNA
cgcaacactcagtttctcttggcgctgg

SEQ ID NO: 27581 - DNA, 28 bp, synthetic construct
  source 1..28: mol_type = other DNA
gcaacactcagtttctcttggcgctggg

SEQ ID NO: 27582 - DNA, 28 bp, synthetic construct
  source 1..28: mol_type = other DNA
caacactcagtttctcttggcgctgggg

SEQ ID NO: 27583 - DNA, 28 bp, synthetic construct
  source 1..28: mol_type = other DNA
gtttctcttggcgctggggagtcaacgg

SEQ ID NO: 27584 - DNA, 28 bp, synthetic construct
  source 1..28: mol_type = other DNA
tttctcttggcgctggggagtcaacggg

SEQ ID NO: 27585 - DNA, 28 bp, synthetic construct
  source 1..28: mol_type = other DNA
cttggcgctggggagtcaacgggaaagg

SEQ ID NO: 27586 - DNA, 28 bp, synthetic construct
  source 1..28: mol_type = other DNA
ttggcgctggggagtcaacgggaaaggg

SEQ ID NO: 27587 - DNA, 28 bp, synthetic construct
  source 1..28: mol_type = other DNA
tggcgctggggagtcaacgggaaagggg

SEQ ID NO: 27588 - DNA, 28 bp, synthetic construct
  source 1..28: mol_type = other DNA
ggggagtcaacgggaaaggggttcatgg

SEQ ID NO: 27589 - DNA, 28 bp, synthetic construct
  source 1..28: mol_type = other DNA
gggagtcaacgggaaaggggttcatggg

SEQ ID NO: 27590 - DNA, 28 bp, synthetic construct
  source 1..28: mol_type = other DNA
aaaggggttcatgggaaacaaaaagtgg

SEQ ID NO: 27591 - DNA, 28 bp, synthetic construct
  source 1..28: mol_type = other DNA
aaggggttcatgggaaacaaaaagtggg

SEQ ID NO: 27592 - DNA, 28 bp, synthetic construct
  source 1..28: mol_type = other DNA
agctatgctcccctactttagcctcagg

SEQ ID NO: 27593 - DNA, 28 bp, synthetic construct
  source 1..28: mol_type = other DNA
gctatgctcccctactttagcctcaggg

SEQ ID NO: 27594 - DNA, 28 bp, synthetic construct
  source 1..28: mol_type = other DNA
ctatgctcccctactttagcctcagggg

SEQ ID NO: 27595 - DNA, 28 bp, synthetic construct
  source 1..28: mol_type = other DNA
tatgctcccctactttagcctcaggggg

SEQ ID NO: 27596 - DNA, 28 bp, synthetic construct
  source 1..28: mol_type = other DNA
gctctgccccctgaggctaaagtagggg

SEQ ID NO: 27597 - DNA, 28 bp, synthetic construct
  source 1..28: mol_type = other DNA
agctctgccccctgaggctaaagtaggg

SEQ ID NO: 27598 - DNA, 28 bp, synthetic construct
  source 1..28: mol_type = other DNA
aagctctgccccctgaggctaaagtagg

SEQ ID NO: 27599 - DNA, 28 bp, synthetic construct
  source 1..28: mol_type = other DNA
tactttagcctcagggggcagagcttgg

SEQ ID NO: 27600 - DNA, 28 bp, synthetic construct
  source 1..28: mol_type = other DNA
actttagcctcagggggcagagcttggg

SEQ ID NO: 27601 - DNA, 28 bp, synthetic construct
  source 1..28: mol_type = other DNA
ctttagcctcagggggcagagcttgggg

SEQ ID NO: 27602 - DNA, 28 bp, synthetic construct
  source 1..28: mol_type = other DNA
ctttctccccaagctctgccccctgagg

SEQ ID NO: 27603 - DNA, 28 bp, synthetic construct
  source 1..28: mol_type = other DNA
gggggcagagcttggggagaaagaaagg

SEQ ID NO: 27604 - DNA, 28 bp, synthetic construct
  source 1..28: mol_type = other DNA
agagcttggggagaaagaaaggcagtgg

SEQ ID NO: 27605 - DNA, 28 bp, synthetic construct
  source 1..28: mol_type = other DNA
gagcttggggagaaagaaaggcagtggg

SEQ ID NO: 27606 - DNA, 28 bp, synthetic construct
  source 1..28: mol_type = other DNA
ggggagaaagaaaggcagtgggcagagg

SEQ ID NO: 27607 - DNA, 28 bp, synthetic construct
  source 1..28: mol_type = other DNA
gaaaggcagtgggcagaggagacgcagg

SEQ ID NO: 27608 - DNA, 28 bp, synthetic construct
  source 1..28: mol_type = other DNA
gagacgcaggagaaatatcctattgtgg

SEQ ID NO: 27609 - DNA, 28 bp, synthetic construct
  source 1..28: mol_type = other DNA
agacgcaggagaaatatcctattgtggg

SEQ ID NO: 27610 - DNA, 28 bp, synthetic construct
  source 1..28: mol_type = other DNA
tatcctattgtgggaaaaccctctctgg

SEQ ID NO: 27611 - DNA, 28 bp, synthetic construct
  source 1..28: mol_type = other DNA
tctccagagagggttttcccacaatagg

SEQ ID NO: 27612 - DNA, 28 bp, synthetic construct
  source 1..28: mol_type = other DNA
tgggaaaaccctctctggagatcagagg

SEQ ID NO: 27613 - DNA, 28 bp, synthetic construct
  source 1..28: mol_type = other DNA
gggtggctcctctgatctccagagaggg

SEQ ID NO: 27614 - DNA, 28 bp, synthetic construct
  source 1..28: mol_type = other DNA
ggggtggctcctctgatctccagagagg

SEQ ID NO: 27615 - DNA, 28 bp, synthetic construct
  source 1..28: mol_type = other DNA
ctctggagatcagaggagccacccctgg

SEQ ID NO: 27616 - DNA, 28 bp, synthetic construct
  source 1..28: mol_type = other DNA
tggagatcagaggagccacccctggagg

SEQ ID NO: 27617 - DNA, 28 bp, synthetic construct
  source 1..28: mol_type = other DNA
ggagatcagaggagccacccctggaggg

SEQ ID NO: 27618 - DNA, 28 bp, synthetic construct
  source 1..28: mol_type = other DNA
tcagaggagccacccctggagggcctgg

SEQ ID NO: 27619 - DNA, 28 bp, synthetic construct
  source 1..28: mol_type = other DNA
gccacccctggagggcctggacttctgg

SEQ ID NO: 27620 - DNA, 28 bp, synthetic construct
  source 1..28: mol_type = other DNA
tccagaagtccaggccctccaggggtgg

SEQ ID NO: 27621 - DNA, 28 bp, synthetic construct
  source 1..28: mol_type = other DNA
acccctggagggcctggacttctggagg

SEQ ID NO: 27622 - DNA, 28 bp, synthetic construct
  source 1..28: mol_type = other DNA
tcctccagaagtccaggccctccagggg

SEQ ID NO: 27623 - DNA, 28 bp, synthetic construct
  source 1..28: mol_type = other DNA
ttcctccagaagtccaggccctccaggg

SEQ ID NO: 27624 - DNA, 28 bp, synthetic construct
  source 1..28: mol_type = other DNA
tttcctccagaagtccaggccctccagg

SEQ ID NO: 27625 - DNA, 28 bp, synthetic construct
  source 1..28: mol_type = other DNA
ttgtctttctttcctccagaagtccagg

SEQ ID NO: 27626 - DNA, 28 bp, synthetic construct
  source 1..28: mol_type = other DNA
acttctggaggaaagaaagacaaagagg

SEQ ID NO: 27627 - DNA, 28 bp, synthetic construct
  source 1..28: mol_type = other DNA
cttctggaggaaagaaagacaaagaggg

SEQ ID NO: 27628 - DNA, 28 bp, synthetic construct
  source 1..28: mol_type = other DNA
aggaaagaaagacaaagagggaaacagg

SEQ ID NO: 27629 - DNA, 28 bp, synthetic construct
  source 1..28: mol_type = other DNA
ggaaagaaagacaaagagggaaacaggg

SEQ ID NO: 27630 - DNA, 28 bp, synthetic construct
  source 1..28: mol_type = other DNA
atctgggcatgaggtcagcagaacttgg

SEQ ID NO: 27631 - DNA, 28 bp, synthetic construct
  source 1..28: mol_type = other DNA
aagttctgctgacctcatgcccagatgg

SEQ ID NO: 27632 - DNA, 28 bp, synthetic construct
  source 1..28: mol_type = other DNA
gctgacctcatgcccagatggtcagcgg

SEQ ID NO: 27633 - DNA, 28 bp, synthetic construct
  source 1..28: mol_type = other DNA
gactgccgctgaccatctgggcatgagg

SEQ ID NO: 27634 - DNA, 28 bp, synthetic construct
  source 1..28: mol_type = other DNA
tgcccagatggtcagcggcagtccctgg

SEQ ID NO: 27635 - DNA, 28 bp, synthetic construct
  source 1..28: mol_type = other DNA
atccagggactgccgctgaccatctggg

SEQ ID NO: 27636 - DNA, 28 bp, synthetic construct
  source 1..28: mol_type = other DNA
catccagggactgccgctgaccatctgg

SEQ ID NO: 27637 - DNA, 28 bp, synthetic construct
  source 1..28: mol_type = other DNA
tcagcggcagtccctggatgaccactgg

SEQ ID NO: 27638 - DNA, 28 bp, synthetic construct
  source 1..28: mol_type = other DNA
cagcggcagtccctggatgaccactggg

SEQ ID NO: 27639 - DNA, 28 bp, synthetic construct
  source 1..28: mol_type = other DNA
agtccctggatgaccactgggcagacgg

SEQ ID NO: 27640 - DNA, 28 bp, synthetic construct
  source 1..28: mol_type = other DNA
gtccctggatgaccactgggcagacggg

SEQ ID NO: 27641 - DNA, 28 bp, synthetic construct
  source 1..28: mol_type = other DNA
ttcccgtctgcccagtggtcatccaggg

SEQ ID NO: 27642 - DNA, 28 bp, synthetic construct
  source 1..28: mol_type = other DNA
gttcccgtctgcccagtggtcatccagg

SEQ ID NO: 27643 - DNA, 28 bp, synthetic construct
  source 1..28: mol_type = other DNA
agagggagagttcccgtctgcccagtgg

SEQ ID NO: 27644 - DNA, 28 bp, synthetic construct
  source 1..28: mol_type = other DNA
acgggaactctccctctgatcaatgagg

SEQ ID NO: 27645 - DNA, 28 bp, synthetic construct
  source 1..28: mol_type = other DNA
agttataaaaacctcattgatcagaggg

SEQ ID NO: 27646 - DNA, 28 bp, synthetic construct
  source 1..28: mol_type = other DNA
aagttataaaaacctcattgatcagagg

SEQ ID NO: 27647 - DNA, 28 bp, synthetic construct
  source 1..28: mol_type = other DNA
ggtttttataacttctcccagagagagg

SEQ ID NO: 27648 - DNA, 28 bp, synthetic construct
  source 1..28: mol_type = other DNA
tctcccagagagaggactcattctcagg

SEQ ID NO: 27649 - DNA, 28 bp, synthetic construct
  source 1..28: mol_type = other DNA
catcctgagaatgagtcctctctctggg

SEQ ID NO: 27650 - DNA, 28 bp, synthetic construct
  source 1..28: mol_type = other DNA
tcatcctgagaatgagtcctctctctgg

SEQ ID NO: 27651 - DNA, 28 bp, synthetic construct
  source 1..28: mol_type = other DNA
ggactcattctcaggatgacagagctgg

SEQ ID NO: 27652 - DNA, 28 bp, synthetic construct
  source 1..28: mol_type = other DNA
ctcattctcaggatgacagagctggagg

SEQ ID NO: 27653 - DNA, 28 bp, synthetic construct
  source 1..28: mol_type = other DNA
tcattctcaggatgacagagctggaggg

SEQ ID NO: 27654 - DNA, 28 bp, synthetic construct
  source 1..28: mol_type = other DNA
cattctcaggatgacagagctggagggg

SEQ ID NO: 27655 - DNA, 28 bp, synthetic construct
  source 1..28: mol_type = other DNA
tgacagagctggaggggactctccaagg

SEQ ID NO: 27656 - DNA, 28 bp, synthetic construct
  source 1..28: mol_type = other DNA
gacagagctggaggggactctccaaggg

SEQ ID NO: 27657 - DNA, 28 bp, synthetic construct
  source 1..28: mol_type = other DNA
tggaggggactctccaagggcaatgagg

SEQ ID NO: 27658 - DNA, 28 bp, synthetic construct
  source 1..28: mol_type = other DNA
aatgcaggattcgcctcattgcccttgg

SEQ ID NO: 27659 - DNA, 28 bp, synthetic construct
  source 1..28: mol_type = other DNA
gcaatgaggcgaatcctgcattatcagg

SEQ ID NO: 27660 - DNA, 28 bp, synthetic construct
  source 1..28: mol_type = other DNA
atgaggcgaatcctgcattatcaggtgg

SEQ ID NO: 27661 - DNA, 28 bp, synthetic construct
  source 1..28: mol_type = other DNA
tgaggcgaatcctgcattatcaggtggg

SEQ ID NO: 27662 - DNA, 28 bp, synthetic construct
  source 1..28: mol_type = other DNA
gcatctctctcccacctgataatgcagg

SEQ ID NO: 27663 - DNA, 28 bp, synthetic construct
  source 1..28: mol_type = other DNA
gagagatgcacccagaaacactcaatgg

SEQ ID NO: 27664 - DNA, 28 bp, synthetic construct
  source 1..28: mol_type = other DNA
tgcacccagaaacactcaatggatgagg

SEQ ID NO: 27665 - DNA, 28 bp, synthetic construct
  source 1..28: mol_type = other DNA
gcacccagaaacactcaatggatgaggg

SEQ ID NO: 27666 - DNA, 28 bp, synthetic construct
  source 1..28: mol_type = other DNA
cacccagaaacactcaatggatgagggg

SEQ ID NO: 27667 - DNA, 28 bp, synthetic construct
  source 1..28: mol_type = other DNA
agcccctcatccattgagtgtttctggg

SEQ ID NO: 27668 - DNA, 28 bp, synthetic construct
  source 1..28: mol_type = other DNA
cagcccctcatccattgagtgtttctgg

SEQ ID NO: 27669 - DNA, 28 bp, synthetic construct
  source 1..28: mol_type = other DNA
gaggggctgcattcgaacatgacgatgg

SEQ ID NO: 27670 - DNA, 28 bp, synthetic construct
  source 1..28: mol_type = other DNA
tcccctctgctgtccacaaaccacgagg

SEQ ID NO: 27671 - DNA, 28 bp, synthetic construct
  source 1..28: mol_type = other DNA
tcctcgtggtttgtggacagcagagggg

SEQ ID NO: 27672 - DNA, 28 bp, synthetic construct
  source 1..28: mol_type = other DNA
atcctcgtggtttgtggacagcagaggg

SEQ ID NO: 27673 - DNA, 28 bp, synthetic construct
  source 1..28: mol_type = other DNA
catcctcgtggtttgtggacagcagagg

SEQ ID NO: 27674 - DNA, 28 bp, synthetic construct
  source 1..28: mol_type = other DNA
ccacaaaccacgaggatgttttcaaagg

SEQ ID NO: 27675 - DNA, 28 bp, synthetic construct
  source 1..28: mol_type = other DNA
cacaaaccacgaggatgttttcaaaggg

SEQ ID NO: 27676 - DNA, 28 bp, synthetic construct
  source 1..28: mol_type = other DNA
acaaaccacgaggatgttttcaaagggg

SEQ ID NO: 27677 - DNA, 28 bp, synthetic construct
  source 1..28: mol_type = other DNA
cttttcccctttgaaaacatcctcgtgg

SEQ ID NO: 27678 - DNA, 28 bp, synthetic construct
  source 1..28: mol_type = other DNA
cacgaggatgttttcaaaggggaaaagg

SEQ ID NO: 27679 - DNA, 28 bp, synthetic construct
  source 1..28: mol_type = other DNA
gaagcactgaccactcccctccatgtgg

SEQ ID NO: 27680 - DNA, 28 bp, synthetic construct
  source 1..28: mol_type = other DNA
ccactcccctccatgtggcagtatctgg

SEQ ID NO: 27681 - DNA, 28 bp, synthetic construct
  source 1..28: mol_type = other DNA
gaactccagatactgccacatggagggg

SEQ ID NO: 27682 - DNA, 28 bp, synthetic construct
  source 1..28: mol_type = other DNA
tgaactccagatactgccacatggaggg

SEQ ID NO: 27683 - DNA, 28 bp, synthetic construct
  source 1..28: mol_type = other DNA
ctgaactccagatactgccacatggagg

SEQ ID NO: 27684 - DNA, 28 bp, synthetic construct
  source 1..28: mol_type = other DNA
gctctgaactccagatactgccacatgg

SEQ ID NO: 27685 - DNA, 28 bp, synthetic construct
  source 1..28: mol_type = other DNA
tggcagtatctggagttcagagcccagg

SEQ ID NO: 27686 - DNA, 28 bp, synthetic construct
  source 1..28: mol_type = other DNA
ctggagttcagagcccaggagtcctcgg

SEQ ID NO: 27687 - DNA, 28 bp, synthetic construct
  source 1..28: mol_type = other DNA
tggagttcagagcccaggagtcctcggg

SEQ ID NO: 27688 - DNA, 28 bp, synthetic construct
  source 1..28: mol_type = other DNA
gatgagctcatgcccgaggactcctggg

SEQ ID NO: 27689 - DNA, 28 bp, synthetic construct
  source 1..28: mol_type = other DNA
agatgagctcatgcccgaggactcctgg

SEQ ID NO: 27690 - DNA, 28 bp, synthetic construct
  source 1..28: mol_type = other DNA
tgagaatcagatgagctcatgcccgagg

SEQ ID NO: 27691 - DNA, 28 bp, synthetic construct
  source 1..28: mol_type = other DNA
catgagctcatctgattctcactcacgg

SEQ ID NO: 27692 - DNA, 28 bp, synthetic construct
  source 1..28: mol_type = other DNA
ctcatctgattctcactcacggcacagg

SEQ ID NO: 27693 - DNA, 28 bp, synthetic construct
  source 1..28: mol_type = other DNA
cactcacggcacaggcagtgcagcaagg

SEQ ID NO: 27694 - DNA, 28 bp, synthetic construct
  source 1..28: mol_type = other DNA
acggcacaggcagtgcagcaaggcaagg

SEQ ID NO: 27695 - DNA, 28 bp, synthetic construct
  source 1..28: mol_type = other DNA
agtgcagcaaggcaaggccctgagcagg

SEQ ID NO: 27696 - DNA, 28 bp, synthetic construct
  source 1..28: mol_type = other DNA
gtgcagcaaggcaaggccctgagcaggg

SEQ ID NO: 27697 - DNA, 28 bp, synthetic construct
  source 1..28: mol_type = other DNA
agcaaggcaaggccctgagcagggaagg

SEQ ID NO: 27698 - DNA, 28 bp, synthetic construct
  source 1..28: mol_type = other DNA
gcaaggccctgagcagggaaggccaagg

SEQ ID NO: 27699 - DNA, 28 bp, synthetic construct
  source 1..28: mol_type = other DNA
ttgtgaccttggccttccctgctcaggg

SEQ ID NO: 27700 - DNA, 28 bp, synthetic construct
  source 1..28: mol_type = other DNA
tttgtgaccttggccttccctgctcagg

SEQ ID NO: 27701 - DNA, 28 bp, synthetic construct
  source 1..28: mol_type = other DNA
tgagcagggaaggccaaggtcacaaagg

SEQ ID NO: 27702 - DNA, 28 bp, synthetic construct
  source 1..28: mol_type = other DNA
ggaaggccaaggtcacaaaggagtcagg

SEQ ID NO: 27703 - DNA, 28 bp, synthetic construct
  source 1..28: mol_type = other DNA
ggccaaggtcacaaaggagtcaggatgg

SEQ ID NO: 27704 - DNA, 28 bp, synthetic construct
  source 1..28: mol_type = other DNA
ctccatcctgactcctttgtgaccttgg

SEQ ID NO: 27705 - DNA, 28 bp, synthetic construct
  source 1..28: mol_type = other DNA
ggtcacaaaggagtcaggatggagctgg

SEQ ID NO: 27706 - DNA, 28 bp, synthetic construct
  source 1..28: mol_type = other DNA
gtcacaaaggagtcaggatggagctggg

SEQ ID NO: 27707 - DNA, 28 bp, synthetic construct
  source 1..28: mol_type = other DNA
accagaagatccctgctctccctccagg

SEQ ID NO: 27708 - DNA, 28 bp, synthetic construct
  source 1..28: mol_type = other DNA
gcctggagggagagcagggatcttctgg

SEQ ID NO: 27709 - DNA, 28 bp, synthetic construct
  source 1..28: mol_type = other DNA
ctgtgggcagcctggagggagagcaggg

SEQ ID NO: 27710 - DNA, 28 bp, synthetic construct
  source 1..28: mol_type = other DNA
gctgtgggcagcctggagggagagcagg

SEQ ID NO: 27711 - DNA, 28 bp, synthetic construct
  source 1..28: mol_type = other DNA
gaggatgggctgtgggcagcctggaggg

SEQ ID NO: 27712 - DNA, 28 bp, synthetic construct
  source 1..28: mol_type = other DNA
ggaggatgggctgtgggcagcctggagg

SEQ ID NO: 27713 - DNA, 28 bp, synthetic construct
  source 1..28: mol_type = other DNA
aatggaggatgggctgtgggcagcctgg

SEQ ID NO: 27714 - DNA, 28 bp, synthetic construct
  source 1..28: mol_type = other DNA
ggaagggaaatggaggatgggctgtggg

SEQ ID NO: 27715 - DNA, 28 bp, synthetic construct
  source 1..28: mol_type = other DNA
aggaagggaaatggaggatgggctgtgg

SEQ ID NO: 27716 - DNA, 28 bp, synthetic construct
  source 1..28: mol_type = other DNA
ctgggcaggaagggaaatggaggatggg

SEQ ID NO: 27717 - DNA, 28 bp, synthetic construct
  source 1..28: mol_type = other DNA
gctgggcaggaagggaaatggaggatgg

SEQ ID NO: 27718 - DNA, 28 bp, synthetic construct
  source 1..28: mol_type = other DNA
gattgctgggcaggaagggaaatggagg

SEQ ID NO: 27719 - DNA, 28 bp, synthetic construct
  source 1..28: mol_type = other DNA
tgggattgctgggcaggaagggaaatgg

SEQ ID NO: 27720 - DNA, 28 bp, synthetic construct
  source 1..28: mol_type = other DNA
tttcccttcctgcccagcaatcccatgg

SEQ ID NO: 27721 - DNA, 28 bp, synthetic construct
  source 1..28: mol_type = other DNA
gtgccatgggattgctgggcaggaaggg

SEQ ID NO: 27722 - DNA, 28 bp, synthetic construct
  source 1..28: mol_type = other DNA
tgtgccatgggattgctgggcaggaagg

SEQ ID NO: 27723 - DNA, 28 bp, synthetic construct
  source 1..28: mol_type = other DNA
gtggtgtgccatgggattgctgggcagg

SEQ ID NO: 27724 - DNA, 28 bp, synthetic construct
  source 1..28: mol_type = other DNA
gcccagcaatcccatggcacaccacagg

SEQ ID NO: 27725 - DNA, 28 bp, synthetic construct
  source 1..28: mol_type = other DNA
gcctgtggtgtgccatgggattgctggg

SEQ ID NO: 27726 - DNA, 28 bp, synthetic construct
  source 1..28: mol_type = other DNA
ggcctgtggtgtgccatgggattgctgg

SEQ ID NO: 27727 - DNA, 28 bp, synthetic construct
  source 1..28: mol_type = other DNA
gtggtgggggcctgtggtgtgccatggg

SEQ ID NO: 27728 - DNA, 28 bp, synthetic construct
  source 1..28: mol_type = other DNA
tgtggtgggggcctgtggtgtgccatgg

SEQ ID NO: 27729 - DNA, 28 bp, synthetic construct
  source 1..28: mol_type = other DNA
tctgagaagatgtggtgggggcctgtgg

SEQ ID NO: 27730 - DNA, 28 bp, synthetic construct
  source 1..28: mol_type = other DNA
aagagactctgagaagatgtggtggggg

SEQ ID NO: 27731 - DNA, 28 bp, synthetic construct
  source 1..28: mol_type = other DNA
aaagagactctgagaagatgtggtgggg

SEQ ID NO: 27732 - DNA, 28 bp, synthetic construct
  source 1..28: mol_type = other DNA
gaaagagactctgagaagatgtggtggg

SEQ ID NO: 27733 - DNA, 28 bp, synthetic construct
  source 1..28: mol_type = other DNA
ggaaagagactctgagaagatgtggtgg

SEQ ID NO: 27734 - DNA, 28 bp, synthetic construct
  source 1..28: mol_type = other DNA
ggtggaaagagactctgagaagatgtgg

SEQ ID NO: 27735 - DNA, 28 bp, synthetic construct
  source 1..28: mol_type = other DNA
catcttctcagagtctctttccacctgg

SEQ ID NO: 27736 - DNA, 28 bp, synthetic construct
  source 1..28: mol_type = other DNA
tctcagagtctctttccacctggcctgg

SEQ ID NO: 27737 - DNA, 28 bp, synthetic construct
  source 1..28: mol_type = other DNA
ttgtagtttgtggaaccaggccaggtgg

SEQ ID NO: 27738 - DNA, 28 bp, synthetic construct
  source 1..28: mol_type = other DNA
gatttgtagtttgtggaaccaggccagg

SEQ ID NO: 27739 - DNA, 28 bp, synthetic construct
  source 1..28: mol_type = other DNA
ctgctgatttgtagtttgtggaaccagg

SEQ ID NO: 27740 - DNA, 28 bp, synthetic construct
  source 1..28: mol_type = other DNA
ctggttccacaaactacaaatcagcagg

SEQ ID NO: 27741 - DNA, 28 bp, synthetic construct
  source 1..28: mol_type = other DNA
ggagcacctgctgatttgtagtttgtgg

SEQ ID NO: 27742 - DNA, 28 bp, synthetic construct
  source 1..28: mol_type = other DNA
aaatcagcaggtgctccaccagcagtgg

SEQ ID NO: 27743 - DNA, 28 bp, synthetic construct
  source 1..28: mol_type = other DNA
aatcagcaggtgctccaccagcagtggg

SEQ ID NO: 27744 - DNA, 28 bp, synthetic construct
  source 1..28: mol_type = other DNA
agcggggctggagtcccactgctggtgg

SEQ ID NO: 27745 - DNA, 28 bp, synthetic construct
  source 1..28: mol_type = other DNA
gcaagcggggctggagtcccactgctgg

SEQ ID NO: 27746 - DNA, 28 bp, synthetic construct
  source 1..28: mol_type = other DNA
tgtttctggtttgggcaagcggggctgg

SEQ ID NO: 27747 - DNA, 28 bp, synthetic construct
  source 1..28: mol_type = other DNA
cagctgtttctggtttgggcaagcgggg

SEQ ID NO: 27748 - DNA, 28 bp, synthetic construct
  source 1..28: mol_type = other DNA
cccgcttgcccaaaccagaaacagctgg

SEQ ID NO: 27749 - DNA, 28 bp, synthetic construct
  source 1..28: mol_type = other DNA
accagctgtttctggtttgggcaagcgg

SEQ ID NO: 27750 - DNA, 28 bp, synthetic construct
  source 1..28: mol_type = other DNA
gcttgcccaaaccagaaacagctggtgg

SEQ ID NO: 27751 - DNA, 28 bp, synthetic construct
  source 1..28: mol_type = other DNA
ctataccaccagctgtttctggtttggg

SEQ ID NO: 27752 - DNA, 28 bp, synthetic construct
  source 1..28: mol_type = other DNA
tctataccaccagctgtttctggtttgg

SEQ ID NO: 27753 - DNA, 28 bp, synthetic construct
  source 1..28: mol_type = other DNA
ctgcttctataccaccagctgtttctgg

SEQ ID NO: 27754 - DNA, 28 bp, synthetic construct
  source 1..28: mol_type = other DNA
tcttgttttggaagaaagtctgcgctgg

SEQ ID NO: 27755 - DNA, 28 bp, synthetic construct
  source 1..28: mol_type = other DNA
tcttccaaaacaagacctcagccagcgg

SEQ ID NO: 27756 - DNA, 28 bp, synthetic construct
  source 1..28: mol_type = other DNA
cttccaaaacaagacctcagccagcggg

SEQ ID NO: 27757 - DNA, 28 bp, synthetic construct
  source 1..28: mol_type = other DNA
ttccaaaacaagacctcagccagcgggg

SEQ ID NO: 27758 - DNA, 28 bp, synthetic construct
  source 1..28: mol_type = other DNA
ggccccgctggctgaggtcttgttttgg

SEQ ID NO: 27759 - DNA, 28 bp, synthetic construct
  source 1..28: mol_type = other DNA
caggctgtggaggccccgctggctgagg

SEQ ID NO: 27760 - DNA, 28 bp, synthetic construct
  source 1..28: mol_type = other DNA
ctggggcaggctgtggaggccccgctgg

SEQ ID NO: 27761 - DNA, 28 bp, synthetic construct
  source 1..28: mol_type = other DNA
gcggggcctccacagcctgccccagagg

SEQ ID NO: 27762 - DNA, 28 bp, synthetic construct
  source 1..28: mol_type = other DNA
cggggcctccacagcctgccccagaggg

SEQ ID NO: 27763 - DNA, 28 bp, synthetic construct
  source 1..28: mol_type = other DNA
ggggcctccacagcctgccccagagggg

SEQ ID NO: 27764 - DNA, 28 bp, synthetic construct
  source 1..28: mol_type = other DNA
agggcccctctggggcaggctgtggagg

SEQ ID NO: 27765 - DNA, 28 bp, synthetic construct
  source 1..28: mol_type = other DNA
tccacagcctgccccagaggggccctgg

SEQ ID NO: 27766 - DNA, 28 bp, synthetic construct
  source 1..28: mol_type = other DNA
ccacagcctgccccagaggggccctggg

SEQ ID NO: 27767 - DNA, 28 bp, synthetic construct
  source 1..28: mol_type = other DNA
cacagcctgccccagaggggccctgggg

SEQ ID NO: 27768 - DNA, 28 bp, synthetic construct
  source 1..28: mol_type = other DNA
ggcagccccagggcccctctggggcagg

SEQ ID NO: 27769 - DNA, 28 bp, synthetic construct
  source 1..28: mol_type = other DNA
agcgggcagccccagggcccctctgggg

SEQ ID NO: 27770 - DNA, 28 bp, synthetic construct
  source 1..28: mol_type = other DNA
cagcgggcagccccagggcccctctggg

SEQ ID NO: 27771 - DNA, 28 bp, synthetic construct
  source 1..28: mol_type = other DNA
ccagaggggccctggggctgcccgctgg

SEQ ID NO: 27772 - DNA, 28 bp, synthetic construct
  source 1..28: mol_type = other DNA
tttctggttccagcgggcagccccaggg

SEQ ID NO: 27773 - DNA, 28 bp, synthetic construct
  source 1..28: mol_type = other DNA
ctttctggttccagcgggcagccccagg

SEQ ID NO: 27774 - DNA, 28 bp, synthetic construct
  source 1..28: mol_type = other DNA
ctggggctgcccgctggaaccagaaagg

SEQ ID NO: 27775 - DNA, 28 bp, synthetic construct
  source 1..28: mol_type = other DNA
caaactgggcctttctggttccagcggg

SEQ ID NO: 27776 - DNA, 28 bp, synthetic construct
  source 1..28: mol_type = other DNA
ccgctggaaccagaaaggcccagtttgg

SEQ ID NO: 27777 - DNA, 28 bp, synthetic construct
  source 1..28: mol_type = other DNA
cgctggaaccagaaaggcccagtttggg

SEQ ID NO: 27778 - DNA, 28 bp, synthetic construct
  source 1..28: mol_type = other DNA
gctggaaccagaaaggcccagtttgggg

SEQ ID NO: 27779 - DNA, 28 bp, synthetic construct
  source 1..28: mol_type = other DNA
ctggaaccagaaaggcccagtttggggg

SEQ ID NO: 27780 - DNA, 28 bp, synthetic construct
  source 1..28: mol_type = other DNA
tttctgcccccaaactgggcctttctgg

SEQ ID NO: 27781 - DNA, 28 bp, synthetic construct
  source 1..28: mol_type = other DNA
agaaaggcccagtttgggggcagaaagg

SEQ ID NO: 27782 - DNA, 28 bp, synthetic construct
  source 1..28: mol_type = other DNA
gaaaggcccagtttgggggcagaaaggg

SEQ ID NO: 27783 - DNA, 28 bp, synthetic construct
  source 1..28: mol_type = other DNA
aaaggcccagtttgggggcagaaagggg

SEQ ID NO: 27784 - DNA, 28 bp, synthetic construct
  source 1..28: mol_type = other DNA
ctgggcccctttctgcccccaaactggg

SEQ ID NO: 27785 - DNA, 28 bp, synthetic construct
  source 1..28: mol_type = other DNA
tctgggcccctttctgcccccaaactgg

SEQ ID NO: 27786 - DNA, 28 bp, synthetic construct
  source 1..28: mol_type = other DNA
gggggcagaaaggggcccagacagacgg

SEQ ID NO: 27787 - DNA, 28 bp, synthetic construct
  source 1..28: mol_type = other DNA
gcagaaaggggcccagacagacggcagg

SEQ ID NO: 27788 - DNA, 28 bp, synthetic construct
  source 1..28: mol_type = other DNA
aaggggcccagacagacggcaggtcagg

SEQ ID NO: 27789 - DNA, 28 bp, synthetic construct
  source 1..28: mol_type = other DNA
ttgttgcctgacctgccgtctgtctggg

SEQ ID NO: 27790 - DNA, 28 bp, synthetic construct
  source 1..28: mol_type = other DNA
gttgttgcctgacctgccgtctgtctgg

SEQ ID NO: 27791 - DNA, 28 bp, synthetic construct
  source 1..28: mol_type = other DNA
aggcaacaaccacagaccgtgaagatgg

SEQ ID NO: 27792 - DNA, 28 bp, synthetic construct
  source 1..28: mol_type = other DNA
gcatcacttccatcttcacggtctgtgg

SEQ ID NO: 27793 - DNA, 28 bp, synthetic construct
  source 1..28: mol_type = other DNA
ttcagcagcatcacttccatcttcacgg

SEQ ID NO: 27794 - DNA, 28 bp, synthetic construct
  source 1..28: mol_type = other DNA
atggaagtgatgctgctgaaaccgaagg

SEQ ID NO: 27795 - DNA, 28 bp, synthetic construct
  source 1..28: mol_type = other DNA
gaaaccgaaggagccacccactagcagg

SEQ ID NO: 27796 - DNA, 28 bp, synthetic construct
  source 1..28: mol_type = other DNA
cttgcctgctagtgggtggctccttcgg

SEQ ID NO: 27797 - DNA, 28 bp, synthetic construct
  source 1..28: mol_type = other DNA
ccacccactagcaggcaagcacttgtgg

SEQ ID NO: 27798 - DNA, 28 bp, synthetic construct
  source 1..28: mol_type = other DNA
cacccactagcaggcaagcacttgtggg

SEQ ID NO: 27799 - DNA, 28 bp, synthetic construct
  source 1..28: mol_type = other DNA
cacccacaagtgcttgcctgctagtggg

SEQ ID NO: 27800 - DNA, 28 bp, synthetic construct
  source 1..28: mol_type = other DNA
ccactagcaggcaagcacttgtgggtgg

SEQ ID NO: 27801 - DNA, 28 bp, synthetic construct
  source 1..28: mol_type = other DNA
tagcaggcaagcacttgtgggtggcagg

SEQ ID NO: 27802 - DNA, 28 bp, synthetic construct
  source 1..28: mol_type = other DNA
agcaggcaagcacttgtgggtggcaggg

SEQ ID NO: 27803 - DNA, 28 bp, synthetic construct
  source 1..28: mol_type = other DNA
aggcaagcacttgtgggtggcagggagg

SEQ ID NO: 27804 - DNA, 28 bp, synthetic construct
  source 1..28: mol_type = other DNA
gggtggcagggaggcagtagtccccagg

SEQ ID NO: 27805 - DNA, 28 bp, synthetic construct
  source 1..28: mol_type = other DNA
ggtggcagggaggcagtagtccccaggg

SEQ ID NO: 27806 - DNA, 28 bp, synthetic construct
  source 1..28: mol_type = other DNA
gggtaaggctgagagttgagccctgggg

SEQ ID NO: 27807 - DNA, 28 bp, synthetic construct
  source 1..28: mol_type = other DNA
ggggtaaggctgagagttgagccctggg

SEQ ID NO: 27808 - DNA, 28 bp, synthetic construct
  source 1..28: mol_type = other DNA
tggggtaaggctgagagttgagccctgg

SEQ ID NO: 27809 - DNA, 28 bp, synthetic construct
  source 1..28: mol_type = other DNA
actctcagccttaccccagaaagagagg

SEQ ID NO: 27810 - DNA, 28 bp, synthetic construct
  source 1..28: mol_type = other DNA
ctctcagccttaccccagaaagagaggg

SEQ ID NO: 27811 - DNA, 28 bp, synthetic construct
  source 1..28: mol_type = other DNA
tctcagccttaccccagaaagagagggg

SEQ ID NO: 27812 - DNA, 28 bp, synthetic construct
  source 1..28: mol_type = other DNA
atcatacccctctctttctggggtaagg

SEQ ID NO: 27813 - DNA, 28 bp, synthetic construct
  source 1..28: mol_type = other DNA
tctttatcatacccctctctttctgggg

SEQ ID NO: 27814 - DNA, 28 bp, synthetic construct
  source 1..28: mol_type = other DNA
gtctttatcatacccctctctttctggg

SEQ ID NO: 27815 - DNA, 28 bp, synthetic construct
  source 1..28: mol_type = other DNA
agtctttatcatacccctctctttctgg

SEQ ID NO: 27816 - DNA, 28 bp, synthetic construct
  source 1..28: mol_type = other DNA
ttctagcttttgctctgaaatgctttgg

SEQ ID NO: 27817 - DNA, 28 bp, synthetic construct
  source 1..28: mol_type = other DNA
gattatcttcccattagcagtgttctgg

SEQ ID NO: 27818 - DNA, 28 bp, synthetic construct
  source 1..28: mol_type = other DNA
tatcttcccattagcagtgttctggtgg

SEQ ID NO: 27819 - DNA, 28 bp, synthetic construct
  source 1..28: mol_type = other DNA
ttcccattagcagtgttctggtggctgg

SEQ ID NO: 27820 - DNA, 28 bp, synthetic construct
  source 1..28: mol_type = other DNA
tcccattagcagtgttctggtggctggg

SEQ ID NO: 27821 - DNA, 28 bp, synthetic construct
  source 1..28: mol_type = other DNA
acccagccaccagaacactgctaatggg

SEQ ID NO: 27822 - DNA, 28 bp, synthetic construct
  source 1..28: mol_type = other DNA
tacccagccaccagaacactgctaatgg

SEQ ID NO: 27823 - DNA, 28 bp, synthetic construct
  source 1..28: mol_type = other DNA
attagcagtgttctggtggctgggtagg

SEQ ID NO: 27824 - DNA, 28 bp, synthetic construct
  source 1..28: mol_type = other DNA
ttagcagtgttctggtggctgggtaggg

SEQ ID NO: 27825 - DNA, 28 bp, synthetic construct
  source 1..28: mol_type = other DNA
tagcagtgttctggtggctgggtagggg

SEQ ID NO: 27826 - DNA, 28 bp, synthetic construct
  source 1..28: mol_type = other DNA
agcagtgttctggtggctgggtaggggg

SEQ ID NO: 27827 - DNA, 28 bp, synthetic construct
  source 1..28: mol_type = other DNA
gcagtgttctggtggctgggtagggggg

SEQ ID NO: 27828 - DNA, 28 bp, synthetic construct
  source 1..28: mol_type = other DNA
gtgttctggtggctgggtaggggggtgg

SEQ ID NO: 27829 - DNA, 28 bp, synthetic construct
  source 1..28: mol_type = other DNA
caagtgaatatcatttggggggtctggg

SEQ ID NO: 27830 - DNA, 28 bp, synthetic construct
  source 1..28: mol_type = other DNA
gcaagtgaatatcatttggggggtctgg

SEQ ID NO: 27831 - DNA, 28 bp, synthetic construct
  source 1..28: mol_type = other DNA
gctatgcaagtgaatatcatttgggggg

SEQ ID NO: 27832 - DNA, 28 bp, synthetic construct
  source 1..28: mol_type = other DNA
ggctatgcaagtgaatatcatttggggg

SEQ ID NO: 27833 - DNA, 28 bp, synthetic construct
  source 1..28: mol_type = other DNA
tggctatgcaagtgaatatcatttgggg

SEQ ID NO: 27834 - DNA, 28 bp, synthetic construct
  source 1..28: mol_type = other DNA
gtggctatgcaagtgaatatcatttggg

SEQ ID NO: 27835 - DNA, 28 bp, synthetic construct
  source 1..28: mol_type = other DNA
agtggctatgcaagtgaatatcatttgg

SEQ ID NO: 27836 - DNA, 28 bp, synthetic construct
  source 1..28: mol_type = other DNA
ctatgaagtattttgcaaatgttagtgg

SEQ ID NO: 27837 - DNA, 28 bp, synthetic construct
  source 1..28: mol_type = other DNA
ataatcagatggaaaaacaatgcttggg

SEQ ID NO: 27838 - DNA, 28 bp, synthetic construct
  source 1..28: mol_type = other DNA
gataatcagatggaaaaacaatgcttgg

SEQ ID NO: 27839 - DNA, 28 bp, synthetic construct
  source 1..28: mol_type = other DNA
ttccatctgattatcacaacagccctgg

SEQ ID NO: 27840 - DNA, 28 bp, synthetic construct
  source 1..28: mol_type = other DNA
tccatctgattatcacaacagccctggg

SEQ ID NO: 27841 - DNA, 28 bp, synthetic construct
  source 1..28: mol_type = other DNA
tcccagggctgttgtgataatcagatgg

SEQ ID NO: 27842 - DNA, 28 bp, synthetic construct
  source 1..28: mol_type = other DNA
gattatcacaacagccctgggaagaagg

SEQ ID NO: 27843 - DNA, 28 bp, synthetic construct
  source 1..28: mol_type = other DNA
atcacaacagccctgggaagaaggcagg

SEQ ID NO: 27844 - DNA, 28 bp, synthetic construct
  source 1..28: mol_type = other DNA
tcacaacagccctgggaagaaggcaggg

SEQ ID NO: 27845 - DNA, 28 bp, synthetic construct
  source 1..28: mol_type = other DNA
aggtatcagccctgccttcttcccaggg

SEQ ID NO: 27846 - DNA, 28 bp, synthetic construct
  source 1..28: mol_type = other DNA
caggtatcagccctgccttcttcccagg

SEQ ID NO: 27847 - DNA, 28 bp, synthetic construct
  source 1..28: mol_type = other DNA
gaaggcagggctgatacctgcctgatgg

SEQ ID NO: 27848 - DNA, 28 bp, synthetic construct
  source 1..28: mol_type = other DNA
agggctgatacctgcctgatggataagg

SEQ ID NO: 27849 - DNA, 28 bp, synthetic construct
  source 1..28: mol_type = other DNA
acttcagtttccttatccatcaggcagg

SEQ ID NO: 27850 - DNA, 28 bp, synthetic construct
  source 1..28: mol_type = other DNA
ctggacttcagtttccttatccatcagg

SEQ ID NO: 27851 - DNA, 28 bp, synthetic construct
  source 1..28: mol_type = other DNA
tggataaggaaactgaagtccagcttgg

SEQ ID NO: 27852 - DNA, 28 bp, synthetic construct
  source 1..28: mol_type = other DNA
ggataaggaaactgaagtccagcttggg

SEQ ID NO: 27853 - DNA, 28 bp, synthetic construct
  source 1..28: mol_type = other DNA
gataaggaaactgaagtccagcttgggg

SEQ ID NO: 27854 - DNA, 28 bp, synthetic construct
  source 1..28: mol_type = other DNA
aattgggctgattaagtccccaagctgg

SEQ ID NO: 27855 - DNA, 28 bp, synthetic construct
  source 1..28: mol_type = other DNA
cttaatcagcccaatttaatgcctttgg

SEQ ID NO: 27856 - DNA, 28 bp, synthetic construct
  source 1..28: mol_type = other DNA
agcccaatttaatgcctttggtcactgg

SEQ ID NO: 27857 - DNA, 28 bp, synthetic construct
  source 1..28: mol_type = other DNA
agccagtgaccaaaggcattaaattggg

SEQ ID NO: 27858 - DNA, 28 bp, synthetic construct
  source 1..28: mol_type = other DNA
cagccagtgaccaaaggcattaaattgg

SEQ ID NO: 27859 - DNA, 28 bp, synthetic construct
  source 1..28: mol_type = other DNA
atgcctttggtcactggctgcatcctgg

SEQ ID NO: 27860 - DNA, 28 bp, synthetic construct
  source 1..28: mol_type = other DNA
tgcctttggtcactggctgcatcctggg

SEQ ID NO: 27861 - DNA, 28 bp, synthetic construct
  source 1..28: mol_type = other DNA
gcctttggtcactggctgcatcctgggg

SEQ ID NO: 27862 - DNA, 28 bp, synthetic construct
  source 1..28: mol_type = other DNA
gccccaggatgcagccagtgaccaaagg

SEQ ID NO: 27863 - DNA, 28 bp, synthetic construct
  source 1..28: mol_type = other DNA
cagggttgcagggatagctggccccagg

SEQ ID NO: 27864 - DNA, 28 bp, synthetic construct
  source 1..28: mol_type = other DNA
ctggggccagctatccctgcaaccctgg

SEQ ID NO: 27865 - DNA, 28 bp, synthetic construct
  source 1..28: mol_type = other DNA
ccagctatccctgcaaccctggagcagg

SEQ ID NO: 27866 - DNA, 28 bp, synthetic construct
  source 1..28: mol_type = other DNA
gggcatcacctgctccagggttgcaggg

SEQ ID NO: 27867 - DNA, 28 bp, synthetic construct
  source 1..28: mol_type = other DNA
agggcatcacctgctccagggttgcagg

SEQ ID NO: 27868 - DNA, 28 bp, synthetic construct
  source 1..28: mol_type = other DNA
accctggagcaggtgatgccctccctgg

SEQ ID NO: 27869 - DNA, 28 bp, synthetic construct
  source 1..28: mol_type = other DNA
gccagggagggcatcacctgctccaggg

SEQ ID NO: 27870 - DNA, 28 bp, synthetic construct
  source 1..28: mol_type = other DNA
ggccagggagggcatcacctgctccagg

SEQ ID NO: 27871 - DNA, 28 bp, synthetic construct
  source 1..28: mol_type = other DNA
gcaggtgatgccctccctggcccagagg

SEQ ID NO: 27872 - DNA, 28 bp, synthetic construct
  source 1..28: mol_type = other DNA
caggtgatgccctccctggcccagaggg

SEQ ID NO: 27873 - DNA, 28 bp, synthetic construct
  source 1..28: mol_type = other DNA
tacacttttccctctgggccagggaggg

SEQ ID NO: 27874 - DNA, 28 bp, synthetic construct
  source 1..28: mol_type = other DNA
ttacacttttccctctgggccagggagg

SEQ ID NO: 27875 - DNA, 28 bp, synthetic construct
  source 1..28: mol_type = other DNA
tgcttacacttttccctctgggccaggg

SEQ ID NO: 27876 - DNA, 28 bp, synthetic construct
  source 1..28: mol_type = other DNA
ttgcttacacttttccctctgggccagg

SEQ ID NO: 27877 - DNA, 28 bp, synthetic construct
  source 1..28: mol_type = other DNA
gagatttgcttacacttttccctctggg

SEQ ID NO: 27878 - DNA, 28 bp, synthetic construct
  source 1..28: mol_type = other DNA
agagatttgcttacacttttccctctgg

SEQ ID NO: 27879 - DNA, 28 bp, synthetic construct
  source 1..28: mol_type = other DNA
agagggaaaagtgtaagcaaatctctgg

SEQ ID NO: 27880 - DNA, 28 bp, synthetic construct
  source 1..28: mol_type = other DNA
aaaagtgtaagcaaatctctggtacagg

SEQ ID NO: 27881 - DNA, 28 bp, synthetic construct
  source 1..28: mol_type = other DNA
aaagtgtaagcaaatctctggtacaggg

SEQ ID NO: 27882 - DNA, 28 bp, synthetic construct
  source 1..28: mol_type = other DNA
gtgtaagcaaatctctggtacagggagg

SEQ ID NO: 27883 - DNA, 28 bp, synthetic construct
  source 1..28: mol_type = other DNA
taagcaaatctctggtacagggaggtgg

SEQ ID NO: 27884 - DNA, 28 bp, synthetic construct
  source 1..28: mol_type = other DNA
caaatctctggtacagggaggtggaagg

SEQ ID NO: 27885 - DNA, 28 bp, synthetic construct
  source 1..28: mol_type = other DNA
ggtacagggaggtggaaggtcatcgagg

SEQ ID NO: 27886 - DNA, 28 bp, synthetic construct
  source 1..28: mol_type = other DNA
aggccaacatctacctccccagcagagg

SEQ ID NO: 27887 - DNA, 28 bp, synthetic construct
  source 1..28: mol_type = other DNA
tcacctctgctggggaggtagatgttgg

SEQ ID NO: 27888 - DNA, 28 bp, synthetic construct
  source 1..28: mol_type = other DNA
aacatctacctccccagcagaggtgagg

SEQ ID NO: 27889 - DNA, 28 bp, synthetic construct
  source 1..28: mol_type = other DNA
acatctacctccccagcagaggtgaggg

SEQ ID NO: 27890 - DNA, 28 bp, synthetic construct
  source 1..28: mol_type = other DNA
ctggcagccctcacctctgctggggagg

SEQ ID NO: 27891 - DNA, 28 bp, synthetic construct
  source 1..28: mol_type = other DNA
ctccccagcagaggtgagggctgccagg

SEQ ID NO: 27892 - DNA, 28 bp, synthetic construct
  source 1..28: mol_type = other DNA
tccccagcagaggtgagggctgccaggg

SEQ ID NO: 27893 - DNA, 28 bp, synthetic construct
  source 1..28: mol_type = other DNA
tccctggcagccctcacctctgctgggg

SEQ ID NO: 27894 - DNA, 28 bp, synthetic construct
  source 1..28: mol_type = other DNA
atccctggcagccctcacctctgctggg

SEQ ID NO: 27895 - DNA, 28 bp, synthetic construct
  source 1..28: mol_type = other DNA
catccctggcagccctcacctctgctgg

SEQ ID NO: 27896 - DNA, 28 bp, synthetic construct
  source 1..28: mol_type = other DNA
cagaggtgagggctgccagggatgctgg

SEQ ID NO: 27897 - DNA, 28 bp, synthetic construct
  source 1..28: mol_type = other DNA
ggtgagggctgccagggatgctggcagg

SEQ ID NO: 27898 - DNA, 28 bp, synthetic construct
  source 1..28: mol_type = other DNA
gagggctgccagggatgctggcaggtgg

SEQ ID NO: 27899 - DNA, 28 bp, synthetic construct
  source 1..28: mol_type = other DNA
agggctgccagggatgctggcaggtggg

SEQ ID NO: 27900 - DNA, 28 bp, synthetic construct
  source 1..28: mol_type = other DNA
ctgccagggatgctggcaggtgggctgg

SEQ ID NO: 27901 - DNA, 28 bp, synthetic construct
  source 1..28: mol_type = other DNA
ctgccagcccacctgccagcatccctgg

SEQ ID NO: 27902 - DNA, 28 bp, synthetic construct
  source 1..28: mol_type = other DNA
gggatgctggcaggtgggctggcagagg

SEQ ID NO: 27903 - DNA, 28 bp, synthetic construct
  source 1..28: mol_type = other DNA
ggatgctggcaggtgggctggcagaggg

SEQ ID NO: 27904 - DNA, 28 bp, synthetic construct
  source 1..28: mol_type = other DNA
gatgctggcaggtgggctggcagagggg

SEQ ID NO: 27905 - DNA, 28 bp, synthetic construct
  source 1..28: mol_type = other DNA
atgctggcaggtgggctggcagaggggg

SEQ ID NO: 27906 - DNA, 28 bp, synthetic construct
  source 1..28: mol_type = other DNA
gcaggtgggctggcagagggggtatagg

SEQ ID NO: 27907 - DNA, 28 bp, synthetic construct
  source 1..28: mol_type = other DNA
caggtgggctggcagagggggtataggg

SEQ ID NO: 27908 - DNA, 28 bp, synthetic construct
  source 1..28: mol_type = other DNA
tgggctggcagagggggtatagggaagg

SEQ ID NO: 27909 - DNA, 28 bp, synthetic construct
  source 1..28: mol_type = other DNA
gggctggcagagggggtatagggaaggg

SEQ ID NO: 27910 - DNA, 28 bp, synthetic construct
  source 1..28: mol_type = other DNA
ggctggcagagggggtatagggaagggg

SEQ ID NO: 27911 - DNA, 28 bp, synthetic construct
  source 1..28: mol_type = other DNA
gagggggtatagggaaggggtctccagg

SEQ ID NO: 27912 - DNA, 28 bp, synthetic construct
  source 1..28: mol_type = other DNA
atagggaaggggtctccaggaaagacgg

SEQ ID NO: 27913 - DNA, 28 bp, synthetic construct
  source 1..28: mol_type = other DNA
acgttctgttctgtgccgtctttcctgg

SEQ ID NO: 27914 - DNA, 28 bp, synthetic construct
  source 1..28: mol_type = other DNA
gacggcacagaacagaacgtcagagagg

SEQ ID NO: 27915 - DNA, 28 bp, synthetic construct
  source 1..28: mol_type = other DNA
attctagtgtctactctgctgtgtatgg

SEQ ID NO: 27916 - DNA, 28 bp, synthetic construct
  source 1..28: mol_type = other DNA
gtctactctgctgtgtatggaaccatgg

SEQ ID NO: 27917 - DNA, 28 bp, synthetic construct
  source 1..28: mol_type = other DNA
tctactctgctgtgtatggaaccatggg

SEQ ID NO: 27918 - DNA, 28 bp, synthetic construct
  source 1..28: mol_type = other DNA
ccatgggctcattccctcacatgcaagg

SEQ ID NO: 27919 - DNA, 28 bp, synthetic construct
  source 1..28: mol_type = other DNA
catgggctcattccctcacatgcaaggg

SEQ ID NO: 27920 - DNA, 28 bp, synthetic construct
  source 1..28: mol_type = other DNA
atgggctcattccctcacatgcaagggg

SEQ ID NO: 27921 - DNA, 28 bp, synthetic construct
  source 1..28: mol_type = other DNA
ggctcattccctcacatgcaaggggagg

SEQ ID NO: 27922 - DNA, 28 bp, synthetic construct
  source 1..28: mol_type = other DNA
tccctcacatgcaaggggaggagcatgg

SEQ ID NO: 27923 - DNA, 28 bp, synthetic construct
  source 1..28: mol_type = other DNA
ccctcacatgcaaggggaggagcatggg

SEQ ID NO: 27924 - DNA, 28 bp, synthetic construct
  source 1..28: mol_type = other DNA
gcccatgctcctccccttgcatgtgagg

SEQ ID NO: 27925 - DNA, 28 bp, synthetic construct
  source 1..28: mol_type = other DNA
ggaggagcatgggccacacagaaaccgg

SEQ ID NO: 27926 - DNA, 28 bp, synthetic construct
  source 1..28: mol_type = other DNA
gaggagcatgggccacacagaaaccggg

SEQ ID NO: 27927 - DNA, 28 bp, synthetic construct
  source 1..28: mol_type = other DNA
catgggccacacagaaaccgggtgatgg

SEQ ID NO: 27928 - DNA, 28 bp, synthetic construct
  source 1..28: mol_type = other DNA
ctttagccatcacccggtttctgtgtgg

SEQ ID NO: 27929 - DNA, 28 bp, synthetic construct
  source 1..28: mol_type = other DNA
acagaaaccgggtgatggctaaagctgg

SEQ ID NO: 27930 - DNA, 28 bp, synthetic construct
  source 1..28: mol_type = other DNA
ccgggtgatggctaaagctggcctcagg

SEQ ID NO: 27931 - DNA, 28 bp, synthetic construct
  source 1..28: mol_type = other DNA
tgagacttgggtcttcttgatcctgagg

SEQ ID NO: 27932 - DNA, 28 bp, synthetic construct
  source 1..28: mol_type = other DNA
tcaggatcaagaagacccaagtctcagg

SEQ ID NO: 27933 - DNA, 28 bp, synthetic construct
  source 1..28: mol_type = other DNA
agcttgctgctagctcctgagacttggg

SEQ ID NO: 27934 - DNA, 28 bp, synthetic construct
  source 1..28: mol_type = other DNA
cagcttgctgctagctcctgagacttgg

SEQ ID NO: 27935 - DNA, 28 bp, synthetic construct
  source 1..28: mol_type = other DNA
agtctcaggagctagcagcaagctgagg

SEQ ID NO: 27936 - DNA, 28 bp, synthetic construct
  source 1..28: mol_type = other DNA
gaggaaagagagagagccagcaccatgg

SEQ ID NO: 27937 - DNA, 28 bp, synthetic construct
  source 1..28: mol_type = other DNA
caaggcagcgatgtttccatggtgctgg

SEQ ID NO: 27938 - DNA, 28 bp, synthetic construct
  source 1..28: mol_type = other DNA
cagcaccatggaaacatcgctgccttgg

SEQ ID NO: 27939 - DNA, 28 bp, synthetic construct
  source 1..28: mol_type = other DNA
caccatggaaacatcgctgccttggagg

SEQ ID NO: 27940 - DNA, 28 bp, synthetic construct
  source 1..28: mol_type = other DNA
tgcctccaaggcagcgatgtttccatgg

SEQ ID NO: 27941 - DNA, 28 bp, synthetic construct
  source 1..28: mol_type = other DNA
atggaaacatcgctgccttggaggcagg

SEQ ID NO: 27942 - DNA, 28 bp, synthetic construct
  source 1..28: mol_type = other DNA
atcgctgccttggaggcaggaagaaagg

SEQ ID NO: 27943 - DNA, 28 bp, synthetic construct
  source 1..28: mol_type = other DNA
gtgtggacctttcttcctgcctccaagg

SEQ ID NO: 27944 - DNA, 28 bp, synthetic construct
  source 1..28: mol_type = other DNA
tggaggcaggaagaaaggtccacacagg

SEQ ID NO: 27945 - DNA, 28 bp, synthetic construct
  source 1..28: mol_type = other DNA
ggaggcaggaagaaaggtccacacaggg

SEQ ID NO: 27946 - DNA, 28 bp, synthetic construct
  source 1..28: mol_type = other DNA
aaggtccacacagggaaagtgctcaagg

SEQ ID NO: 27947 - DNA, 28 bp, synthetic construct
  source 1..28: mol_type = other DNA
gttggccttgagcactttccctgtgtgg

SEQ ID NO: 27948 - DNA, 28 bp, synthetic construct
  source 1..28: mol_type = other DNA
gctcaaggccaaccttgcgaacacgagg

SEQ ID NO: 27949 - DNA, 28 bp, synthetic construct
  source 1..28: mol_type = other DNA
ctctcaggcctcgtgttcgcaaggttgg

SEQ ID NO: 27950 - DNA, 28 bp, synthetic construct
  source 1..28: mol_type = other DNA
caaccttgcgaacacgaggcctgagagg

SEQ ID NO: 27951 - DNA, 28 bp, synthetic construct
  source 1..28: mol_type = other DNA
aaccttgcgaacacgaggcctgagaggg

SEQ ID NO: 27952 - DNA, 28 bp, synthetic construct
  source 1..28: mol_type = other DNA
accttgcgaacacgaggcctgagagggg

SEQ ID NO: 27953 - DNA, 28 bp, synthetic construct
  source 1..28: mol_type = other DNA
ccttgcgaacacgaggcctgagaggggg

SEQ ID NO: 27954 - DNA, 28 bp, synthetic construct
  source 1..28: mol_type = other DNA
gctagtgcaggtgaggccccctctcagg

SEQ ID NO: 27955 - DNA, 28 bp, synthetic construct
  source 1..28: mol_type = other DNA
gacagagctgaggctagtgcaggtgagg

SEQ ID NO: 27956 - DNA, 28 bp, synthetic construct
  source 1..28: mol_type = other DNA
gggtggacagagctgaggctagtgcagg

SEQ ID NO: 27957 - DNA, 28 bp, synthetic construct
  source 1..28: mol_type = other DNA
actagcctcagctctgtccaccctgtgg

SEQ ID NO: 27958 - DNA, 28 bp, synthetic construct
  source 1..28: mol_type = other DNA
ctagcctcagctctgtccaccctgtggg

SEQ ID NO: 27959 - DNA, 28 bp, synthetic construct
  source 1..28: mol_type = other DNA
acagcccacagggtggacagagctgagg

SEQ ID NO: 27960 - DNA, 28 bp, synthetic construct
  source 1..28: mol_type = other DNA
gtccaccctgtgggctgtgaaaccctgg

SEQ ID NO: 27961 - DNA, 28 bp, synthetic construct
  source 1..28: mol_type = other DNA
ctccagggtttcacagcccacagggtgg

SEQ ID NO: 27962 - DNA, 28 bp, synthetic construct
  source 1..28: mol_type = other DNA
ctgctccagggtttcacagcccacaggg

SEQ ID NO: 27963 - DNA, 28 bp, synthetic construct
  source 1..28: mol_type = other DNA
gctgctccagggtttcacagcccacagg

SEQ ID NO: 27964 - DNA, 28 bp, synthetic construct
  source 1..28: mol_type = other DNA
tcaggaaaggtgagtggctgctccaggg

SEQ ID NO: 27965 - DNA, 28 bp, synthetic construct
  source 1..28: mol_type = other DNA
ctcaggaaaggtgagtggctgctccagg

SEQ ID NO: 27966 - DNA, 28 bp, synthetic construct
  source 1..28: mol_type = other DNA
cagccactcacctttcctgagcctcagg

SEQ ID NO: 27967 - DNA, 28 bp, synthetic construct
  source 1..28: mol_type = other DNA
gcacctgaggctcaggaaaggtgagtgg

SEQ ID NO: 27968 - DNA, 28 bp, synthetic construct
  source 1..28: mol_type = other DNA
agatgaggcacctgaggctcaggaaagg

SEQ ID NO: 27969 - DNA, 28 bp, synthetic construct
  source 1..28: mol_type = other DNA
tttacagatgaggcacctgaggctcagg

SEQ ID NO: 27970 - DNA, 28 bp, synthetic construct
  source 1..28: mol_type = other DNA
gcctcaggtgcctcatctgtaaagcagg

SEQ ID NO: 27971 - DNA, 28 bp, synthetic construct
  source 1..28: mol_type = other DNA
tcctgctttacagatgaggcacctgagg

SEQ ID NO: 27972 - DNA, 28 bp, synthetic construct
  source 1..28: mol_type = other DNA
tattattactcctgctttacagatgagg

SEQ ID NO: 27973 - DNA, 28 bp, synthetic construct
  source 1..28: mol_type = other DNA
taatttctttgatcttctatcaggtagg

SEQ ID NO: 27974 - DNA, 28 bp, synthetic construct
  source 1..28: mol_type = other DNA
catttaatttctttgatcttctatcagg

SEQ ID NO: 27975 - DNA, 28 bp, synthetic construct
  source 1..28: mol_type = other DNA
ttaaatgaaacaatatgtgtatagttgg

SEQ ID NO: 27976 - DNA, 28 bp, synthetic construct
  source 1..28: mol_type = other DNA
atgaaacaatatgtgtatagttggaagg

SEQ ID NO: 27977 - DNA, 28 bp, synthetic construct
  source 1..28: mol_type = other DNA
tgaaacaatatgtgtatagttggaaggg

SEQ ID NO: 27978 - DNA, 28 bp, synthetic construct
  source 1..28: mol_type = other DNA
gaagggaattctcactttctactttagg

SEQ ID NO: 27979 - DNA, 28 bp, synthetic construct
  source 1..28: mol_type = other DNA
gtgtttcttgttaaatcagataatcagg

SEQ ID NO: 27980 - DNA, 28 bp, synthetic construct
  source 1..28: mol_type = other DNA
tagttactgtatactcttattattttgg

SEQ ID NO: 27981 - DNA, 28 bp, synthetic construct
  source 1..28: mol_type = other DNA
actagctcagcatttgacacacagcagg

SEQ ID NO: 27982 - DNA, 28 bp, synthetic construct
  source 1..28: mol_type = other DNA
tgacacacagcaggtgcttaataaaagg

SEQ ID NO: 27983 - DNA, 28 bp, synthetic construct
  source 1..28: mol_type = other DNA
acagcaggtgcttaataaaaggctgagg

SEQ ID NO: 27984 - DNA, 28 bp, synthetic construct
  source 1..28: mol_type = other DNA
cttagataagctgggcacagttgtgggg

SEQ ID NO: 27985 - DNA, 28 bp, synthetic construct
  source 1..28: mol_type = other DNA
cccacaactgtgcccagcttatctaagg

SEQ ID NO: 27986 - DNA, 28 bp, synthetic construct
  source 1..28: mol_type = other DNA
ccacaactgtgcccagcttatctaaggg

SEQ ID NO: 27987 - DNA, 28 bp, synthetic construct
  source 1..28: mol_type = other DNA
ctgtgcccagcttatctaagggccaagg

SEQ ID NO: 27988 - DNA, 28 bp, synthetic construct
  source 1..28: mol_type = other DNA
gaaagccttggcccttagataagctggg

SEQ ID NO: 27989 - DNA, 28 bp, synthetic construct
  source 1..28: mol_type = other DNA
ggaaagccttggcccttagataagctgg

SEQ ID NO: 27990 - DNA, 28 bp, synthetic construct
  source 1..28: mol_type = other DNA
aggagagaacaaatggggaaagccttgg

SEQ ID NO: 27991 - DNA, 28 bp, synthetic construct
  source 1..28: mol_type = other DNA
tttccccatttgttctctcctttaatgg

SEQ ID NO: 27992 - DNA, 28 bp, synthetic construct
  source 1..28: mol_type = other DNA
ttccccatttgttctctcctttaatggg

SEQ ID NO: 27993 - DNA, 28 bp, synthetic construct
  source 1..28: mol_type = other DNA
atcccattaaaggagagaacaaatgggg

SEQ ID NO: 27994 - DNA, 28 bp, synthetic construct
  source 1..28: mol_type = other DNA
aatcccattaaaggagagaacaaatggg

SEQ ID NO: 27995 - DNA, 28 bp, synthetic construct
  source 1..28: mol_type = other DNA
aaatcccattaaaggagagaacaaatgg

SEQ ID NO: 27996 - DNA, 28 bp, synthetic construct
  source 1..28: mol_type = other DNA
ttgttctctcctttaatgggattttagg

SEQ ID NO: 27997 - DNA, 28 bp, synthetic construct
  source 1..28: mol_type = other DNA
acggaagagcctaaaatcccattaaagg

SEQ ID NO: 27998 - DNA, 28 bp, synthetic construct
  source 1..28: mol_type = other DNA
ggctcttccgtcagctcagtaagctagg

SEQ ID NO: 27999 - DNA, 28 bp, synthetic construct
  source 1..28: mol_type = other DNA
tccgtcagctcagtaagctaggttctgg

SEQ ID NO: 28000 - DNA, 28 bp, synthetic construct
  source 1..28: mol_type = other DNA
gccagaacctagcttactgagctgacgg

SEQ ID NO: 28001 - DNA, 28 bp, synthetic construct
  source 1..28: mol_type = other DNA
atgcaggtcactagagaataagtggagg

SEQ ID NO: 28002 - DNA, 28 bp, synthetic construct
  source 1..28: mol_type = other DNA
gatatgcaggtcactagagaataagtgg

SEQ ID NO: 28003 - DNA, 28 bp, synthetic construct
  source 1..28: mol_type = other DNA
tgacctgcatatcaccatttaactgtgg

SEQ ID NO: 28004 - DNA, 28 bp, synthetic construct
  source 1..28: mol_type = other DNA
taaccacagttaaatggtgatatgcagg

SEQ ID NO: 28005 - DNA, 28 bp, synthetic construct
  source 1..28: mol_type = other DNA
tatcaccatttaactgtggttaagcagg

SEQ ID NO: 28006 - DNA, 28 bp, synthetic construct
  source 1..28: mol_type = other DNA
atcaccatttaactgtggttaagcaggg

SEQ ID NO: 28007 - DNA, 28 bp, synthetic construct
  source 1..28: mol_type = other DNA
ggcaccctgcttaaccacagttaaatgg

SEQ ID NO: 28008 - DNA, 28 bp, synthetic construct
  source 1..28: mol_type = other DNA
tttaactgtggttaagcagggtgcctgg

SEQ ID NO: 28009 - DNA, 28 bp, synthetic construct
  source 1..28: mol_type = other DNA
catgttcactagctatggtgtgtccagg

SEQ ID NO: 28010 - DNA, 28 bp, synthetic construct
  source 1..28: mol_type = other DNA
cttatagctacatgttcactagctatgg

SEQ ID NO: 28011 - DNA, 28 bp, synthetic construct
  source 1..28: mol_type = other DNA
tggtgagtgtggcatcgtggttcaaggg

SEQ ID NO: 28012 - DNA, 28 bp, synthetic construct
  source 1..28: mol_type = other DNA
ttggtgagtgtggcatcgtggttcaagg

SEQ ID NO: 28013 - DNA, 28 bp, synthetic construct
  source 1..28: mol_type = other DNA
ccacgatgccacactcaccaacaactgg

SEQ ID NO: 28014 - DNA, 28 bp, synthetic construct
  source 1..28: mol_type = other DNA
cacgatgccacactcaccaacaactggg

SEQ ID NO: 28015 - DNA, 28 bp, synthetic construct
  source 1..28: mol_type = other DNA
tcagattcccagttgttggtgagtgtgg

SEQ ID NO: 28016 - DNA, 28 bp, synthetic construct
  source 1..28: mol_type = other DNA
aaatgaggctcagattcccagttgttgg

SEQ ID NO: 28017 - DNA, 28 bp, synthetic construct
  source 1..28: mol_type = other DNA
ctgagcctcatttcctctgctgtaaagg

SEQ ID NO: 28018 - DNA, 28 bp, synthetic construct
  source 1..28: mol_type = other DNA
tgagcctcatttcctctgctgtaaaggg

SEQ ID NO: 28019 - DNA, 28 bp, synthetic construct
  source 1..28: mol_type = other DNA
attgccctttacagcagaggaaatgagg

SEQ ID NO: 28020 - DNA, 28 bp, synthetic construct
  source 1..28: mol_type = other DNA
tgcaggatattgccctttacagcagagg

SEQ ID NO: 28021 - DNA, 28 bp, synthetic construct
  source 1..28: mol_type = other DNA
gggcaatatcctgcaattccacccaagg

SEQ ID NO: 28022 - DNA, 28 bp, synthetic construct
  source 1..28: mol_type = other DNA
tcctgcaattccacccaaggatgaaagg

SEQ ID NO: 28023 - DNA, 28 bp, synthetic construct
  source 1..28: mol_type = other DNA
tcctttcatccttgggtggaattgcagg

SEQ ID NO: 28024 - DNA, 28 bp, synthetic construct
  source 1..28: mol_type = other DNA
catctcacttcctttcatccttgggtgg

SEQ ID NO: 28025 - DNA, 28 bp, synthetic construct
  source 1..28: mol_type = other DNA
tggcatctcacttcctttcatccttggg

SEQ ID NO: 28026 - DNA, 28 bp, synthetic construct
  source 1..28: mol_type = other DNA
atggcatctcacttcctttcatccttgg

SEQ ID NO: 28027 - DNA, 28 bp, synthetic construct
  source 1..28: mol_type = other DNA
tgtttatgtctgcaatgtgatatcatgg

SEQ ID NO: 28028 - DNA, 28 bp, synthetic construct
  source 1..28: mol_type = other DNA
tggaggtcatcataacacaaatatgtgg

SEQ ID NO: 28029 - DNA, 28 bp, synthetic construct
  source 1..28: mol_type = other DNA
ctggaaattggttggggaggactggagg

SEQ ID NO: 28030 - DNA, 28 bp, synthetic construct
  source 1..28: mol_type = other DNA
ctccagtcctccccaaccaatttccagg

SEQ ID NO: 28031 - DNA, 28 bp, synthetic construct
  source 1..28: mol_type = other DNA
agcctggaaattggttggggaggactgg

SEQ ID NO: 28032 - DNA, 28 bp, synthetic construct
  source 1..28: mol_type = other DNA
agtcctccccaaccaatttccaggctgg

SEQ ID NO: 28033 - DNA, 28 bp, synthetic construct
  source 1..28: mol_type = other DNA
gtcctccccaaccaatttccaggctggg

SEQ ID NO: 28034 - DNA, 28 bp, synthetic construct
  source 1..28: mol_type = other DNA
tcctccccaaccaatttccaggctgggg

SEQ ID NO: 28035 - DNA, 28 bp, synthetic construct
  source 1..28: mol_type = other DNA
tccccagcctggaaattggttggggagg

SEQ ID NO: 28036 - DNA, 28 bp, synthetic construct
  source 1..28: mol_type = other DNA
gtttccccagcctggaaattggttgggg

SEQ ID NO: 28037 - DNA, 28 bp, synthetic construct
  source 1..28: mol_type = other DNA
agtttccccagcctggaaattggttggg

SEQ ID NO: 28038 - DNA, 28 bp, synthetic construct
  source 1..28: mol_type = other DNA
cagtttccccagcctggaaattggttgg

SEQ ID NO: 28039 - DNA, 28 bp, synthetic construct
  source 1..28: mol_type = other DNA
gctgcagtttccccagcctggaaattgg

SEQ ID NO: 28040 - DNA, 28 bp, synthetic construct
  source 1..28: mol_type = other DNA
tccaggctggggaaactgcagcctcagg

SEQ ID NO: 28041 - DNA, 28 bp, synthetic construct
  source 1..28: mol_type = other DNA
acctgaggctgcagtttccccagcctgg

SEQ ID NO: 28042 - DNA, 28 bp, synthetic construct
  source 1..28: mol_type = other DNA
ctgcagcctcaggtccatccatcaaagg

SEQ ID NO: 28043 - DNA, 28 bp, synthetic construct
  source 1..28: mol_type = other DNA
agcctcaggtccatccatcaaaggccgg

SEQ ID NO: 28044 - DNA, 28 bp, synthetic construct
  source 1..28: mol_type = other DNA
gcctcaggtccatccatcaaaggccggg

SEQ ID NO: 28045 - DNA, 28 bp, synthetic construct
  source 1..28: mol_type = other DNA
acccggcctttgatggatggacctgagg

SEQ ID NO: 28046 - DNA, 28 bp, synthetic construct
  source 1..28: mol_type = other DNA
caggtccatccatcaaaggccgggttgg

SEQ ID NO: 28047 - DNA, 28 bp, synthetic construct
  source 1..28: mol_type = other DNA
aaaatccaacccggcctttgatggatgg

SEQ ID NO: 28048 - DNA, 28 bp, synthetic construct
  source 1..28: mol_type = other DNA
ctgaaaaatccaacccggcctttgatgg

SEQ ID NO: 28049 - DNA, 28 bp, synthetic construct
  source 1..28: mol_type = other DNA
catcaaaggccgggttggatttttcagg

SEQ ID NO: 28050 - DNA, 28 bp, synthetic construct
  source 1..28: mol_type = other DNA
gtttcactgcctgaaaaatccaacccgg

SEQ ID NO: 28051 - DNA, 28 bp, synthetic construct
  source 1..28: mol_type = other DNA
gaaactactctgttcaatactgtaatgg

SEQ ID NO: 28052 - DNA, 28 bp, synthetic construct
  source 1..28: mol_type = other DNA
actactctgttcaatactgtaatggtgg

SEQ ID NO: 28053 - DNA, 28 bp, synthetic construct
  source 1..28: mol_type = other DNA
tgggtttggacaaatgtggaatggcagg

SEQ ID NO: 28054 - DNA, 28 bp, synthetic construct
  source 1..28: mol_type = other DNA
tctatgggtttggacaaatgtggaatgg

SEQ ID NO: 28055 - DNA, 28 bp, synthetic construct
  source 1..28: mol_type = other DNA
tatgttctatgggtttggacaaatgtgg

SEQ ID NO: 28056 - DNA, 28 bp, synthetic construct
  source 1..28: mol_type = other DNA
cttggtggtgtatgttctatgggtttgg

SEQ ID NO: 28057 - DNA, 28 bp, synthetic construct
  source 1..28: mol_type = other DNA
aacccatagaacatacaccaccaagagg

SEQ ID NO: 28058 - DNA, 28 bp, synthetic construct
  source 1..28: mol_type = other DNA
acccatagaacatacaccaccaagaggg

SEQ ID NO: 28059 - DNA, 28 bp, synthetic construct
  source 1..28: mol_type = other DNA
tccctcttggtggtgtatgttctatggg

SEQ ID NO: 28060 - DNA, 28 bp, synthetic construct
  source 1..28: mol_type = other DNA
ttccctcttggtggtgtatgttctatgg

SEQ ID NO: 28061 - DNA, 28 bp, synthetic construct
  source 1..28: mol_type = other DNA
ggtttacatcagtgttccctcttggtgg

SEQ ID NO: 28062 - DNA, 28 bp, synthetic construct
  source 1..28: mol_type = other DNA
catggtttacatcagtgttccctcttgg

SEQ ID NO: 28063 - DNA, 28 bp, synthetic construct
  source 1..28: mol_type = other DNA
caagagggaacactgatgtaaaccatgg

SEQ ID NO: 28064 - DNA, 28 bp, synthetic construct
  source 1..28: mol_type = other DNA
gaacactgatgtaaaccatggactccgg

SEQ ID NO: 28065 - DNA, 28 bp, synthetic construct
  source 1..28: mol_type = other DNA
aacactgatgtaaaccatggactccggg

SEQ ID NO: 28066 - DNA, 28 bp, synthetic construct
  source 1..28: mol_type = other DNA
gtaaaccatggactccgggtgacagtgg

SEQ ID NO: 28067 - DNA, 28 bp, synthetic construct
  source 1..28: mol_type = other DNA
tgacaccactgtcacccggagtccatgg

SEQ ID NO: 28068 - DNA, 28 bp, synthetic construct
  source 1..28: mol_type = other DNA
aatctacattgacaccactgtcacccgg

SEQ ID NO: 28069 - DNA, 28 bp, synthetic construct
  source 1..28: mol_type = other DNA
atcaactgtaaaaaatctaccactctgg

SEQ ID NO: 28070 - DNA, 28 bp, synthetic construct
  source 1..28: mol_type = other DNA
aactgtaaaaaatctaccactctggtgg

SEQ ID NO: 28071 - DNA, 28 bp, synthetic construct
  source 1..28: mol_type = other DNA
tgtaaaaaatctaccactctggtggagg

SEQ ID NO: 28072 - DNA, 28 bp, synthetic construct
  source 1..28: mol_type = other DNA
ccactctggtggaggatgttgataatgg

SEQ ID NO: 28073 - DNA, 28 bp, synthetic construct
  source 1..28: mol_type = other DNA
cactctggtggaggatgttgataatggg

SEQ ID NO: 28074 - DNA, 28 bp, synthetic construct
  source 1..28: mol_type = other DNA
actctggtggaggatgttgataatgggg

SEQ ID NO: 28075 - DNA, 28 bp, synthetic construct
  source 1..28: mol_type = other DNA
ctctggtggaggatgttgataatggggg

SEQ ID NO: 28076 - DNA, 28 bp, synthetic construct
  source 1..28: mol_type = other DNA
gataatgggggaagctatgcctgttagg

SEQ ID NO: 28077 - DNA, 28 bp, synthetic construct
  source 1..28: mol_type = other DNA
ataatgggggaagctatgcctgttaggg

SEQ ID NO: 28078 - DNA, 28 bp, synthetic construct
  source 1..28: mol_type = other DNA
taatgggggaagctatgcctgttagggg

SEQ ID NO: 28079 - DNA, 28 bp, synthetic construct
  source 1..28: mol_type = other DNA
tgggggaagctatgcctgttaggggtgg

SEQ ID NO: 28080 - DNA, 28 bp, synthetic construct
  source 1..28: mol_type = other DNA
gggggaagctatgcctgttaggggtggg

SEQ ID NO: 28081 - DNA, 28 bp, synthetic construct
  source 1..28: mol_type = other DNA
ggggaagctatgcctgttaggggtgggg

SEQ ID NO: 28082 - DNA, 28 bp, synthetic construct
  source 1..28: mol_type = other DNA
gggaagctatgcctgttaggggtggggg

SEQ ID NO: 28083 - DNA, 28 bp, synthetic construct
  source 1..28: mol_type = other DNA
ggaagctatgcctgttaggggtgggggg

SEQ ID NO: 28084 - DNA, 28 bp, synthetic construct
  source 1..28: mol_type = other DNA
gaagctatgcctgttaggggtggggggg

SEQ ID NO: 28085 - DNA, 28 bp, synthetic construct
  source 1..28: mol_type = other DNA
aagctatgcctgttaggggtgggggggg

SEQ ID NO: 28086 - DNA, 28 bp, synthetic construct
  source 1..28: mol_type = other DNA
atactgcgccccccccacccctaacagg

SEQ ID NO: 28087 - DNA, 28 bp, synthetic construct
  source 1..28: mol_type = other DNA
taggttcacagcaaaattgagaagaagg

SEQ ID NO: 28088 - DNA, 28 bp, synthetic construct
  source 1..28: mol_type = other DNA
acctaaaactgctctataaaaaataagg

SEQ ID NO: 28089 - DNA, 28 bp, synthetic construct
  source 1..28: mol_type = other DNA
accttattttttatagagcagttttagg

SEQ ID NO: 28090 - DNA, 28 bp, synthetic construct
  source 1..28: mol_type = other DNA
taaggtctttaatttaaaagagaaaagg

SEQ ID NO: 28091 - DNA, 28 bp, synthetic construct
  source 1..28: mol_type = other DNA
ctttaatttaaaagagaaaaggaccagg

SEQ ID NO: 28092 - DNA, 28 bp, synthetic construct
  source 1..28: mol_type = other DNA
aatttaaaagagaaaaggaccaggctgg

SEQ ID NO: 28093 - DNA, 28 bp, synthetic construct
  source 1..28: mol_type = other DNA
atttaaaagagaaaaggaccaggctggg

SEQ ID NO: 28094 - DNA, 28 bp, synthetic construct
  source 1..28: mol_type = other DNA
aaaggaccaggctgggctctcctgatgg

SEQ ID NO: 28095 - DNA, 28 bp, synthetic construct
  source 1..28: mol_type = other DNA
tgacagccatcaggagagcccagcctgg

SEQ ID NO: 28096 - DNA, 28 bp, synthetic construct
  source 1..28: mol_type = other DNA
aggctgggctctcctgatggctgtcagg

SEQ ID NO: 28097 - DNA, 28 bp, synthetic construct
  source 1..28: mol_type = other DNA
ctcatgtgtgaacctgacagccatcagg

SEQ ID NO: 28098 - DNA, 28 bp, synthetic construct
  source 1..28: mol_type = other DNA
tggctgtcaggttcacacatgagtgagg

SEQ ID NO: 28099 - DNA, 28 bp, synthetic construct
  source 1..28: mol_type = other DNA
acatacttgagacagtgtgtattcaagg

SEQ ID NO: 28100 - DNA, 28 bp, synthetic construct
  source 1..28: mol_type = other DNA
cagtgtgtattcaaggaccgcaccctgg

SEQ ID NO: 28101 - DNA, 28 bp, synthetic construct
  source 1..28: mol_type = other DNA
ccgcaccctggcatcctcaccaacaagg

SEQ ID NO: 28102 - DNA, 28 bp, synthetic construct
  source 1..28: mol_type = other DNA
gggctccttgttggtgaggatgccaggg

SEQ ID NO: 28103 - DNA, 28 bp, synthetic construct
  source 1..28: mol_type = other DNA
tgggctccttgttggtgaggatgccagg

SEQ ID NO: 28104 - DNA, 28 bp, synthetic construct
  source 1..28: mol_type = other DNA
gttaagtctgggctccttgttggtgagg

SEQ ID NO: 28105 - DNA, 28 bp, synthetic construct
  source 1..28: mol_type = other DNA
gaggagttaagtctgggctccttgttgg

SEQ ID NO: 28106 - DNA, 28 bp, synthetic construct
  source 1..28: mol_type = other DNA
ttgcaaggatggaggagttaagtctggg

SEQ ID NO: 28107 - DNA, 28 bp, synthetic construct
  source 1..28: mol_type = other DNA
attgcaaggatggaggagttaagtctgg

SEQ ID NO: 28108 - DNA, 28 bp, synthetic construct
  source 1..28: mol_type = other DNA
gttgctcagttgattgcaaggatggagg

SEQ ID NO: 28109 - DNA, 28 bp, synthetic construct
  source 1..28: mol_type = other DNA
attgttgctcagttgattgcaaggatgg

SEQ ID NO: 28110 - DNA, 28 bp, synthetic construct
  source 1..28: mol_type = other DNA
ccttgcaatcaactgagcaacaatgagg

SEQ ID NO: 28111 - DNA, 28 bp, synthetic construct
  source 1..28: mol_type = other DNA
acacagagtctcatatagtaacagctgg

SEQ ID NO: 28112 - DNA, 28 bp, synthetic construct
  source 1..28: mol_type = other DNA
cacagagtctcatatagtaacagctggg

SEQ ID NO: 28113 - DNA, 28 bp, synthetic construct
  source 1..28: mol_type = other DNA
acagagtctcatatagtaacagctgggg

SEQ ID NO: 28114 - DNA, 28 bp, synthetic construct
  source 1..28: mol_type = other DNA
agtaacagctggggcgccagaactgtgg

SEQ ID NO: 28115 - DNA, 28 bp, synthetic construct
  source 1..28: mol_type = other DNA
gtaacagctggggcgccagaactgtggg

SEQ ID NO: 28116 - DNA, 28 bp, synthetic construct
  source 1..28: mol_type = other DNA
gcgccagaactgtgggatctagtcaagg

SEQ ID NO: 28117 - DNA, 28 bp, synthetic construct
  source 1..28: mol_type = other DNA
gtaccttgactagatcccacagttctgg

SEQ ID NO: 28118 - DNA, 28 bp, synthetic construct
  source 1..28: mol_type = other DNA
ctgtgggatctagtcaaggtacactagg

SEQ ID NO: 28119 - DNA, 28 bp, synthetic construct
  source 1..28: mol_type = other DNA
tgtgggatctagtcaaggtacactaggg

SEQ ID NO: 28120 - DNA, 28 bp, synthetic construct
  source 1..28: mol_type = other DNA
tagggcgaacatcttaaccctcactagg

SEQ ID NO: 28121 - DNA, 28 bp, synthetic construct
  source 1..28: mol_type = other DNA
tttttaggtaactgaggcctagtgaggg

SEQ ID NO: 28122 - DNA, 28 bp, synthetic construct
  source 1..28: mol_type = other DNA
ctttttaggtaactgaggcctagtgagg

SEQ ID NO: 28123 - DNA, 28 bp, synthetic construct
  source 1..28: mol_type = other DNA
cactaggcctcagttacctaaaaagagg

SEQ ID NO: 28124 - DNA, 28 bp, synthetic construct
  source 1..28: mol_type = other DNA
actaggcctcagttacctaaaaagaggg

SEQ ID NO: 28125 - DNA, 28 bp, synthetic construct
  source 1..28: mol_type = other DNA
gcagctccctctttttaggtaactgagg

SEQ ID NO: 28126 - DNA, 28 bp, synthetic construct
  source 1..28: mol_type = other DNA
actatttttgcagctccctctttttagg

SEQ ID NO: 28127 - DNA, 28 bp, synthetic construct
  source 1..28: mol_type = other DNA
gggagctgcaaaaatagtaataacatgg

SEQ ID NO: 28128 - DNA, 28 bp, synthetic construct
  source 1..28: mol_type = other DNA
ggagctgcaaaaatagtaataacatggg

SEQ ID NO: 28129 - DNA, 28 bp, synthetic construct
  source 1..28: mol_type = other DNA
gagctgcaaaaatagtaataacatgggg

SEQ ID NO: 28130 - DNA, 28 bp, synthetic construct
  source 1..28: mol_type = other DNA
agctgcaaaaatagtaataacatggggg

SEQ ID NO: 28131 - DNA, 28 bp, synthetic construct
  source 1..28: mol_type = other DNA
gctgcaaaaatagtaataacatgggggg

SEQ ID NO: 28132 - DNA, 28 bp, synthetic construct
  source 1..28: mol_type = other DNA
aatagtaataacatggggggttgtgcgg

SEQ ID NO: 28133 - DNA, 28 bp, synthetic construct
  source 1..28: mol_type = other DNA
atagtaataacatggggggttgtgcggg

SEQ ID NO: 28134 - DNA, 28 bp, synthetic construct
  source 1..28: mol_type = other DNA
ggggggttgtgcgggataatcattaagg

SEQ ID NO: 28135 - DNA, 28 bp, synthetic construct
  source 1..28: mol_type = other DNA
aggccccttccagttctaacatttcagg

SEQ ID NO: 28136 - DNA, 28 bp, synthetic construct
  source 1..28: mol_type = other DNA
gatcctgaaatgttagaactggaagggg

SEQ ID NO: 28137 - DNA, 28 bp, synthetic construct
  source 1..28: mol_type = other DNA
agatcctgaaatgttagaactggaaggg

SEQ ID NO: 28138 - DNA, 28 bp, synthetic construct
  source 1..28: mol_type = other DNA
cagatcctgaaatgttagaactggaagg

SEQ ID NO: 28139 - DNA, 28 bp, synthetic construct
  source 1..28: mol_type = other DNA
atttcagatcctgaaatgttagaactgg

SEQ ID NO: 28140 - DNA, 28 bp, synthetic construct
  source 1..28: mol_type = other DNA
tttctttaaccttctaaccttaagaagg

SEQ ID NO: 28141 - DNA, 28 bp, synthetic construct
  source 1..28: mol_type = other DNA
ggattggagccttcttaaggttagaagg

SEQ ID NO: 28142 - DNA, 28 bp, synthetic construct
  source 1..28: mol_type = other DNA
ggagctggggattggagccttcttaagg

SEQ ID NO: 28143 - DNA, 28 bp, synthetic construct
  source 1..28: mol_type = other DNA
cttagaagggattggagctggggattgg

SEQ ID NO: 28144 - DNA, 28 bp, synthetic construct
  source 1..28: mol_type = other DNA
caatccccagctccaatcccttctaagg

SEQ ID NO: 28145 - DNA, 28 bp, synthetic construct
  source 1..28: mol_type = other DNA
tgggccttagaagggattggagctgggg

SEQ ID NO: 28146 - DNA, 28 bp, synthetic construct
  source 1..28: mol_type = other DNA
ctgggccttagaagggattggagctggg

SEQ ID NO: 28147 - DNA, 28 bp, synthetic construct
  source 1..28: mol_type = other DNA
ccagctccaatcccttctaaggcccagg

SEQ ID NO: 28148 - DNA, 28 bp, synthetic construct
  source 1..28: mol_type = other DNA
gctccaatcccttctaaggcccaggtgg

SEQ ID NO: 28149 - DNA, 28 bp, synthetic construct
  source 1..28: mol_type = other DNA
aatccacctgggccttagaagggattgg

SEQ ID NO: 28150 - DNA, 28 bp, synthetic construct
  source 1..28: mol_type = other DNA
agggaaatccacctgggccttagaaggg

SEQ ID NO: 28151 - DNA, 28 bp, synthetic construct
  source 1..28: mol_type = other DNA
tagggaaatccacctgggccttagaagg

SEQ ID NO: 28152 - DNA, 28 bp, synthetic construct
  source 1..28: mol_type = other DNA
actgatgggttagggaaatccacctggg

SEQ ID NO: 28153 - DNA, 28 bp, synthetic construct
  source 1..28: mol_type = other DNA
gactgatgggttagggaaatccacctgg

SEQ ID NO: 28154 - DNA, 28 bp, synthetic construct
  source 1..28: mol_type = other DNA
ctcttatgggaggactgatgggttaggg

SEQ ID NO: 28155 - DNA, 28 bp, synthetic construct
  source 1..28: mol_type = other DNA
gctcttatgggaggactgatgggttagg

SEQ ID NO: 28156 - DNA, 28 bp, synthetic construct
  source 1..28: mol_type = other DNA
tgaaagctcttatgggaggactgatggg

SEQ ID NO: 28157 - DNA, 28 bp, synthetic construct
  source 1..28: mol_type = other DNA
atgaaagctcttatgggaggactgatgg

SEQ ID NO: 28158 - DNA, 28 bp, synthetic construct
  source 1..28: mol_type = other DNA
tcagtcctcccataagagctttcatagg

SEQ ID NO: 28159 - DNA, 28 bp, synthetic construct
  source 1..28: mol_type = other DNA
tagcacctatgaaagctcttatgggagg

SEQ ID NO: 28160 - DNA, 28 bp, synthetic construct
  source 1..28: mol_type = other DNA
ggatagcacctatgaaagctcttatggg

SEQ ID NO: 28161 - DNA, 28 bp, synthetic construct
  source 1..28: mol_type = other DNA
gggatagcacctatgaaagctcttatgg

SEQ ID NO: 28162 - DNA, 28 bp, synthetic construct
  source 1..28: mol_type = other DNA
tttcataggtgctatcccctccccgagg

SEQ ID NO: 28163 - DNA, 28 bp, synthetic construct
  source 1..28: mol_type = other DNA
ttcataggtgctatcccctccccgaggg

SEQ ID NO: 28164 - DNA, 28 bp, synthetic construct
  source 1..28: mol_type = other DNA
agggtctctgactgccctcggggagggg

SEQ ID NO: 28165 - DNA, 28 bp, synthetic construct
  source 1..28: mol_type = other DNA
gagggtctctgactgccctcggggaggg

SEQ ID NO: 28166 - DNA, 28 bp, synthetic construct
  source 1..28: mol_type = other DNA
tgagggtctctgactgccctcggggagg

SEQ ID NO: 28167 - DNA, 28 bp, synthetic construct
  source 1..28: mol_type = other DNA
agctgagggtctctgactgccctcgggg

SEQ ID NO: 28168 - DNA, 28 bp, synthetic construct
  source 1..28: mol_type = other DNA
cagctgagggtctctgactgccctcggg

SEQ ID NO: 28169 - DNA, 28 bp, synthetic construct
  source 1..28: mol_type = other DNA
tcagctgagggtctctgactgccctcgg

SEQ ID NO: 28170 - DNA, 28 bp, synthetic construct
  source 1..28: mol_type = other DNA
gcacagggctgcggatgtcagctgaggg

SEQ ID NO: 28171 - DNA, 28 bp, synthetic construct
  source 1..28: mol_type = other DNA
ggcacagggctgcggatgtcagctgagg

SEQ ID NO: 28172 - DNA, 28 bp, synthetic construct
  source 1..28: mol_type = other DNA
cagctgacatccgcagccctgtgccagg

SEQ ID NO: 28173 - DNA, 28 bp, synthetic construct
  source 1..28: mol_type = other DNA
gaggggaggacctggcacagggctgcgg

SEQ ID NO: 28174 - DNA, 28 bp, synthetic construct
  source 1..28: mol_type = other DNA
aggcaggaggggaggacctggcacaggg

SEQ ID NO: 28175 - DNA, 28 bp, synthetic construct
  source 1..28: mol_type = other DNA
taggcaggaggggaggacctggcacagg

SEQ ID NO: 28176 - DNA, 28 bp, synthetic construct
  source 1..28: mol_type = other DNA
acaagttaggcaggaggggaggacctgg

SEQ ID NO: 28177 - DNA, 28 bp, synthetic construct
  source 1..28: mol_type = other DNA
cctcccctcctgcctaacttgtaccagg

SEQ ID NO: 28178 - DNA, 28 bp, synthetic construct
  source 1..28: mol_type = other DNA
gagcctggtacaagttaggcaggagggg

SEQ ID NO: 28179 - DNA, 28 bp, synthetic construct
  source 1..28: mol_type = other DNA
agagcctggtacaagttaggcaggaggg

SEQ ID NO: 28180 - DNA, 28 bp, synthetic construct
  source 1..28: mol_type = other DNA
cagagcctggtacaagttaggcaggagg

SEQ ID NO: 28181 - DNA, 28 bp, synthetic construct
  source 1..28: mol_type = other DNA
ctcctgcctaacttgtaccaggctctgg

SEQ ID NO: 28182 - DNA, 28 bp, synthetic construct
  source 1..28: mol_type = other DNA
ggccagagcctggtacaagttaggcagg

SEQ ID NO: 28183 - DNA, 28 bp, synthetic construct
  source 1..28: mol_type = other DNA
gcttggccagagcctggtacaagttagg

SEQ ID NO: 28184 - DNA, 28 bp, synthetic construct
  source 1..28: mol_type = other DNA
acacagatcaggcttggccagagcctgg

SEQ ID NO: 28185 - DNA, 28 bp, synthetic construct
  source 1..28: mol_type = other DNA
catgttgaggaacacagatcaggcttgg

SEQ ID NO: 28186 - DNA, 28 bp, synthetic construct
  source 1..28: mol_type = other DNA
caagcctgatctgtgttcctcaacatgg

SEQ ID NO: 28187 - DNA, 28 bp, synthetic construct
  source 1..28: mol_type = other DNA
tgtgccatgttgaggaacacagatcagg

SEQ ID NO: 28188 - DNA, 28 bp, synthetic construct
  source 1..28: mol_type = other DNA
acatgggaagatgtgtgccatgttgagg

SEQ ID NO: 28189 - DNA, 28 bp, synthetic construct
  source 1..28: mol_type = other DNA
ctcgggaggggaggatgaaggacatggg

SEQ ID NO: 28190 - DNA, 28 bp, synthetic construct
  source 1..28: mol_type = other DNA
actcgggaggggaggatgaaggacatgg

SEQ ID NO: 28191 - DNA, 28 bp, synthetic construct
  source 1..28: mol_type = other DNA
tgggtgactcgggaggggaggatgaagg

SEQ ID NO: 28192 - DNA, 28 bp, synthetic construct
  source 1..28: mol_type = other DNA
ttctttgtgggtgactcgggaggggagg

SEQ ID NO: 28193 - DNA, 28 bp, synthetic construct
  source 1..28: mol_type = other DNA
tcccctcccgagtcacccacaaagaagg

SEQ ID NO: 28194 - DNA, 28 bp, synthetic construct
  source 1..28: mol_type = other DNA
gccttctttgtgggtgactcgggagggg

SEQ ID NO: 28195 - DNA, 28 bp, synthetic construct
  source 1..28: mol_type = other DNA
ggccttctttgtgggtgactcgggaggg

SEQ ID NO: 28196 - DNA, 28 bp, synthetic construct
  source 1..28: mol_type = other DNA
gggccttctttgtgggtgactcgggagg

SEQ ID NO: 28197 - DNA, 28 bp, synthetic construct
  source 1..28: mol_type = other DNA
gtggggccttctttgtgggtgactcggg

SEQ ID NO: 28198 - DNA, 28 bp, synthetic construct
  source 1..28: mol_type = other DNA
agtggggccttctttgtgggtgactcgg

SEQ ID NO: 28199 - DNA, 28 bp, synthetic construct
  source 1..28: mol_type = other DNA
gtggagacagtggggccttctttgtggg

SEQ ID NO: 28200 - DNA, 28 bp, synthetic construct
  source 1..28: mol_type = other DNA
agtggagacagtggggccttctttgtgg

SEQ ID NO: 28201 - DNA, 28 bp, synthetic construct
  source 1..28: mol_type = other DNA
ccccactgtctccactcagcctccgagg

SEQ ID NO: 28202 - DNA, 28 bp, synthetic construct
  source 1..28: mol_type = other DNA
gcctcggaggctgagtggagacagtggg

SEQ ID NO: 28203 - DNA, 28 bp, synthetic construct
  source 1..28: mol_type = other DNA
ggcctcggaggctgagtggagacagtgg

SEQ ID NO: 28204 - DNA, 28 bp, synthetic construct
  source 1..28: mol_type = other DNA
tgtaatctgggcctcggaggctgagtgg

SEQ ID NO: 28205 - DNA, 28 bp, synthetic construct
  source 1..28: mol_type = other DNA
gggtggtgtgtaatctgggcctcggagg

SEQ ID NO: 28206 - DNA, 28 bp, synthetic construct
  source 1..28: mol_type = other DNA
agcgggtggtgtgtaatctgggcctcgg

SEQ ID NO: 28207 - DNA, 28 bp, synthetic construct
  source 1..28: mol_type = other DNA
gtgtttagcgggtggtgtgtaatctggg

SEQ ID NO: 28208 - DNA, 28 bp, synthetic construct
  source 1..28: mol_type = other DNA
ggtgtttagcgggtggtgtgtaatctgg

SEQ ID NO: 28209 - DNA, 28 bp, synthetic construct
  source 1..28: mol_type = other DNA
aattctggctcaggtgtttagcgggtgg

SEQ ID NO: 28210 - DNA, 28 bp, synthetic construct
  source 1..28: mol_type = other DNA
gtgaattctggctcaggtgtttagcggg

SEQ ID NO: 28211 - DNA, 28 bp, synthetic construct
  source 1..28: mol_type = other DNA
tgtgaattctggctcaggtgtttagcgg

SEQ ID NO: 28212 - DNA, 28 bp, synthetic construct
  source 1..28: mol_type = other DNA
tcttttgcagtgtgaattctggctcagg

SEQ ID NO: 28213 - DNA, 28 bp, synthetic construct
  source 1..28: mol_type = other DNA
tgagccagaattcacactgcaaaagagg

SEQ ID NO: 28214 - DNA, 28 bp, synthetic construct
  source 1..28: mol_type = other DNA
cagtcctcttttgcagtgtgaattctgg

SEQ ID NO: 28215 - DNA, 28 bp, synthetic construct
  source 1..28: mol_type = other DNA
cagaattcacactgcaaaagaggactgg

SEQ ID NO: 28216 - DNA, 28 bp, synthetic construct
  source 1..28: mol_type = other DNA
aggactggagagcacctaactaagctgg

SEQ ID NO: 28217 - DNA, 28 bp, synthetic construct
  source 1..28: mol_type = other DNA
gagagcacctaactaagctggagagagg

SEQ ID NO: 28218 - DNA, 28 bp, synthetic construct
  source 1..28: mol_type = other DNA
agagcacctaactaagctggagagaggg

SEQ ID NO: 28219 - DNA, 28 bp, synthetic construct
  source 1..28: mol_type = other DNA
ctgtcaccctctctccagcttagttagg

SEQ ID NO: 28220 - DNA, 28 bp, synthetic construct
  source 1..28: mol_type = other DNA
gctggagagagggtgacagttcgttagg

SEQ ID NO: 28221 - DNA, 28 bp, synthetic construct
  source 1..28: mol_type = other DNA
agttcgttaggcgctaccgtatgccagg

SEQ ID NO: 28222 - DNA, 28 bp, synthetic construct
  source 1..28: mol_type = other DNA
ttaggcgctaccgtatgccaggtgctgg

SEQ ID NO: 28223 - DNA, 28 bp, synthetic construct
  source 1..28: mol_type = other DNA
taggcgctaccgtatgccaggtgctggg

SEQ ID NO: 28224 - DNA, 28 bp, synthetic construct
  source 1..28: mol_type = other DNA
atgatgcggcccagcacctggcatacgg

SEQ ID NO: 28225 - DNA, 28 bp, synthetic construct
  source 1..28: mol_type = other DNA
gtgcgtcatgatgcggcccagcacctgg

SEQ ID NO: 28226 - DNA, 28 bp, synthetic construct
  source 1..28: mol_type = other DNA
aaatgaggtcatgtgcgtcatgatgcgg

SEQ ID NO: 28227 - DNA, 28 bp, synthetic construct
  source 1..28: mol_type = other DNA
atatctgtgtggcaagaagaaaatgagg

SEQ ID NO: 28228 - DNA, 28 bp, synthetic construct
  source 1..28: mol_type = other DNA
tcattttcttcttgccacacagatatgg

SEQ ID NO: 28229 - DNA, 28 bp, synthetic construct
  source 1..28: mol_type = other DNA
gtggatgataatttccatatctgtgtgg

SEQ ID NO: 28230 - DNA, 28 bp, synthetic construct
  source 1..28: mol_type = other DNA
aaattatcatccacactttccagcaagg

SEQ ID NO: 28231 - DNA, 28 bp, synthetic construct
  source 1..28: mol_type = other DNA
cgactggtttccttgctggaaagtgtgg

SEQ ID NO: 28232 - DNA, 28 bp, synthetic construct
  source 1..28: mol_type = other DNA
tagctgcgtcgactggtttccttgctgg

SEQ ID NO: 28233 - DNA, 28 bp, synthetic construct
  source 1..28: mol_type = other DNA
aaggaaaccagtcgacgcagctacatgg

SEQ ID NO: 28234 - DNA, 28 bp, synthetic construct
  source 1..28: mol_type = other DNA
accagtcgacgcagctacatggatgagg

SEQ ID NO: 28235 - DNA, 28 bp, synthetic construct
  source 1..28: mol_type = other DNA
tcctcatccatgtagctgcgtcgactgg

SEQ ID NO: 28236 - DNA, 28 bp, synthetic construct
  source 1..28: mol_type = other DNA
agtcatttgcctgagaatacacagctgg

SEQ ID NO: 28237 - DNA, 28 bp, synthetic construct
  source 1..28: mol_type = other DNA
tgcctgagaatacacagctggttagtgg

SEQ ID NO: 28238 - DNA, 28 bp, synthetic construct
  source 1..28: mol_type = other DNA
taccactaaccagctgtgtattctcagg

SEQ ID NO: 28239 - DNA, 28 bp, synthetic construct
  source 1..28: mol_type = other DNA
actgatgttggaatctgacagattgagg

SEQ ID NO: 28240 - DNA, 28 bp, synthetic construct
  source 1..28: mol_type = other DNA
agagcagtggaaagggcactgatgttgg

SEQ ID NO: 28241 - DNA, 28 bp, synthetic construct
  source 1..28: mol_type = other DNA
gccctttccactgctctacactgcctgg

SEQ ID NO: 28242 - DNA, 28 bp, synthetic construct
  source 1..28: mol_type = other DNA
tccaggcagtgtagagcagtggaaaggg

SEQ ID NO: 28243 - DNA, 28 bp, synthetic construct
  source 1..28: mol_type = other DNA
ctccaggcagtgtagagcagtggaaagg

SEQ ID NO: 28244 - DNA, 28 bp, synthetic construct
  source 1..28: mol_type = other DNA
ttccactgctctacactgcctggagagg

SEQ ID NO: 28245 - DNA, 28 bp, synthetic construct
  source 1..28: mol_type = other DNA
cgcctctccaggcagtgtagagcagtgg

SEQ ID NO: 28246 - DNA, 28 bp, synthetic construct
  source 1..28: mol_type = other DNA
cactgctctacactgcctggagaggcgg

SEQ ID NO: 28247 - DNA, 28 bp, synthetic construct
  source 1..28: mol_type = other DNA
gctctacactgcctggagaggcggcagg

SEQ ID NO: 28248 - DNA, 28 bp, synthetic construct
  source 1..28: mol_type = other DNA
ctgagcttcagcctgccgcctctccagg

SEQ ID NO: 28249 - DNA, 28 bp, synthetic construct
  source 1..28: mol_type = other DNA
ggagaggcggcaggctgaagctcagagg

SEQ ID NO: 28250 - DNA, 28 bp, synthetic construct
  source 1..28: mol_type = other DNA
gaggcggcaggctgaagctcagaggtgg

SEQ ID NO: 28251 - DNA, 28 bp, synthetic construct
  source 1..28: mol_type = other DNA
aggcggcaggctgaagctcagaggtggg

SEQ ID NO: 28252 - DNA, 28 bp, synthetic construct
  source 1..28: mol_type = other DNA
gttctggagaactggaaagtaggtctgg

SEQ ID NO: 28253 - DNA, 28 bp, synthetic construct
  source 1..28: mol_type = other DNA
ggcacgttctggagaactggaaagtagg

SEQ ID NO: 28254 - DNA, 28 bp, synthetic construct
  source 1..28: mol_type = other DNA
gaacttggggcacgttctggagaactgg

SEQ ID NO: 28255 - DNA, 28 bp, synthetic construct
  source 1..28: mol_type = other DNA
ggggctaggaacttggggcacgttctgg

SEQ ID NO: 28256 - DNA, 28 bp, synthetic construct
  source 1..28: mol_type = other DNA
tataaaggcaggggctaggaacttgggg

SEQ ID NO: 28257 - DNA, 28 bp, synthetic construct
  source 1..28: mol_type = other DNA
atataaaggcaggggctaggaacttggg

SEQ ID NO: 28258 - DNA, 28 bp, synthetic construct
  source 1..28: mol_type = other DNA
catataaaggcaggggctaggaacttgg

SEQ ID NO: 28259 - DNA, 28 bp, synthetic construct
  source 1..28: mol_type = other DNA
ctagagacatataaaggcaggggctagg

SEQ ID NO: 28260 - DNA, 28 bp, synthetic construct
  source 1..28: mol_type = other DNA
taaagctagagacatataaaggcagggg

SEQ ID NO: 28261 - DNA, 28 bp, synthetic construct
  source 1..28: mol_type = other DNA
ataaagctagagacatataaaggcaggg

SEQ ID NO: 28262 - DNA, 28 bp, synthetic construct
  source 1..28: mol_type = other DNA
tataaagctagagacatataaaggcagg

SEQ ID NO: 28263 - DNA, 28 bp, synthetic construct
  source 1..28: mol_type = other DNA
tgcatataaagctagagacatataaagg

SEQ ID NO: 28264 - DNA, 28 bp, synthetic construct
  source 1..28: mol_type = other DNA
tatgtctctagctttatatgcaaccagg

SEQ ID NO: 28265 - DNA, 28 bp, synthetic construct
  source 1..28: mol_type = other DNA
gtctctagctttatatgcaaccaggtgg

SEQ ID NO: 28266 - DNA, 28 bp, synthetic construct
  source 1..28: mol_type = other DNA
aggtgatgtggggcagattgccacctgg

SEQ ID NO: 28267 - DNA, 28 bp, synthetic construct
  source 1..28: mol_type = other DNA
ctgccccacatcacctgcagtcaacagg

SEQ ID NO: 28268 - DNA, 28 bp, synthetic construct
  source 1..28: mol_type = other DNA
tgccccacatcacctgcagtcaacaggg

SEQ ID NO: 28269 - DNA, 28 bp, synthetic construct
  source 1..28: mol_type = other DNA
aaccctgttgactgcaggtgatgtgggg

SEQ ID NO: 28270 - DNA, 28 bp, synthetic construct
  source 1..28: mol_type = other DNA
aaaccctgttgactgcaggtgatgtggg

SEQ ID NO: 28271 - DNA, 28 bp, synthetic construct
  source 1..28: mol_type = other DNA
taaaccctgttgactgcaggtgatgtgg

SEQ ID NO: 28272 - DNA, 28 bp, synthetic construct
  source 1..28: mol_type = other DNA
tgagattctaaaccctgttgactgcagg

SEQ ID NO: 28273 - DNA, 28 bp, synthetic construct
  source 1..28: mol_type = other DNA
tgcagtcaacagggtttagaatctcagg

SEQ ID NO: 28274 - DNA, 28 bp, synthetic construct
  source 1..28: mol_type = other DNA
gtcaacagggtttagaatctcaggctgg

SEQ ID NO: 28275 - DNA, 28 bp, synthetic construct
  source 1..28: mol_type = other DNA
acagggtttagaatctcaggctggaagg

SEQ ID NO: 28276 - DNA, 28 bp, synthetic construct
  source 1..28: mol_type = other DNA
cagggtttagaatctcaggctggaaggg

SEQ ID NO: 28277 - DNA, 28 bp, synthetic construct
  source 1..28: mol_type = other DNA
aatctcaggctggaagggagctcagagg

SEQ ID NO: 28278 - DNA, 28 bp, synthetic construct
  source 1..28: mol_type = other DNA
ctcagaggactgggtaagcacaggatgg

SEQ ID NO: 28279 - DNA, 28 bp, synthetic construct
  source 1..28: mol_type = other DNA
catcctgtgcttacccagtcctctgagg

SEQ ID NO: 28280 - DNA, 28 bp, synthetic construct
  source 1..28: mol_type = other DNA
gctcctcagaggactgggtaagcacagg

SEQ ID NO: 28281 - DNA, 28 bp, synthetic construct
  source 1..28: mol_type = other DNA
gcttacccagtcctctgaggagcccagg

SEQ ID NO: 28282 - DNA, 28 bp, synthetic construct
  source 1..28: mol_type = other DNA
cttacccagtcctctgaggagcccaggg

SEQ ID NO: 28283 - DNA, 28 bp, synthetic construct
  source 1..28: mol_type = other DNA
gagtccctgggctcctcagaggactggg

SEQ ID NO: 28284 - DNA, 28 bp, synthetic construct
  source 1..28: mol_type = other DNA
ggagtccctgggctcctcagaggactgg

SEQ ID NO: 28285 - DNA, 28 bp, synthetic construct
  source 1..28: mol_type = other DNA
cagctggagtccctgggctcctcagagg

SEQ ID NO: 28286 - DNA, 28 bp, synthetic construct
  source 1..28: mol_type = other DNA
ctctgaggagcccagggactccagctgg

SEQ ID NO: 28287 - DNA, 28 bp, synthetic construct
  source 1..28: mol_type = other DNA
ctaaagttggccagctggagtccctggg

SEQ ID NO: 28288 - DNA, 28 bp, synthetic construct
  source 1..28: mol_type = other DNA
gctaaagttggccagctggagtccctgg

SEQ ID NO: 28289 - DNA, 28 bp, synthetic construct
  source 1..28: mol_type = other DNA
atctggattgctaaagttggccagctgg

SEQ ID NO: 28290 - DNA, 28 bp, synthetic construct
  source 1..28: mol_type = other DNA
ttggtgagatctggattgctaaagttgg

SEQ ID NO: 28291 - DNA, 28 bp, synthetic construct
  source 1..28: mol_type = other DNA
ttttggggaggaagttggtgagatctgg

SEQ ID NO: 28292 - DNA, 28 bp, synthetic construct
  source 1..28: mol_type = other DNA
ccaacttcctccccaaaacaattcctgg

SEQ ID NO: 28293 - DNA, 28 bp, synthetic construct
  source 1..28: mol_type = other DNA
caacttcctccccaaaacaattcctggg

SEQ ID NO: 28294 - DNA, 28 bp, synthetic construct
  source 1..28: mol_type = other DNA
aacttcctccccaaaacaattcctgggg

SEQ ID NO: 28295 - DNA, 28 bp, synthetic construct
  source 1..28: mol_type = other DNA
ggctgccccaggaattgttttggggagg

SEQ ID NO: 28296 - DNA, 28 bp, synthetic construct
  source 1..28: mol_type = other DNA
gctggctgccccaggaattgttttgggg

SEQ ID NO: 28297 - DNA, 28 bp, synthetic construct
  source 1..28: mol_type = other DNA
tgctggctgccccaggaattgttttggg

SEQ ID NO: 28298 - DNA, 28 bp, synthetic construct
  source 1..28: mol_type = other DNA
gtgctggctgccccaggaattgttttgg

SEQ ID NO: 28299 - DNA, 28 bp, synthetic construct
  source 1..28: mol_type = other DNA
aaacaattcctggggcagccagcactgg

SEQ ID NO: 28300 - DNA, 28 bp, synthetic construct
  source 1..28: mol_type = other DNA
aactgtagccagtgctggctgccccagg

SEQ ID NO: 28301 - DNA, 28 bp, synthetic construct
  source 1..28: mol_type = other DNA
ggggcagccagcactggctacagttagg

SEQ ID NO: 28302 - DNA, 28 bp, synthetic construct
  source 1..28: mol_type = other DNA
ggagcagcctaactgtagccagtgctgg

SEQ ID NO: 28303 - DNA, 28 bp, synthetic construct
  source 1..28: mol_type = other DNA
aggctgctcccagttctgtttccactgg

SEQ ID NO: 28304 - DNA, 28 bp, synthetic construct
  source 1..28: mol_type = other DNA
gagaagggccagtggaaacagaactggg

SEQ ID NO: 28305 - DNA, 28 bp, synthetic construct
  source 1..28: mol_type = other DNA
agagaagggccagtggaaacagaactgg

SEQ ID NO: 28306 - DNA, 28 bp, synthetic construct
  source 1..28: mol_type = other DNA
tccactggcccttctctcccctctgtgg

SEQ ID NO: 28307 - DNA, 28 bp, synthetic construct
  source 1..28: mol_type = other DNA
accacagaggggagagaagggccagtgg

SEQ ID NO: 28308 - DNA, 28 bp, synthetic construct
  source 1..28: mol_type = other DNA
cccttctctcccctctgtggtcccctgg

SEQ ID NO: 28309 - DNA, 28 bp, synthetic construct
  source 1..28: mol_type = other DNA
tccaggggaccacagaggggagagaagg

SEQ ID NO: 28310 - DNA, 28 bp, synthetic construct
  source 1..28: mol_type = other DNA
ctcccctctgtggtcccctggaataagg

SEQ ID NO: 28311 - DNA, 28 bp, synthetic construct
  source 1..28: mol_type = other DNA
ttccttattccaggggaccacagagggg

SEQ ID NO: 28312 - DNA, 28 bp, synthetic construct
  source 1..28: mol_type = other DNA
gttccttattccaggggaccacagaggg

SEQ ID NO: 28313 - DNA, 28 bp, synthetic construct
  source 1..28: mol_type = other DNA
tgttccttattccaggggaccacagagg

SEQ ID NO: 28314 - DNA, 28 bp, synthetic construct
  source 1..28: mol_type = other DNA
atgggcatcttgttccttattccagggg

SEQ ID NO: 28315 - DNA, 28 bp, synthetic construct
  source 1..28: mol_type = other DNA
gatgggcatcttgttccttattccaggg

SEQ ID NO: 28316 - DNA, 28 bp, synthetic construct
  source 1..28: mol_type = other DNA
agatgggcatcttgttccttattccagg

SEQ ID NO: 28317 - DNA, 28 bp, synthetic construct
  source 1..28: mol_type = other DNA
cagggctggctgtcatgctgaagatggg

SEQ ID NO: 28318 - DNA, 28 bp, synthetic construct
  source 1..28: mol_type = other DNA
tcagggctggctgtcatgctgaagatgg

SEQ ID NO: 28319 - DNA, 28 bp, synthetic construct
  source 1..28: mol_type = other DNA
atcttcagcatgacagccagccctgagg

SEQ ID NO: 28320 - DNA, 28 bp, synthetic construct
  source 1..28: mol_type = other DNA
catgacagccagccctgaggacatttgg

SEQ ID NO: 28321 - DNA, 28 bp, synthetic construct
  source 1..28: mol_type = other DNA
tgcaggttccaaatgtcctcagggctgg

SEQ ID NO: 28322 - DNA, 28 bp, synthetic construct
  source 1..28: mol_type = other DNA
aggctgcaggttccaaatgtcctcaggg

SEQ ID NO: 28323 - DNA, 28 bp, synthetic construct
  source 1..28: mol_type = other DNA
aaggctgcaggttccaaatgtcctcagg

SEQ ID NO: 28324 - DNA, 28 bp, synthetic construct
  source 1..28: mol_type = other DNA
tgtggaacagtatagagaaggctgcagg

SEQ ID NO: 28325 - DNA, 28 bp, synthetic construct
  source 1..28: mol_type = other DNA
cagccttctctatactgttccacatagg

SEQ ID NO: 28326 - DNA, 28 bp, synthetic construct
  source 1..28: mol_type = other DNA
agccttctctatactgttccacataggg

SEQ ID NO: 28327 - DNA, 28 bp, synthetic construct
  source 1..28: mol_type = other DNA
gtccctatgtggaacagtatagagaagg

SEQ ID NO: 28328 - DNA, 28 bp, synthetic construct
  source 1..28: mol_type = other DNA
gactggagggggggcagtccctatgtgg

SEQ ID NO: 28329 - DNA, 28 bp, synthetic construct
  source 1..28: mol_type = other DNA
gagggttggtgggggactggaggggggg

SEQ ID NO: 28330 - DNA, 28 bp, synthetic construct
  source 1..28: mol_type = other DNA
agagggttggtgggggactggagggggg

SEQ ID NO: 28331 - DNA, 28 bp, synthetic construct
  source 1..28: mol_type = other DNA
tagagggttggtgggggactggaggggg

SEQ ID NO: 28332 - DNA, 28 bp, synthetic construct
  source 1..28: mol_type = other DNA
gtagagggttggtgggggactggagggg

SEQ ID NO: 28333 - DNA, 28 bp, synthetic construct
  source 1..28: mol_type = other DNA
ggtagagggttggtgggggactggaggg

SEQ ID NO: 28334 - DNA, 28 bp, synthetic construct
  source 1..28: mol_type = other DNA
gggtagagggttggtgggggactggagg

SEQ ID NO: 28335 - DNA, 28 bp, synthetic construct
  source 1..28: mol_type = other DNA
gtggggtagagggttggtgggggactgg

SEQ ID NO: 28336 - DNA, 28 bp, synthetic construct
  source 1..28: mol_type = other DNA
atagtgtggggtagagggttggtggggg

SEQ ID NO: 28337 - DNA, 28 bp, synthetic construct
  source 1..28: mol_type = other DNA
gatagtgtggggtagagggttggtgggg

SEQ ID NO: 28338 - DNA, 28 bp, synthetic construct
  source 1..28: mol_type = other DNA
agatagtgtggggtagagggttggtggg

SEQ ID NO: 28339 - DNA, 28 bp, synthetic construct
  source 1..28: mol_type = other DNA
gagatagtgtggggtagagggttggtgg

SEQ ID NO: 28340 - DNA, 28 bp, synthetic construct
  source 1..28: mol_type = other DNA
ctagagatagtgtggggtagagggttgg

SEQ ID NO: 28341 - DNA, 28 bp, synthetic construct
  source 1..28: mol_type = other DNA
ccctctaccccacactatctctagttgg

SEQ ID NO: 28342 - DNA, 28 bp, synthetic construct
  source 1..28: mol_type = other DNA
accaactagagatagtgtggggtagagg

SEQ ID NO: 28343 - DNA, 28 bp, synthetic construct
  source 1..28: mol_type = other DNA
gctagaaccaactagagatagtgtgggg

SEQ ID NO: 28344 - DNA, 28 bp, synthetic construct
  source 1..28: mol_type = other DNA
tgctagaaccaactagagatagtgtggg

SEQ ID NO: 28345 - DNA, 28 bp, synthetic construct
  source 1..28: mol_type = other DNA
gtgctagaaccaactagagatagtgtgg

SEQ ID NO: 28346 - DNA, 28 bp, synthetic construct
  source 1..28: mol_type = other DNA
cactatctctagttggttctagcactgg

SEQ ID NO: 28347 - DNA, 28 bp, synthetic construct
  source 1..28: mol_type = other DNA
gttctagcactggacccaacattccagg

SEQ ID NO: 28348 - DNA, 28 bp, synthetic construct
  source 1..28: mol_type = other DNA
agcactggacccaacattccaggcatgg

SEQ ID NO: 28349 - DNA, 28 bp, synthetic construct
  source 1..28: mol_type = other DNA
tcaggcaaaccatgcctggaatgttggg

SEQ ID NO: 28350 - DNA, 28 bp, synthetic construct
  source 1..28: mol_type = other DNA
gtcaggcaaaccatgcctggaatgttgg

SEQ ID NO: 28351 - DNA, 28 bp, synthetic construct
  source 1..28: mol_type = other DNA
tgcatttggtcaggcaaaccatgcctgg

SEQ ID NO: 28352 - DNA, 28 bp, synthetic construct
  source 1..28: mol_type = other DNA
aggcatggtttgcctgaccaaatgcagg

SEQ ID NO: 28353 - DNA, 28 bp, synthetic construct
  source 1..28: mol_type = other DNA
tggaggtgaaagcctgcatttggtcagg

SEQ ID NO: 28354 - DNA, 28 bp, synthetic construct
  source 1..28: mol_type = other DNA
aagggtggaggtgaaagcctgcatttgg

SEQ ID NO: 28355 - DNA, 28 bp, synthetic construct
  source 1..28: mol_type = other DNA
tgcaggctttcacctccacccttttagg

SEQ ID NO: 28356 - DNA, 28 bp, synthetic construct
  source 1..28: mol_type = other DNA
aggaatatactacctaaaagggtggagg

SEQ ID NO: 28357 - DNA, 28 bp, synthetic construct
  source 1..28: mol_type = other DNA
aataggaatatactacctaaaagggtgg

SEQ ID NO: 28358 - DNA, 28 bp, synthetic construct
  source 1..28: mol_type = other DNA
ctcaataggaatatactacctaaaaggg

SEQ ID NO: 28359 - DNA, 28 bp, synthetic construct
  source 1..28: mol_type = other DNA
ccttttaggtagtatattcctattgagg

SEQ ID NO: 28360 - DNA, 28 bp, synthetic construct
  source 1..28: mol_type = other DNA
cttttaggtagtatattcctattgaggg

SEQ ID NO: 28361 - DNA, 28 bp, synthetic construct
  source 1..28: mol_type = other DNA
gtagtatattcctattgagggagcctgg

SEQ ID NO: 28362 - DNA, 28 bp, synthetic construct
  source 1..28: mol_type = other DNA
tagtatattcctattgagggagcctggg

SEQ ID NO: 28363 - DNA, 28 bp, synthetic construct
  source 1..28: mol_type = other DNA
aaatgtatacccaggctccctcaatagg

SEQ ID NO: 28364 - DNA, 28 bp, synthetic construct
  source 1..28: mol_type = other DNA
ctgtaagaaaagcaaatgtatacccagg

SEQ ID NO: 28365 - DNA, 28 bp, synthetic construct
  source 1..28: mol_type = other DNA
tcattgagaaaggacattcttcagtagg

SEQ ID NO: 28366 - DNA, 28 bp, synthetic construct
  source 1..28: mol_type = other DNA
acatgcaggttgttgtcattgagaaagg

SEQ ID NO: 28367 - DNA, 28 bp, synthetic construct
  source 1..28: mol_type = other DNA
acaacaacctgcatgtatgcctaactgg

SEQ ID NO: 28368 - DNA, 28 bp, synthetic construct
  source 1..28: mol_type = other DNA
gttctcaccagttaggcatacatgcagg

SEQ ID NO: 28369 - DNA, 28 bp, synthetic construct
  source 1..28: mol_type = other DNA
catgagaactttgttctcaccagttagg

SEQ ID NO: 28370 - DNA, 28 bp, synthetic construct
  source 1..28: mol_type = other DNA
gttctcatgtagaaacgtgtgcttgagg

SEQ ID NO: 28371 - DNA, 28 bp, synthetic construct
  source 1..28: mol_type = other DNA
ttctcatgtagaaacgtgtgcttgaggg

SEQ ID NO: 28372 - DNA, 28 bp, synthetic construct
  source 1..28: mol_type = other DNA
catgtagaaacgtgtgcttgagggctgg

SEQ ID NO: 28373 - DNA, 28 bp, synthetic construct
  source 1..28: mol_type = other DNA
atgtagaaacgtgtgcttgagggctggg

SEQ ID NO: 28374 - DNA, 28 bp, synthetic construct
  source 1..28: mol_type = other DNA
gaaacgtgtgcttgagggctgggtgcgg

SEQ ID NO: 28375 - DNA, 28 bp, synthetic construct
  source 1..28: mol_type = other DNA
acgtgtgcttgagggctgggtgcggtgg

SEQ ID NO: 28376 - DNA, 28 bp, synthetic construct
  source 1..28: mol_type = other DNA
gctcatgcctgtaattccagcactttgg

SEQ ID NO: 28377 - DNA, 28 bp, synthetic construct
  source 1..28: mol_type = other DNA
ctcatgcctgtaattccagcactttggg

SEQ ID NO: 28378 - DNA, 28 bp, synthetic construct
  source 1..28: mol_type = other DNA
atgcctgtaattccagcactttgggagg

SEQ ID NO: 28379 - DNA, 28 bp, synthetic construct
  source 1..28: mol_type = other DNA
cggcctcccaaagtgctggaattacagg

SEQ ID NO: 28380 - DNA, 28 bp, synthetic construct
  source 1..28: mol_type = other DNA
gtaattccagcactttgggaggccgagg

SEQ ID NO: 28381 - DNA, 28 bp, synthetic construct
  source 1..28: mol_type = other DNA
attccagcactttgggaggccgaggtgg

SEQ ID NO: 28382 - DNA, 28 bp, synthetic construct
  source 1..28: mol_type = other DNA
ttccagcactttgggaggccgaggtggg

SEQ ID NO: 28383 - DNA, 28 bp, synthetic construct
  source 1..28: mol_type = other DNA
cgcccacctcggcctcccaaagtgctgg

SEQ ID NO: 28384 - DNA, 28 bp, synthetic construct
  source 1..28: mol_type = other DNA
cagcactttgggaggccgaggtgggcgg

SEQ ID NO: 28385 - DNA, 28 bp, synthetic construct
  source 1..28: mol_type = other DNA
gaggccgaggtgggcggatcacctgagg

SEQ ID NO: 28386 - DNA, 28 bp, synthetic construct
  source 1..28: mol_type = other DNA
ctgacctcaggtgatccgcccacctcgg

SEQ ID NO: 28387 - DNA, 28 bp, synthetic construct
  source 1..28: mol_type = other DNA
cgaggtgggcggatcacctgaggtcagg

SEQ ID NO: 28388 - DNA, 28 bp, synthetic construct
  source 1..28: mol_type = other DNA
aggctgatctcgaactcctgacctcagg

SEQ ID NO: 28389 - DNA, 28 bp, synthetic construct
  source 1..28: mol_type = other DNA
tgaggtcaggagttcgagatcagcctgg

SEQ ID NO: 28390 - DNA, 28 bp, synthetic construct
  source 1..28: mol_type = other DNA
gagttcgagatcagcctggccaacatgg

SEQ ID NO: 28391 - DNA, 28 bp, synthetic construct
  source 1..28: mol_type = other DNA
gagactgggttttgccatgttggccagg

SEQ ID NO: 28392 - DNA, 28 bp, synthetic construct
  source 1..28: mol_type = other DNA
tagtagagactgggttttgccatgttgg

SEQ ID NO: 28393 - DNA, 28 bp, synthetic construct
  source 1..28: mol_type = other DNA
aatttttgtatttttagtagagactggg

SEQ ID NO: 28394 - DNA, 28 bp, synthetic construct
  source 1..28: mol_type = other DNA
taatttttgtatttttagtagagactgg

SEQ ID NO: 28395 - DNA, 28 bp, synthetic construct
  source 1..28: mol_type = other DNA
tctactaaaaatacaaaaattagccagg

SEQ ID NO: 28396 - DNA, 28 bp, synthetic construct
  source 1..28: mol_type = other DNA
taaaaatacaaaaattagccaggtgtgg

SEQ ID NO: 28397 - DNA, 28 bp, synthetic construct
  source 1..28: mol_type = other DNA
aaatacaaaaattagccaggtgtggtgg

SEQ ID NO: 28398 - DNA, 28 bp, synthetic construct
  source 1..28: mol_type = other DNA
tacaaaaattagccaggtgtggtggcgg

SEQ ID NO: 28399 - DNA, 28 bp, synthetic construct
  source 1..28: mol_type = other DNA
acaaaaattagccaggtgtggtggcggg

SEQ ID NO: 28400 - DNA, 28 bp, synthetic construct
  source 1..28: mol_type = other DNA
gactacaggcacccgccaccacacctgg

SEQ ID NO: 28401 - DNA, 28 bp, synthetic construct
  source 1..28: mol_type = other DNA
ggcgggtgcctgtagtcccagctactgg

SEQ ID NO: 28402 - DNA, 28 bp, synthetic construct
  source 1..28: mol_type = other DNA
gcgggtgcctgtagtcccagctactggg

SEQ ID NO: 28403 - DNA, 28 bp, synthetic construct
  source 1..28: mol_type = other DNA
cgggtgcctgtagtcccagctactgggg

SEQ ID NO: 28404 - DNA, 28 bp, synthetic construct
  source 1..28: mol_type = other DNA
gtgcctgtagtcccagctactggggagg

SEQ ID NO: 28405 - DNA, 28 bp, synthetic construct
  source 1..28: mol_type = other DNA
cagcctccccagtagctgggactacagg

SEQ ID NO: 28406 - DNA, 28 bp, synthetic construct
  source 1..28: mol_type = other DNA
gtagtcccagctactggggaggctgagg

SEQ ID NO: 28407 - DNA, 28 bp, synthetic construct
  source 1..28: mol_type = other DNA
tcccagctactggggaggctgaggtagg

SEQ ID NO: 28408 - DNA, 28 bp, synthetic construct
  source 1..28: mol_type = other DNA
tcctacctcagcctccccagtagctggg

SEQ ID NO: 28409 - DNA, 28 bp, synthetic construct
  source 1..28: mol_type = other DNA
ctcctacctcagcctccccagtagctgg

SEQ ID NO: 28410 - DNA, 28 bp, synthetic construct
  source 1..28: mol_type = other DNA
ctgaggtaggagaatcgcttgaacttgg

SEQ ID NO: 28411 - DNA, 28 bp, synthetic construct
  source 1..28: mol_type = other DNA
tgaggtaggagaatcgcttgaacttggg

SEQ ID NO: 28412 - DNA, 28 bp, synthetic construct
  source 1..28: mol_type = other DNA
ggtaggagaatcgcttgaacttgggagg

SEQ ID NO: 28413 - DNA, 28 bp, synthetic construct
  source 1..28: mol_type = other DNA
aggagaatcgcttgaacttgggaggtgg

SEQ ID NO: 28414 - DNA, 28 bp, synthetic construct
  source 1..28: mol_type = other DNA
aggctggagtgctgtggcgtgatctcgg

SEQ ID NO: 28415 - DNA, 28 bp, synthetic construct
  source 1..28: mol_type = other DNA
gagatcacgccacagcactccagcctgg

SEQ ID NO: 28416 - DNA, 28 bp, synthetic construct
  source 1..28: mol_type = other DNA
agatcacgccacagcactccagcctggg

SEQ ID NO: 28417 - DNA, 28 bp, synthetic construct
  source 1..28: mol_type = other DNA
ctctgtctcccaggctggagtgctgtgg

SEQ ID NO: 28418 - DNA, 28 bp, synthetic construct
  source 1..28: mol_type = other DNA
cagcactccagcctgggagacagagtgg

SEQ ID NO: 28419 - DNA, 28 bp, synthetic construct
  source 1..28: mol_type = other DNA
agcactccagcctgggagacagagtggg

SEQ ID NO: 28420 - DNA, 28 bp, synthetic construct
  source 1..28: mol_type = other DNA
tggagtcccactctgtctcccaggctgg

SEQ ID NO: 28421 - DNA, 28 bp, synthetic construct
  source 1..28: mol_type = other DNA
gagatggagtcccactctgtctcccagg

SEQ ID NO: 28422 - DNA, 28 bp, synthetic construct
  source 1..28: mol_type = other DNA
ttttttttttttttttcttttgagatgg

SEQ ID NO: 28423 - DNA, 28 bp, synthetic construct
  source 1..28: mol_type = other DNA
tctcaaaagaaaaaaaaaaaaaaaaagg

SEQ ID NO: 28424 - DNA, 28 bp, synthetic construct
  source 1..28: mol_type = other DNA
ctcaaaagaaaaaaaaaaaaaaaaaggg

SEQ ID NO: 28425 - DNA, 28 bp, synthetic construct
  source 1..28: mol_type = other DNA
tcaaaagaaaaaaaaaaaaaaaaagggg

SEQ ID NO: 28426 - DNA, 28 bp, synthetic construct
  source 1..28: mol_type = other DNA
aaaaaaaaaaaaaaaggggtgtttgagg

SEQ ID NO: 28427 - DNA, 28 bp, synthetic construct
  source 1..28: mol_type = other DNA
aaaaaaaaaaaaggggtgtttgaggagg

SEQ ID NO: 28428 - DNA, 28 bp, synthetic construct
  source 1..28: mol_type = other DNA
tgtttgaggaggtgtgagttacctaagg

SEQ ID NO: 28429 - DNA, 28 bp, synthetic construct
  source 1..28: mol_type = other DNA
gtttgaggaggtgtgagttacctaaggg

SEQ ID NO: 28430 - DNA, 28 bp, synthetic construct
  source 1..28: mol_type = other DNA
tttgaggaggtgtgagttacctaagggg

SEQ ID NO: 28431 - DNA, 28 bp, synthetic construct
  source 1..28: mol_type = other DNA
ttgaggaggtgtgagttacctaaggggg

SEQ ID NO: 28432 - DNA, 28 bp, synthetic construct
  source 1..28: mol_type = other DNA
atcaatcagttacttctgcccccttagg

SEQ ID NO: 28433 - DNA, 28 bp, synthetic construct
  source 1..28: mol_type = other DNA
tgattgattcagtaataccctatctagg

SEQ ID NO: 28434 - DNA, 28 bp, synthetic construct
  source 1..28: mol_type = other DNA
gcaaagatctctagattcctagataggg

SEQ ID NO: 28435 - DNA, 28 bp, synthetic construct
  source 1..28: mol_type = other DNA
tgcaaagatctctagattcctagatagg

SEQ ID NO: 28436 - DNA, 28 bp, synthetic construct
  source 1..28: mol_type = other DNA
gatctttgcatcagtacacagaagctgg

SEQ ID NO: 28437 - DNA, 28 bp, synthetic construct
  source 1..28: mol_type = other DNA
gcaaaaatgtctattacaaagcatgtgg

SEQ ID NO: 28438 - DNA, 28 bp, synthetic construct
  source 1..28: mol_type = other DNA
tgctattcttgaatgtccatcaagaagg

SEQ ID NO: 28439 - DNA, 28 bp, synthetic construct
  source 1..28: mol_type = other DNA
gctattcttgaatgtccatcaagaaggg

SEQ ID NO: 28440 - DNA, 28 bp, synthetic construct
  source 1..28: mol_type = other DNA
tcttgaatgtccatcaagaagggactgg

SEQ ID NO: 28441 - DNA, 28 bp, synthetic construct
  source 1..28: mol_type = other DNA
gtttgtttaaccagtcccttcttgatgg

SEQ ID NO: 28442 - DNA, 28 bp, synthetic construct
  source 1..28: mol_type = other DNA
gttaaacaaaccaccattcattcgatgg

SEQ ID NO: 28443 - DNA, 28 bp, synthetic construct
  source 1..28: mol_type = other DNA
gtatagtattccatcgaatgaatggtgg

SEQ ID NO: 28444 - DNA, 28 bp, synthetic construct
  source 1..28: mol_type = other DNA
gctgtatagtattccatcgaatgaatgg

SEQ ID NO: 28445 - DNA, 28 bp, synthetic construct
  source 1..28: mol_type = other DNA
aatactatacagccatcaaaaagaatgg

SEQ ID NO: 28446 - DNA, 28 bp, synthetic construct
  source 1..28: mol_type = other DNA
atactatacagccatcaaaaagaatggg

SEQ ID NO: 28447 - DNA, 28 bp, synthetic construct
  source 1..28: mol_type = other DNA
tactatacagccatcaaaaagaatgggg

SEQ ID NO: 28448 - DNA, 28 bp, synthetic construct
  source 1..28: mol_type = other DNA
aagcaatctaccccattctttttgatgg

SEQ ID NO: 28449 - DNA, 28 bp, synthetic construct
  source 1..28: mol_type = other DNA
atcaaaaagaatggggtagattgcttgg

SEQ ID NO: 28450 - DNA, 28 bp, synthetic construct
  source 1..28: mol_type = other DNA
atctgcactttgctttgtattttatggg

SEQ ID NO: 28451 - DNA, 28 bp, synthetic construct
  source 1..28: mol_type = other DNA
aatctgcactttgctttgtattttatgg

SEQ ID NO: 28452 - DNA, 28 bp, synthetic construct
  source 1..28: mol_type = other DNA
caaagtgcagatttatatgtgtaacagg

SEQ ID NO: 28453 - DNA, 28 bp, synthetic construct
  source 1..28: mol_type = other DNA
cattgtgtgtgtgtgtgtatacatacgg

SEQ ID NO: 28454 - DNA, 28 bp, synthetic construct
  source 1..28: mol_type = other DNA
cggaatcttaaatgtgcatagaaaaagg

SEQ ID NO: 28455 - DNA, 28 bp, synthetic construct
  source 1..28: mol_type = other DNA
tcttaaatgtgcatagaaaaaggcctgg

SEQ ID NO: 28456 - DNA, 28 bp, synthetic construct
  source 1..28: mol_type = other DNA
aaaaaggcctggaagcccagtgctttgg

SEQ ID NO: 28457 - DNA, 28 bp, synthetic construct
  source 1..28: mol_type = other DNA
aaaaggcctggaagcccagtgctttggg

SEQ ID NO: 28458 - DNA, 28 bp, synthetic construct
  source 1..28: mol_type = other DNA
aggcctggaagcccagtgctttgggagg

SEQ ID NO: 28459 - DNA, 28 bp, synthetic construct
  source 1..28: mol_type = other DNA
tggcctcccaaagcactgggcttccagg

SEQ ID NO: 28460 - DNA, 28 bp, synthetic construct
  source 1..28: mol_type = other DNA
ggaagcccagtgctttgggaggccaagg

SEQ ID NO: 28461 - DNA, 28 bp, synthetic construct
  source 1..28: mol_type = other DNA
agcccagtgctttgggaggccaaggtgg

SEQ ID NO: 28462 - DNA, 28 bp, synthetic construct
  source 1..28: mol_type = other DNA
gcccagtgctttgggaggccaaggtggg

SEQ ID NO: 28463 - DNA, 28 bp, synthetic construct
  source 1..28: mol_type = other DNA
tcccaccttggcctcccaaagcactggg

SEQ ID NO: 28464 - DNA, 28 bp, synthetic construct
  source 1..28: mol_type = other DNA
ctcccaccttggcctcccaaagcactgg

SEQ ID NO: 28465 - DNA, 28 bp, synthetic construct
  source 1..28: mol_type = other DNA
cagtgctttgggaggccaaggtgggagg

SEQ ID NO: 28466 - DNA, 28 bp, synthetic construct
  source 1..28: mol_type = other DNA
gaggccaaggtgggaggattgcttgagg

SEQ ID NO: 28467 - DNA, 28 bp, synthetic construct
  source 1..28: mol_type = other DNA
ctggcctcaagcaatcctcccaccttgg

SEQ ID NO: 28468 - DNA, 28 bp, synthetic construct
  source 1..28: mol_type = other DNA
caaggtgggaggattgcttgaggccagg

SEQ ID NO: 28469 - DNA, 28 bp, synthetic construct
  source 1..28: mol_type = other DNA
aaggtgggaggattgcttgaggccaggg

SEQ ID NO: 28470 - DNA, 28 bp, synthetic construct
  source 1..28: mol_type = other DNA
aggtgggaggattgcttgaggccagggg

SEQ ID NO: 28471 - DNA, 28 bp, synthetic construct
  source 1..28: mol_type = other DNA
tgaggccaggggttcaagaccagcctgg

SEQ ID NO: 28472 - DNA, 28 bp, synthetic construct
  source 1..28: mol_type = other DNA
gaggccaggggttcaagaccagcctggg

SEQ ID NO: 28473 - DNA, 28 bp, synthetic construct
  source 1..28: mol_type = other DNA
tttgcccaggctggtcttgaacccctgg

SEQ ID NO: 28474 - DNA, 28 bp, synthetic construct
  source 1..28: mol_type = other DNA
atctattcttgctttttgcccaggctgg

SEQ ID NO: 28475 - DNA, 28 bp, synthetic construct
  source 1..28: mol_type = other DNA
gagaatctattcttgctttttgcccagg

SEQ ID NO: 28476 - DNA, 28 bp, synthetic construct
  source 1..28: mol_type = other DNA
aaaacttttttacattagcagagcatgg

SEQ ID NO: 28477 - DNA, 28 bp, synthetic construct
  source 1..28: mol_type = other DNA
acttttttacattagcagagcatggtgg

SEQ ID NO: 28478 - DNA, 28 bp, synthetic construct
  source 1..28: mol_type = other DNA
ttagcagagcatggtggcacatgcctgg

SEQ ID NO: 28479 - DNA, 28 bp, synthetic construct
  source 1..28: mol_type = other DNA
gcacatgcctggagtcccagctactcgg

SEQ ID NO: 28480 - DNA, 28 bp, synthetic construct
  source 1..28: mol_type = other DNA
caactttccgagtagctgggactccagg

SEQ ID NO: 28481 - DNA, 28 bp, synthetic construct
  source 1..28: mol_type = other DNA
ggagtcccagctactcggaaagttgagg

SEQ ID NO: 28482 - DNA, 28 bp, synthetic construct
  source 1..28: mol_type = other DNA
gtcccagctactcggaaagttgaggtgg

SEQ ID NO: 28483 - DNA, 28 bp, synthetic construct
  source 1..28: mol_type = other DNA
tcccagctactcggaaagttgaggtggg

SEQ ID NO: 28484 - DNA, 28 bp, synthetic construct
  source 1..28: mol_type = other DNA
tcccacctcaactttccgagtagctggg

SEQ ID NO: 28485 - DNA, 28 bp, synthetic construct
  source 1..28: mol_type = other DNA
ctcccacctcaactttccgagtagctgg

SEQ ID NO: 28486 - DNA, 28 bp, synthetic construct
  source 1..28: mol_type = other DNA
cagctactcggaaagttgaggtgggagg

SEQ ID NO: 28487 - DNA, 28 bp, synthetic construct
  source 1..28: mol_type = other DNA
gaggatcacttgagcccagcagttcagg

SEQ ID NO: 28488 - DNA, 28 bp, synthetic construct
  source 1..28: mol_type = other DNA
atagctcactgtagcctgaactgctggg

SEQ ID NO: 28489 - DNA, 28 bp, synthetic construct
  source 1..28: mol_type = other DNA
catagctcactgtagcctgaactgctgg

SEQ ID NO: 28490 - DNA, 28 bp, synthetic construct
  source 1..28: mol_type = other DNA
gtctgtcactcaggctggagttcagtgg

SEQ ID NO: 28491 - DNA, 28 bp, synthetic construct
  source 1..28: mol_type = other DNA
cagagtattagtctgtcactcaggctgg

SEQ ID NO: 28492 - DNA, 28 bp, synthetic construct
  source 1..28: mol_type = other DNA
gagacagagtattagtctgtcactcagg

SEQ ID NO: 28493 - DNA, 28 bp, synthetic construct
  source 1..28: mol_type = other DNA
aaagaagaaaagaaaaaagtctcaaagg

SEQ ID NO: 28494 - DNA, 28 bp, synthetic construct
  source 1..28: mol_type = other DNA
gtagagcagtctactagtagcagtttgg

SEQ ID NO: 28495 - DNA, 28 bp, synthetic construct
  source 1..28: mol_type = other DNA
tgctactagtagactgctctacagaagg

SEQ ID NO: 28496 - DNA, 28 bp, synthetic construct
  source 1..28: mol_type = other DNA
agtagactgctctacagaaggacctcgg

SEQ ID NO: 28497 - DNA, 28 bp, synthetic construct
  source 1..28: mol_type = other DNA
actgctctacagaaggacctcggtaagg

SEQ ID NO: 28498 - DNA, 28 bp, synthetic construct
  source 1..28: mol_type = other DNA
ttcttttggttttagttccttaccgagg

SEQ ID NO: 28499 - DNA, 28 bp, synthetic construct
  source 1..28: mol_type = other DNA
gcataggtaaaataaaagtttcttttgg

SEQ ID NO: 28500 - DNA, 28 bp, synthetic construct
  source 1..28: mol_type = other DNA
acctatgctattttaactctttacatgg

SEQ ID NO: 28501 - DNA, 28 bp, synthetic construct
  source 1..28: mol_type = other DNA
cctatgctattttaactctttacatggg

SEQ ID NO: 28502 - DNA, 28 bp, synthetic construct
  source 1..28: mol_type = other DNA
actaattttataattgtataagaacagg

SEQ ID NO: 28503 - DNA, 28 bp, synthetic construct
  source 1..28: mol_type = other DNA
tataaaattagtttttaaatacagtagg

SEQ ID NO: 28504 - DNA, 28 bp, synthetic construct
  source 1..28: mol_type = other DNA
ataaaattagtttttaaatacagtaggg

SEQ ID NO: 28505 - DNA, 28 bp, synthetic construct
  source 1..28: mol_type = other DNA
tagtttttaaatacagtagggacagagg

SEQ ID NO: 28506 - DNA, 28 bp, synthetic construct
  source 1..28: mol_type = other DNA
ttttaaatacagtagggacagaggaagg

SEQ ID NO: 28507 - DNA, 28 bp, synthetic construct
  source 1..28: mol_type = other DNA
tttaaatacagtagggacagaggaaggg

SEQ ID NO: 28508 - DNA, 28 bp, synthetic construct
  source 1..28: mol_type = other DNA
ttaaatacagtagggacagaggaagggg

SEQ ID NO: 28509 - DNA, 28 bp, synthetic construct
  source 1..28: mol_type = other DNA
tacagtagggacagaggaaggggaaagg

SEQ ID NO: 28510 - DNA, 28 bp, synthetic construct
  source 1..28: mol_type = other DNA
gtagggacagaggaaggggaaaggaagg

SEQ ID NO: 28511 - DNA, 28 bp, synthetic construct
  source 1..28: mol_type = other DNA
tatatcttttgtactgcttgagttttgg

SEQ ID NO: 28512 - DNA, 28 bp, synthetic construct
  source 1..28: mol_type = other DNA
atatcttttgtactgcttgagttttggg

SEQ ID NO: 28513 - DNA, 28 bp, synthetic construct
  source 1..28: mol_type = other DNA
tatcttttgtactgcttgagttttgggg

SEQ ID NO: 28514 - DNA, 28 bp, synthetic construct
  source 1..28: mol_type = other DNA
atcttttgtactgcttgagttttggggg

SEQ ID NO: 28515 - DNA, 28 bp, synthetic construct
  source 1..28: mol_type = other DNA
tcttttgtactgcttgagttttgggggg

SEQ ID NO: 28516 - DNA, 28 bp, synthetic construct
  source 1..28: mol_type = other DNA
ttttccccaataatcatgtgctatttgg

SEQ ID NO: 28517 - DNA, 28 bp, synthetic construct
  source 1..28: mol_type = other DNA
attaccaaatagcacatgattattgggg

SEQ ID NO: 28518 - DNA, 28 bp, synthetic construct
  source 1..28: mol_type = other DNA
aattaccaaatagcacatgattattggg

SEQ ID NO: 28519 - DNA, 28 bp, synthetic construct
  source 1..28: mol_type = other DNA
aaattaccaaatagcacatgattattgg

SEQ ID NO: 28520 - DNA, 28 bp, synthetic construct
  source 1..28: mol_type = other DNA
tgtgctatttggtaattttttttaaagg

SEQ ID NO: 28521 - DNA, 28 bp, synthetic construct
  source 1..28: mol_type = other DNA
gtgctatttggtaattttttttaaaggg

SEQ ID NO: 28522 - DNA, 28 bp, synthetic construct
  source 1..28: mol_type = other DNA
aaaaatttaagtgagctgagtgcagtgg

SEQ ID NO: 28523 - DNA, 28 bp, synthetic construct
  source 1..28: mol_type = other DNA
ctgtctctggagtagctgggactacagg

SEQ ID NO: 28524 - DNA, 28 bp, synthetic construct
  source 1..28: mol_type = other DNA
tcccagctactccagagacagacgcagg

SEQ ID NO: 28525 - DNA, 28 bp, synthetic construct
  source 1..28: mol_type = other DNA
tcctgcgtctgtctctggagtagctggg

SEQ ID NO: 28526 - DNA, 28 bp, synthetic construct
  source 1..28: mol_type = other DNA
ctcctgcgtctgtctctggagtagctgg

SEQ ID NO: 28527 - DNA, 28 bp, synthetic construct
  source 1..28: mol_type = other DNA
cagctactccagagacagacgcaggagg

SEQ ID NO: 28528 - DNA, 28 bp, synthetic construct
  source 1..28: mol_type = other DNA
tactccagagacagacgcaggaggatgg

SEQ ID NO: 28529 - DNA, 28 bp, synthetic construct
  source 1..28: mol_type = other DNA
caggccatcctcctgcgtctgtctctgg

SEQ ID NO: 28530 - DNA, 28 bp, synthetic construct
  source 1..28: mol_type = other DNA
acagggttagataaactctggtttcagg

SEQ ID NO: 28531 - DNA, 28 bp, synthetic construct
  source 1..28: mol_type = other DNA
gggagttacagggttagataaactctgg

SEQ ID NO: 28532 - DNA, 28 bp, synthetic construct
  source 1..28: mol_type = other DNA
accctgtaactcccctgcctccaagagg

SEQ ID NO: 28533 - DNA, 28 bp, synthetic construct
  source 1..28: mol_type = other DNA
acctcttggaggcaggggagttacaggg

SEQ ID NO: 28534 - DNA, 28 bp, synthetic construct
  source 1..28: mol_type = other DNA
tacctcttggaggcaggggagttacagg

SEQ ID NO: 28535 - DNA, 28 bp, synthetic construct
  source 1..28: mol_type = other DNA
ttggcatcttacctcttggaggcagggg

SEQ ID NO: 28536 - DNA, 28 bp, synthetic construct
  source 1..28: mol_type = other DNA
attggcatcttacctcttggaggcaggg

SEQ ID NO: 28537 - DNA, 28 bp, synthetic construct
  source 1..28: mol_type = other DNA
aattggcatcttacctcttggaggcagg

SEQ ID NO: 28538 - DNA, 28 bp, synthetic construct
  source 1..28: mol_type = other DNA
cctccaagaggtaagatgccaattttgg

SEQ ID NO: 28539 - DNA, 28 bp, synthetic construct
  source 1..28: mol_type = other DNA
ctccaagaggtaagatgccaattttggg

SEQ ID NO: 28540 - DNA, 28 bp, synthetic construct
  source 1..28: mol_type = other DNA
tccaagaggtaagatgccaattttgggg

SEQ ID NO: 28541 - DNA, 28 bp, synthetic construct
  source 1..28: mol_type = other DNA
tccccaaaattggcatcttacctcttgg

SEQ ID NO: 28542 - DNA, 28 bp, synthetic construct
  source 1..28: mol_type = other DNA
ttgtataagaggaattccccaaaattgg

SEQ ID NO: 28543 - DNA, 28 bp, synthetic construct
  source 1..28: mol_type = other DNA
tggggaattcctcttatacaaaatatgg

SEQ ID NO: 28544 - DNA, 28 bp, synthetic construct
  source 1..28: mol_type = other DNA
ggaattcctcttatacaaaatatggtgg

SEQ ID NO: 28545 - DNA, 28 bp, synthetic construct
  source 1..28: mol_type = other DNA
ctctttccaccatattttgtataagagg

SEQ ID NO: 28546 - DNA, 28 bp, synthetic construct
  source 1..28: mol_type = other DNA
ctcttatacaaaatatggtggaaagagg

SEQ ID NO: 28547 - DNA, 28 bp, synthetic construct
  source 1..28: mol_type = other DNA
tcttatacaaaatatggtggaaagaggg

SEQ ID NO: 28548 - DNA, 28 bp, synthetic construct
  source 1..28: mol_type = other DNA
aagagggtttcacagattcaaatcctgg

SEQ ID NO: 28549 - DNA, 28 bp, synthetic construct
  source 1..28: mol_type = other DNA
ggtcattcgagaagggatcatagccagg

SEQ ID NO: 28550 - DNA, 28 bp, synthetic construct
  source 1..28: mol_type = other DNA
gctatgatcccttctcgaatgaccctgg

SEQ ID NO: 28551 - DNA, 28 bp, synthetic construct
  source 1..28: mol_type = other DNA
ctatgatcccttctcgaatgaccctggg

SEQ ID NO: 28552 - DNA, 28 bp, synthetic construct
  source 1..28: mol_type = other DNA
gatcccttctcgaatgaccctgggtagg

SEQ ID NO: 28553 - DNA, 28 bp, synthetic construct
  source 1..28: mol_type = other DNA
aggcctacccagggtcattcgagaaggg

SEQ ID NO: 28554 - DNA, 28 bp, synthetic construct
  source 1..28: mol_type = other DNA
gaggcctacccagggtcattcgagaagg

SEQ ID NO: 28555 - DNA, 28 bp, synthetic construct
  source 1..28: mol_type = other DNA
aaacaaggaaagtgaggcctacccaggg

SEQ ID NO: 28556 - DNA, 28 bp, synthetic construct
  source 1..28: mol_type = other DNA
gaaacaaggaaagtgaggcctacccagg

SEQ ID NO: 28557 - DNA, 28 bp, synthetic construct
  source 1..28: mol_type = other DNA
gcctcactttccttgtttctccctatgg

SEQ ID NO: 28558 - DNA, 28 bp, synthetic construct
  source 1..28: mol_type = other DNA
tccatagggagaaacaaggaaagtgagg

SEQ ID NO: 28559 - DNA, 28 bp, synthetic construct
  source 1..28: mol_type = other DNA
cataacatttccatagggagaaacaagg

SEQ ID NO: 28560 - DNA, 28 bp, synthetic construct
  source 1..28: mol_type = other DNA
tgtttctccctatggaaatgttatgagg

SEQ ID NO: 28561 - DNA, 28 bp, synthetic construct
  source 1..28: mol_type = other DNA
acttggtcctcataacatttccataggg

SEQ ID NO: 28562 - DNA, 28 bp, synthetic construct
  source 1..28: mol_type = other DNA
tacttggtcctcataacatttccatagg

SEQ ID NO: 28563 - DNA, 28 bp, synthetic construct
  source 1..28: mol_type = other DNA
tatggaaatgttatgaggaccaagtagg

SEQ ID NO: 28564 - DNA, 28 bp, synthetic construct
  source 1..28: mol_type = other DNA
tacagagaactctatggttcctacttgg

SEQ ID NO: 28565 - DNA, 28 bp, synthetic construct
  source 1..28: mol_type = other DNA
attttaaggtttacagagaactctatgg

SEQ ID NO: 28566 - DNA, 28 bp, synthetic construct
  source 1..28: mol_type = other DNA
gtaaaccttaaaatgctacccagacagg

SEQ ID NO: 28567 - DNA, 28 bp, synthetic construct
  source 1..28: mol_type = other DNA
ctgctcctgtctgggtagcattttaagg

SEQ ID NO: 28568 - DNA, 28 bp, synthetic construct
  source 1..28: mol_type = other DNA
aatgctacccagacaggagcagtaatgg

SEQ ID NO: 28569 - DNA, 28 bp, synthetic construct
  source 1..28: mol_type = other DNA
ttggcagccattactgctcctgtctggg

SEQ ID NO: 28570 - DNA, 28 bp, synthetic construct
  source 1..28: mol_type = other DNA
cttggcagccattactgctcctgtctgg

SEQ ID NO: 28571 - DNA, 28 bp, synthetic construct
  source 1..28: mol_type = other DNA
cagacaggagcagtaatggctgccaagg

SEQ ID NO: 28572 - DNA, 28 bp, synthetic construct
  source 1..28: mol_type = other DNA
gagcagtaatggctgccaaggagctagg

SEQ ID NO: 28573 - DNA, 28 bp, synthetic construct
  source 1..28: mol_type = other DNA
agtaatggctgccaaggagctaggaagg

SEQ ID NO: 28574 - DNA, 28 bp, synthetic construct
  source 1..28: mol_type = other DNA
ggctgccaaggagctaggaaggaaaagg

SEQ ID NO: 28575 - DNA, 28 bp, synthetic construct
  source 1..28: mol_type = other DNA
gctgccaaggagctaggaaggaaaaggg

SEQ ID NO: 28576 - DNA, 28 bp, synthetic construct
  source 1..28: mol_type = other DNA
ctgccaaggagctaggaaggaaaagggg

SEQ ID NO: 28577 - DNA, 28 bp, synthetic construct
  source 1..28: mol_type = other DNA
cagccccttttccttcctagctccttgg

SEQ ID NO: 28578 - DNA, 28 bp, synthetic construct
  source 1..28: mol_type = other DNA
caaggagctaggaaggaaaaggggctgg

SEQ ID NO: 28579 - DNA, 28 bp, synthetic construct
  source 1..28: mol_type = other DNA
agctaggaaggaaaaggggctggacagg

SEQ ID NO: 28580 - DNA, 28 bp, synthetic construct
  source 1..28: mol_type = other DNA
gctaggaaggaaaaggggctggacaggg

SEQ ID NO: 28581 - DNA, 28 bp, synthetic construct
  source 1..28: mol_type = other DNA
ctaggaaggaaaaggggctggacagggg

SEQ ID NO: 28582 - DNA, 28 bp, synthetic construct
  source 1..28: mol_type = other DNA
aggaaaaggggctggacaggggctgagg

SEQ ID NO: 28583 - DNA, 28 bp, synthetic construct
  source 1..28: mol_type = other DNA
ttttgttgttaacacaaggcatctttgg

SEQ ID NO: 28584 - DNA, 28 bp, synthetic construct
  source 1..28: mol_type = other DNA
ctttcagctttttgttgttaacacaagg

SEQ ID NO: 28585 - DNA, 28 bp, synthetic construct
  source 1..28: mol_type = other DNA
atttattcatttttctcttcattttagg

SEQ ID NO: 28586 - DNA, 28 bp, synthetic construct
  source 1..28: mol_type = other DNA
aagagaaaaatgaataaatacattgtgg

SEQ ID NO: 28587 - DNA, 28 bp, synthetic construct
  source 1..28: mol_type = other DNA
aaatacattgtggcaatttcctatcagg

SEQ ID NO: 28588 - DNA, 28 bp, synthetic construct
  source 1..28: mol_type = other DNA
tcactgctgtatagtatttcctgatagg

SEQ ID NO: 28589 - DNA, 28 bp, synthetic construct
  source 1..28: mol_type = other DNA
cagtgaaaaaagaatgagccacagctgg

SEQ ID NO: 28590 - DNA, 28 bp, synthetic construct
  source 1..28: mol_type = other DNA
tcattcatgttcgtatctccagctgtgg

SEQ ID NO: 28591 - DNA, 28 bp, synthetic construct
  source 1..28: mol_type = other DNA
ctggagatacgaacatgaatgaatctgg

SEQ ID NO: 28592 - DNA, 28 bp, synthetic construct
  source 1..28: mol_type = other DNA
tggagatacgaacatgaatgaatctggg

SEQ ID NO: 28593 - DNA, 28 bp, synthetic construct
  source 1..28: mol_type = other DNA
gaatctgggtctcactctgttgcccagg

SEQ ID NO: 28594 - DNA, 28 bp, synthetic construct
  source 1..28: mol_type = other DNA
ctgggtctcactctgttgcccaggctgg

SEQ ID NO: 28595 - DNA, 28 bp, synthetic construct
  source 1..28: mol_type = other DNA
ctctgttgcccaggctggagtgcagtgg

SEQ ID NO: 28596 - DNA, 28 bp, synthetic construct
  source 1..28: mol_type = other DNA
agatcatgccactgcactccagcctggg

SEQ ID NO: 28597 - DNA, 28 bp, synthetic construct
  source 1..28: mol_type = other DNA
gagatcatgccactgcactccagcctgg

SEQ ID NO: 28598 - DNA, 28 bp, synthetic construct
  source 1..28: mol_type = other DNA
tgggaggatgacttgggctgggaggtgg

SEQ ID NO: 28599 - DNA, 28 bp, synthetic construct
  source 1..28: mol_type = other DNA
aggtgggaggatgacttgggctgggagg

SEQ ID NO: 28600 - DNA, 28 bp, synthetic construct
  source 1..28: mol_type = other DNA
ctaaggtgggaggatgacttgggctggg

SEQ ID NO: 28601 - DNA, 28 bp, synthetic construct
  source 1..28: mol_type = other DNA
gctaaggtgggaggatgacttgggctgg

SEQ ID NO: 28602 - DNA, 28 bp, synthetic construct
  source 1..28: mol_type = other DNA
agaggctaaggtgggaggatgacttggg

SEQ ID NO: 28603 - DNA, 28 bp, synthetic construct
  source 1..28: mol_type = other DNA
gagaggctaaggtgggaggatgacttgg

SEQ ID NO: 28604 - DNA, 28 bp, synthetic construct
  source 1..28: mol_type = other DNA
cagctacttgagaggctaaggtgggagg

SEQ ID NO: 28605 - DNA, 28 bp, synthetic construct
  source 1..28: mol_type = other DNA
ctcccaccttagcctctcaagtagctgg

SEQ ID NO: 28606 - DNA, 28 bp, synthetic construct
  source 1..28: mol_type = other DNA
ttccagctacttgagaggctaaggtggg

SEQ ID NO: 28607 - DNA, 28 bp, synthetic construct
  source 1..28: mol_type = other DNA
gttccagctacttgagaggctaaggtgg

SEQ ID NO: 28608 - DNA, 28 bp, synthetic construct
  source 1..28: mol_type = other DNA
gtagttccagctacttgagaggctaagg

SEQ ID NO: 28609 - DNA, 28 bp, synthetic construct
  source 1..28: mol_type = other DNA
tagcctctcaagtagctggaactacagg

SEQ ID NO: 28610 - DNA, 28 bp, synthetic construct
  source 1..28: mol_type = other DNA
atgcctgtagttccagctacttgagagg

SEQ ID NO: 28611 - DNA, 28 bp, synthetic construct
  source 1..28: mol_type = other DNA
caatacaaaaattagctgggtgtggtgg

SEQ ID NO: 28612 - DNA, 28 bp, synthetic construct
  source 1..28: mol_type = other DNA
aaacaatacaaaaattagctgggtgtgg

SEQ ID NO: 28613 - DNA, 28 bp, synthetic construct
  source 1..28: mol_type = other DNA
tctgcaaacaatacaaaaattagctggg

SEQ ID NO: 28614 - DNA, 28 bp, synthetic construct
  source 1..28: mol_type = other DNA
ctctgcaaacaatacaaaaattagctgg

SEQ ID NO: 28615 - DNA, 28 bp, synthetic construct
  source 1..28: mol_type = other DNA
ctaatttttgtattgtttgcagagatgg

SEQ ID NO: 28616 - DNA, 28 bp, synthetic construct
  source 1..28: mol_type = other DNA
taatttttgtattgtttgcagagatggg

SEQ ID NO: 28617 - DNA, 28 bp, synthetic construct
  source 1..28: mol_type = other DNA
ttgtattgtttgcagagatgggttttgg

SEQ ID NO: 28618 - DNA, 28 bp, synthetic construct
  source 1..28: mol_type = other DNA
tgggttttggccatgttgcccaagctgg

SEQ ID NO: 28619 - DNA, 28 bp, synthetic construct
  source 1..28: mol_type = other DNA
gagtttgagaccagcttgggcaacatgg

SEQ ID NO: 28620 - DNA, 28 bp, synthetic construct
  source 1..28: mol_type = other DNA
gttgcccaagctggtctcaaactcctgg

SEQ ID NO: 28621 - DNA, 28 bp, synthetic construct
  source 1..28: mol_type = other DNA
ttgcccaagctggtctcaaactcctggg

SEQ ID NO: 28622 - DNA, 28 bp, synthetic construct
  source 1..28: mol_type = other DNA
gagcccaggagtttgagaccagcttggg

SEQ ID NO: 28623 - DNA, 28 bp, synthetic construct
  source 1..28: mol_type = other DNA
tgagcccaggagtttgagaccagcttgg

SEQ ID NO: 28624 - DNA, 28 bp, synthetic construct
  source 1..28: mol_type = other DNA
gcaggcaggtggatctcttgagcccagg

SEQ ID NO: 28625 - DNA, 28 bp, synthetic construct
  source 1..28: mol_type = other DNA
cactttgggaggcagagcaggcaggtgg

SEQ ID NO: 28626 - DNA, 28 bp, synthetic construct
  source 1..28: mol_type = other DNA
tggcactttgggaggcagagcaggcagg

SEQ ID NO: 28627 - DNA, 28 bp, synthetic construct
  source 1..28: mol_type = other DNA
ttactggcactttgggaggcagagcagg

SEQ ID NO: 28628 - DNA, 28 bp, synthetic construct
  source 1..28: mol_type = other DNA
tgctctgcctcccaaagtgccagtaagg

SEQ ID NO: 28629 - DNA, 28 bp, synthetic construct
  source 1..28: mol_type = other DNA
actcatgccttactggcactttgggagg

SEQ ID NO: 28630 - DNA, 28 bp, synthetic construct
  source 1..28: mol_type = other DNA
gtgactcatgccttactggcactttggg

SEQ ID NO: 28631 - DNA, 28 bp, synthetic construct
  source 1..28: mol_type = other DNA
ggtgactcatgccttactggcactttgg

SEQ ID NO: 28632 - DNA, 28 bp, synthetic construct
  source 1..28: mol_type = other DNA
ctgagcgtggtgactcatgccttactgg

SEQ ID NO: 28633 - DNA, 28 bp, synthetic construct
  source 1..28: mol_type = other DNA
ttaaaaatgttatttaggctgagcgtgg

SEQ ID NO: 28634 - DNA, 28 bp, synthetic construct
  source 1..28: mol_type = other DNA
ttttttatgtttaaaaatgttatttagg

SEQ ID NO: 28635 - DNA, 28 bp, synthetic construct
  source 1..28: mol_type = other DNA
cataaaaaaatactatgtattatttagg

SEQ ID NO: 28636 - DNA, 28 bp, synthetic construct
  source 1..28: mol_type = other DNA
ataaaaaaatactatgtattatttaggg

SEQ ID NO: 28637 - DNA, 28 bp, synthetic construct
  source 1..28: mol_type = other DNA
agaaacaagtgttctgaatttagtgggg

SEQ ID NO: 28638 - DNA, 28 bp, synthetic construct
  source 1..28: mol_type = other DNA
aagaaacaagtgttctgaatttagtggg

SEQ ID NO: 28639 - DNA, 28 bp, synthetic construct
  source 1..28: mol_type = other DNA
caagaaacaagtgttctgaatttagtgg

SEQ ID NO: 28640 - DNA, 28 bp, synthetic construct
  source 1..28: mol_type = other DNA
taaattcagaacacttgtttcttgttgg

SEQ ID NO: 28641 - DNA, 28 bp, synthetic construct
  source 1..28: mol_type = other DNA
attcagaacacttgtttcttgttggtgg

SEQ ID NO: 28642 - DNA, 28 bp, synthetic construct
  source 1..28: mol_type = other DNA
cttgtttcttgttggtggctgatgaagg

SEQ ID NO: 28643 - DNA, 28 bp, synthetic construct
  source 1..28: mol_type = other DNA
tgatgaaggagaaatttcaactgattgg

SEQ ID NO: 28644 - DNA, 28 bp, synthetic construct
  source 1..28: mol_type = other DNA
tcttaaaccagatgagtgagcatgtagg

SEQ ID NO: 28645 - DNA, 28 bp, synthetic construct
  source 1..28: mol_type = other DNA
gcaggcacctacatgctcactcatctgg

SEQ ID NO: 28646 - DNA, 28 bp, synthetic construct
  source 1..28: mol_type = other DNA
catgtaggtgcctgcgtgttaccctcgg

SEQ ID NO: 28647 - DNA, 28 bp, synthetic construct
  source 1..28: mol_type = other DNA
ctctcagataccgagggtaacacgcagg

SEQ ID NO: 28648 - DNA, 28 bp, synthetic construct
  source 1..28: mol_type = other DNA
attgaaggagtctctcagataccgaggg

SEQ ID NO: 28649 - DNA, 28 bp, synthetic construct
  source 1..28: mol_type = other DNA
aattgaaggagtctctcagataccgagg

SEQ ID NO: 28650 - DNA, 28 bp, synthetic construct
  source 1..28: mol_type = other DNA
agtaaaaagaaaaaagaaaaattgaagg

SEQ ID NO: 28651 - DNA, 28 bp, synthetic construct
  source 1..28: mol_type = other DNA
tctgcttcaacttttattttagattcgg

SEQ ID NO: 28652 - DNA, 28 bp, synthetic construct
  source 1..28: mol_type = other DNA
ctgcttcaacttttattttagattcggg

SEQ ID NO: 28653 - DNA, 28 bp, synthetic construct
  source 1..28: mol_type = other DNA
tgcttcaacttttattttagattcgggg

SEQ ID NO: 28654 - DNA, 28 bp, synthetic construct
  source 1..28: mol_type = other DNA
gcttcaacttttattttagattcggggg

SEQ ID NO: 28655 - DNA, 28 bp, synthetic construct
  source 1..28: mol_type = other DNA
cttcaacttttattttagattcgggggg

SEQ ID NO: 28656 - DNA, 28 bp, synthetic construct
  source 1..28: mol_type = other DNA
ttttagattcggggggtacatgtgcagg

SEQ ID NO: 28657 - DNA, 28 bp, synthetic construct
  source 1..28: mol_type = other DNA
ggggtacatgtgcaggtttgctacctgg

SEQ ID NO: 28658 - DNA, 28 bp, synthetic construct
  source 1..28: mol_type = other DNA
gggtacatgtgcaggtttgctacctggg

SEQ ID NO: 28659 - DNA, 28 bp, synthetic construct
  source 1..28: mol_type = other DNA
tgctacctgggtatactgcgtgatttgg

SEQ ID NO: 28660 - DNA, 28 bp, synthetic construct
  source 1..28: mol_type = other DNA
gctacctgggtatactgcgtgatttggg

SEQ ID NO: 28661 - DNA, 28 bp, synthetic construct
  source 1..28: mol_type = other DNA
cctgggtatactgcgtgatttgggtagg

SEQ ID NO: 28662 - DNA, 28 bp, synthetic construct
  source 1..28: mol_type = other DNA
ctgggtatactgcgtgatttgggtaggg

SEQ ID NO: 28663 - DNA, 28 bp, synthetic construct
  source 1..28: mol_type = other DNA
tgggtatactgcgtgatttgggtagggg

SEQ ID NO: 28664 - DNA, 28 bp, synthetic construct
  source 1..28: mol_type = other DNA
tttgggtaggggtgatcccatcacctgg

SEQ ID NO: 28665 - DNA, 28 bp, synthetic construct
  source 1..28: mol_type = other DNA
ttgggtaggggtgatcccatcacctggg

SEQ ID NO: 28666 - DNA, 28 bp, synthetic construct
  source 1..28: mol_type = other DNA
gaactatgctcagtacccaggtgatggg

SEQ ID NO: 28667 - DNA, 28 bp, synthetic construct
  source 1..28: mol_type = other DNA
ggaactatgctcagtacccaggtgatgg

SEQ ID NO: 28668 - DNA, 28 bp, synthetic construct
  source 1..28: mol_type = other DNA
ctgttgggaactatgctcagtacccagg

SEQ ID NO: 28669 - DNA, 28 bp, synthetic construct
  source 1..28: mol_type = other DNA
agggaggcagagttgaaaaactgttggg

SEQ ID NO: 28670 - DNA, 28 bp, synthetic construct
  source 1..28: mol_type = other DNA
gagggaggcagagttgaaaaactgttgg

SEQ ID NO: 28671 - DNA, 28 bp, synthetic construct
  source 1..28: mol_type = other DNA
ggactgctagagtggggagggagggagg

SEQ ID NO: 28672 - DNA, 28 bp, synthetic construct
  source 1..28: mol_type = other DNA
tggggactgctagagtggggagggaggg

SEQ ID NO: 28673 - DNA, 28 bp, synthetic construct
  source 1..28: mol_type = other DNA
ctggggactgctagagtggggagggagg

SEQ ID NO: 28674 - DNA, 28 bp, synthetic construct
  source 1..28: mol_type = other DNA
acactggggactgctagagtggggaggg

SEQ ID NO: 28675 - DNA, 28 bp, synthetic construct
  source 1..28: mol_type = other DNA
gacactggggactgctagagtggggagg

SEQ ID NO: 28676 - DNA, 28 bp, synthetic construct
  source 1..28: mol_type = other DNA
gtagacactggggactgctagagtgggg

SEQ ID NO: 28677 - DNA, 28 bp, synthetic construct
  source 1..28: mol_type = other DNA
agtagacactggggactgctagagtggg

SEQ ID NO: 28678 - DNA, 28 bp, synthetic construct
  source 1..28: mol_type = other DNA
cagtagacactggggactgctagagtgg

SEQ ID NO: 28679 - DNA, 28 bp, synthetic construct
  source 1..28: mol_type = other DNA
ataaagatggcaacagtagacactgggg

SEQ ID NO: 28680 - DNA, 28 bp, synthetic construct
  source 1..28: mol_type = other DNA
cataaagatggcaacagtagacactggg

SEQ ID NO: 28681 - DNA, 28 bp, synthetic construct
  source 1..28: mol_type = other DNA
acataaagatggcaacagtagacactgg

SEQ ID NO: 28682 - DNA, 28 bp, synthetic construct
  source 1..28: mol_type = other DNA
tactgttgccatctttatgtccatgagg

SEQ ID NO: 28683 - DNA, 28 bp, synthetic construct
  source 1..28: mol_type = other DNA
tatcaggtcctcatggacataaagatgg

SEQ ID NO: 28684 - DNA, 28 bp, synthetic construct
  source 1..28: mol_type = other DNA
agtggagctaaatatcaggtcctcatgg

SEQ ID NO: 28685 - DNA, 28 bp, synthetic construct
  source 1..28: mol_type = other DNA
tcacttataagtggagctaaatatcagg

SEQ ID NO: 28686 - DNA, 28 bp, synthetic construct
  source 1..28: mol_type = other DNA
aatgctgcattttctcacttataagtgg

SEQ ID NO: 28687 - DNA, 28 bp, synthetic construct
  source 1..28: mol_type = other DNA
cttataagtgagaaaatgcagcatttgg

SEQ ID NO: 28688 - DNA, 28 bp, synthetic construct
  source 1..28: mol_type = other DNA
tttctgttcctgtgttaatgtgcttagg

SEQ ID NO: 28689 - DNA, 28 bp, synthetic construct
  source 1..28: mol_type = other DNA
aatattgtcctaagcacattaacacagg

SEQ ID NO: 28690 - DNA, 28 bp, synthetic construct
  source 1..28: mol_type = other DNA
aaaagtctatgttgccagtttcctgagg

SEQ ID NO: 28691 - DNA, 28 bp, synthetic construct
  source 1..28: mol_type = other DNA
ctgcgtgatctggtcctcaggaaactgg

SEQ ID NO: 28692 - DNA, 28 bp, synthetic construct
  source 1..28: mol_type = other DNA
cagtttcctgaggaccagatcacgcagg

SEQ ID NO: 28693 - DNA, 28 bp, synthetic construct
  source 1..28: mol_type = other DNA
gcaactcctgcgtgatctggtcctcagg

SEQ ID NO: 28694 - DNA, 28 bp, synthetic construct
  source 1..28: mol_type = other DNA
ctgcaggtgcaactcctgcgtgatctgg

SEQ ID NO: 28695 - DNA, 28 bp, synthetic construct
  source 1..28: mol_type = other DNA
ggagttgcacctgcagagacagaagtgg

SEQ ID NO: 28696 - DNA, 28 bp, synthetic construct
  source 1..28: mol_type = other DNA
gagttgcacctgcagagacagaagtggg

SEQ ID NO: 28697 - DNA, 28 bp, synthetic construct
  source 1..28: mol_type = other DNA
tgcacctgcagagacagaagtgggctgg

SEQ ID NO: 28698 - DNA, 28 bp, synthetic construct
  source 1..28: mol_type = other DNA
ctctccagcccacttctgtctctgcagg

SEQ ID NO: 28699 - DNA, 28 bp, synthetic construct
  source 1..28: mol_type = other DNA
ctgcagagacagaagtgggctggagagg

SEQ ID NO: 28700 - DNA, 28 bp, synthetic construct
  source 1..28: mol_type = other DNA
tgcagagacagaagtgggctggagaggg

SEQ ID NO: 28701 - DNA, 28 bp, synthetic construct
  source 1..28: mol_type = other DNA
gacagaagtgggctggagagggaccagg

SEQ ID NO: 28702 - DNA, 28 bp, synthetic construct
  source 1..28: mol_type = other DNA
acagaagtgggctggagagggaccaggg

SEQ ID NO: 28703 - DNA, 28 bp, synthetic construct
  source 1..28: mol_type = other DNA
gcttcagcagcagacttaggagccctgg

SEQ ID NO: 28704 - DNA, 28 bp, synthetic construct
  source 1..28: mol_type = other DNA
tatagtcagcttcagcagcagacttagg

SEQ ID NO: 28705 - DNA, 28 bp, synthetic construct
  source 1..28: mol_type = other DNA
ctgctgctgaagctgactatagcgaagg

SEQ ID NO: 28706 - DNA, 28 bp, synthetic construct
  source 1..28: mol_type = other DNA
ctgaagctgactatagcgaaggcaaagg

SEQ ID NO: 28707 - DNA, 28 bp, synthetic construct
  source 1..28: mol_type = other DNA
gactatagcgaaggcaaaggacaagtgg

SEQ ID NO: 28708 - DNA, 28 bp, synthetic construct
  source 1..28: mol_type = other DNA
cgaaggcaaaggacaagtggcctgaagg

SEQ ID NO: 28709 - DNA, 28 bp, synthetic construct
  source 1..28: mol_type = other DNA
gtggcctgaaggccaacagagagcctgg

SEQ ID NO: 28710 - DNA, 28 bp, synthetic construct
  source 1..28: mol_type = other DNA
cttgatgcacaggtgcgtaaggagctgg

SEQ ID NO: 28711 - DNA, 28 bp, synthetic construct
  source 1..28: mol_type = other DNA
agtgttcttgatgcacaggtgcgtaagg

SEQ ID NO: 28712 - DNA, 28 bp, synthetic construct
  source 1..28: mol_type = other DNA
gcacctgtgcatcaagaacactgcatgg

SEQ ID NO: 28713 - DNA, 28 bp, synthetic construct
  source 1..28: mol_type = other DNA
gtgccatgcagtgttcttgatgcacagg

SEQ ID NO: 28714 - DNA, 28 bp, synthetic construct
  source 1..28: mol_type = other DNA
gtgcatcaagaacactgcatggcactgg

SEQ ID NO: 28715 - DNA, 28 bp, synthetic construct
  source 1..28: mol_type = other DNA
tgcatcaagaacactgcatggcactggg

SEQ ID NO: 28716 - DNA, 28 bp, synthetic construct
  source 1..28: mol_type = other DNA
aagaacactgcatggcactgggcacagg

SEQ ID NO: 28717 - DNA, 28 bp, synthetic construct
  source 1..28: mol_type = other DNA
catggcactgggcacaggagtcatcagg

SEQ ID NO: 28718 - DNA, 28 bp, synthetic construct
  source 1..28: mol_type = other DNA
acaggagtcatcaggaaatgatgcttgg

SEQ ID NO: 28719 - DNA, 28 bp, synthetic construct
  source 1..28: mol_type = other DNA
caggagtcatcaggaaatgatgcttggg

SEQ ID NO: 28720 - DNA, 28 bp, synthetic construct
  source 1..28: mol_type = other DNA
aggaaatgatgcttgggagagcgctagg

SEQ ID NO: 28721 - DNA, 28 bp, synthetic construct
  source 1..28: mol_type = other DNA
ttgggagagcgctaggagagcactctgg

SEQ ID NO: 28722 - DNA, 28 bp, synthetic construct
  source 1..28: mol_type = other DNA
gttctcctcctgccttctcatctctagg

SEQ ID NO: 28723 - DNA, 28 bp, synthetic construct
  source 1..28: mol_type = other DNA
taaggcctagagatgagaaggcaggagg

SEQ ID NO: 28724 - DNA, 28 bp, synthetic construct
  source 1..28: mol_type = other DNA
aattaaggcctagagatgagaaggcagg

SEQ ID NO: 28725 - DNA, 28 bp, synthetic construct
  source 1..28: mol_type = other DNA
aggaaattaaggcctagagatgagaagg

SEQ ID NO: 28726 - DNA, 28 bp, synthetic construct
  source 1..28: mol_type = other DNA
gcacatttcacaaatgaggaaattaagg

SEQ ID NO: 28727 - DNA, 28 bp, synthetic construct
  source 1..28: mol_type = other DNA
agaataatggcacatttcacaaatgagg

SEQ ID NO: 28728 - DNA, 28 bp, synthetic construct
  source 1..28: mol_type = other DNA
tttgttcagtgaatgagtagaataatgg

SEQ ID NO: 28729 - DNA, 28 bp, synthetic construct
  source 1..28: mol_type = other DNA
aacaaactcagaagagccatccaccagg

SEQ ID NO: 28730 - DNA, 28 bp, synthetic construct
  source 1..28: mol_type = other DNA
tagcgggagaagagtgcctggtggatgg

SEQ ID NO: 28731 - DNA, 28 bp, synthetic construct
  source 1..28: mol_type = other DNA
tctgtagcgggagaagagtgcctggtgg

SEQ ID NO: 28732 - DNA, 28 bp, synthetic construct
  source 1..28: mol_type = other DNA
atttctgtagcgggagaagagtgcctgg

SEQ ID NO: 28733 - DNA, 28 bp, synthetic construct
  source 1..28: mol_type = other DNA
ctcccgctacagaaatacactcgagagg

SEQ ID NO: 28734 - DNA, 28 bp, synthetic construct
  source 1..28: mol_type = other DNA
gtcctctcgagtgtatttctgtagcggg

SEQ ID NO: 28735 - DNA, 28 bp, synthetic construct
  source 1..28: mol_type = other DNA
agtcctctcgagtgtatttctgtagcgg

SEQ ID NO: 28736 - DNA, 28 bp, synthetic construct
  source 1..28: mol_type = other DNA
tacagaaatacactcgagaggactaagg

SEQ ID NO: 28737 - DNA, 28 bp, synthetic construct
  source 1..28: mol_type = other DNA
agaaatacactcgagaggactaaggagg

SEQ ID NO: 28738 - DNA, 28 bp, synthetic construct
  source 1..28: mol_type = other DNA
gtccctgctcacccccttctattctagg

SEQ ID NO: 28739 - DNA, 28 bp, synthetic construct
  source 1..28: mol_type = other DNA
ttcctagaatagaagggggtgagcaggg

SEQ ID NO: 28740 - DNA, 28 bp, synthetic construct
  source 1..28: mol_type = other DNA
tttcctagaatagaagggggtgagcagg

SEQ ID NO: 28741 - DNA, 28 bp, synthetic construct
  source 1..28: mol_type = other DNA
ctttctcttttcctagaatagaaggggg

SEQ ID NO: 28742 - DNA, 28 bp, synthetic construct
  source 1..28: mol_type = other DNA
tctttctcttttcctagaatagaagggg

SEQ ID NO: 28743 - DNA, 28 bp, synthetic construct
  source 1..28: mol_type = other DNA
gtctttctcttttcctagaatagaaggg

SEQ ID NO: 28744 - DNA, 28 bp, synthetic construct
  source 1..28: mol_type = other DNA
tgtctttctcttttcctagaatagaagg

SEQ ID NO: 28745 - DNA, 28 bp, synthetic construct
  source 1..28: mol_type = other DNA
aagcatatgtatagaacttagtgtctgg

SEQ ID NO: 28746 - DNA, 28 bp, synthetic construct
  source 1..28: mol_type = other DNA
tagtaacgtgacagaaagtgaaaaaagg

SEQ ID NO: 28747 - DNA, 28 bp, synthetic construct
  source 1..28: mol_type = other DNA
agtaacgtgacagaaagtgaaaaaaggg

SEQ ID NO: 28748 - DNA, 28 bp, synthetic construct
  source 1..28: mol_type = other DNA
gtaacgtgacagaaagtgaaaaaagggg

SEQ ID NO: 28749 - DNA, 28 bp, synthetic construct
  source 1..28: mol_type = other DNA
aggggctgctttgcataaaaagatcagg

SEQ ID NO: 28750 - DNA, 28 bp, synthetic construct
  source 1..28: mol_type = other DNA
ggggctgctttgcataaaaagatcaggg

SEQ ID NO: 28751 - DNA, 28 bp, synthetic construct
  source 1..28: mol_type = other DNA
ctgctttgcataaaaagatcagggaagg

SEQ ID NO: 28752 - DNA, 28 bp, synthetic construct
  source 1..28: mol_type = other DNA
aaaaagatcagggaaggcccctctgagg

SEQ ID NO: 28753 - DNA, 28 bp, synthetic construct
  source 1..28: mol_type = other DNA
cagctcaaatgtcagctcctcagagggg

SEQ ID NO: 28754 - DNA, 28 bp, synthetic construct
  source 1..28: mol_type = other DNA
tcagctcaaatgtcagctcctcagaggg

SEQ ID NO: 28755 - DNA, 28 bp, synthetic construct
  source 1..28: mol_type = other DNA
ctcagctcaaatgtcagctcctcagagg

SEQ ID NO: 28756 - DNA, 28 bp, synthetic construct
  source 1..28: mol_type = other DNA
catttgagctgagacttgatcgataagg

SEQ ID NO: 28757 - DNA, 28 bp, synthetic construct
  source 1..28: mol_type = other DNA
ttgatcgataaggaaaaaccagccatgg

SEQ ID NO: 28758 - DNA, 28 bp, synthetic construct
  source 1..28: mol_type = other DNA
tgatcgataaggaaaaaccagccatggg

SEQ ID NO: 28759 - DNA, 28 bp, synthetic construct
  source 1..28: mol_type = other DNA
aaggaaaaaccagccatgggaaaaacgg

SEQ ID NO: 28760 - DNA, 28 bp, synthetic construct
  source 1..28: mol_type = other DNA
aggaaaaaccagccatgggaaaaacggg

SEQ ID NO: 28761 - DNA, 28 bp, synthetic construct
  source 1..28: mol_type = other DNA
ggaaaaaccagccatgggaaaaacgggg

SEQ ID NO: 28762 - DNA, 28 bp, synthetic construct
  source 1..28: mol_type = other DNA
catctttccccgtttttcccatggctgg

SEQ ID NO: 28763 - DNA, 28 bp, synthetic construct
  source 1..28: mol_type = other DNA
aggacatctttccccgtttttcccatgg

SEQ ID NO: 28764 - DNA, 28 bp, synthetic construct
  source 1..28: mol_type = other DNA
atgggaaaaacggggaaagatgtcctgg

SEQ ID NO: 28765 - DNA, 28 bp, synthetic construct
  source 1..28: mol_type = other DNA
tgggaaaaacggggaaagatgtcctggg

SEQ ID NO: 28766 - DNA, 28 bp, synthetic construct
  source 1..28: mol_type = other DNA
aaacggggaaagatgtcctgggcagagg

SEQ ID NO: 28767 - DNA, 28 bp, synthetic construct
  source 1..28: mol_type = other DNA
aacggggaaagatgtcctgggcagaggg

SEQ ID NO: 28768 - DNA, 28 bp, synthetic construct
  source 1..28: mol_type = other DNA
ttcatacatgctgttccctctgcccagg

SEQ ID NO: 28769 - DNA, 28 bp, synthetic construct
  source 1..28: mol_type = other DNA
agggaacagcatgtatgaaagcctaagg

SEQ ID NO: 28770 - DNA, 28 bp, synthetic construct
  source 1..28: mol_type = other DNA
gaaagcctaaggatgagaacaagcttgg

SEQ ID NO: 28771 - DNA, 28 bp, synthetic construct
  source 1..28: mol_type = other DNA
gcaagccaagcttgttctcatccttagg

SEQ ID NO: 28772 - DNA, 28 bp, synthetic construct
  source 1..28: mol_type = other DNA
aaggatgagaacaagcttggcttgctgg

SEQ ID NO: 28773 - DNA, 28 bp, synthetic construct
  source 1..28: mol_type = other DNA
gatgagaacaagcttggcttgctggagg

SEQ ID NO: 28774 - DNA, 28 bp, synthetic construct
  source 1..28: mol_type = other DNA
atgagaacaagcttggcttgctggaggg

SEQ ID NO: 28775 - DNA, 28 bp, synthetic construct
  source 1..28: mol_type = other DNA
tgagaacaagcttggcttgctggagggg

SEQ ID NO: 28776 - DNA, 28 bp, synthetic construct
  source 1..28: mol_type = other DNA
gagaacaagcttggcttgctggaggggg

SEQ ID NO: 28777 - DNA, 28 bp, synthetic construct
  source 1..28: mol_type = other DNA
cttggcttgctggagggggaaaagcagg

SEQ ID NO: 28778 - DNA, 28 bp, synthetic construct
  source 1..28: mol_type = other DNA
ctggagggggaaaagcaggccagcatgg

SEQ ID NO: 28779 - DNA, 28 bp, synthetic construct
  source 1..28: mol_type = other DNA
ccagcatggtgtgaccaaatcacagcgg

SEQ ID NO: 28780 - DNA, 28 bp, synthetic construct
  source 1..28: mol_type = other DNA
cagcatggtgtgaccaaatcacagcggg

SEQ ID NO: 28781 - DNA, 28 bp, synthetic construct
  source 1..28: mol_type = other DNA
ggtgtgaccaaatcacagcgggtacagg

SEQ ID NO: 28782 - DNA, 28 bp, synthetic construct
  source 1..28: mol_type = other DNA
ttttactcctgtacccgctgtgatttgg

SEQ ID NO: 28783 - DNA, 28 bp, synthetic construct
  source 1..28: mol_type = other DNA
ggtacaggagtaaaacagtaaccagtgg

SEQ ID NO: 28784 - DNA, 28 bp, synthetic construct
  source 1..28: mol_type = other DNA
gtacaggagtaaaacagtaaccagtggg

SEQ ID NO: 28785 - DNA, 28 bp, synthetic construct
  source 1..28: mol_type = other DNA
aggagtaaaacagtaaccagtgggttgg

SEQ ID NO: 28786 - DNA, 28 bp, synthetic construct
  source 1..28: mol_type = other DNA
acagtaaccagtgggttggagagagagg

SEQ ID NO: 28787 - DNA, 28 bp, synthetic construct
  source 1..28: mol_type = other DNA
ttgtctgcctctctctccaacccactgg

SEQ ID NO: 28788 - DNA, 28 bp, synthetic construct
  source 1..28: mol_type = other DNA
gatttgagagaggcagcgttgtaggagg

SEQ ID NO: 28789 - DNA, 28 bp, synthetic construct
  source 1..28: mol_type = other DNA
cctacaacgctgcctctctcaaatcagg

SEQ ID NO: 28790 - DNA, 28 bp, synthetic construct
  source 1..28: mol_type = other DNA
caacgctgcctctctcaaatcaggtcgg

SEQ ID NO: 28791 - DNA, 28 bp, synthetic construct
  source 1..28: mol_type = other DNA
gggtcaggccgacctgatttgagagagg

SEQ ID NO: 28792 - DNA, 28 bp, synthetic construct
  source 1..28: mol_type = other DNA
caaatcaggtcggcctgacccaaccagg

SEQ ID NO: 28793 - DNA, 28 bp, synthetic construct
  source 1..28: mol_type = other DNA
gtcggcctgacccaaccaggacatccgg

SEQ ID NO: 28794 - DNA, 28 bp, synthetic construct
  source 1..28: mol_type = other DNA
tcggcctgacccaaccaggacatccggg

SEQ ID NO: 28795 - DNA, 28 bp, synthetic construct
  source 1..28: mol_type = other DNA
ggggcccggatgtcctggttgggtcagg

SEQ ID NO: 28796 - DNA, 28 bp, synthetic construct
  source 1..28: mol_type = other DNA
gacttggggcccggatgtcctggttggg

SEQ ID NO: 28797 - DNA, 28 bp, synthetic construct
  source 1..28: mol_type = other DNA
tgacttggggcccggatgtcctggttgg

SEQ ID NO: 28798 - DNA, 28 bp, synthetic construct
  source 1..28: mol_type = other DNA
ccaggacatccgggccccaagtcacagg

SEQ ID NO: 28799 - DNA, 28 bp, synthetic construct
  source 1..28: mol_type = other DNA
ccgggccccaagtcacaggcagcactgg

SEQ ID NO: 28800 - DNA, 28 bp, synthetic construct
  source 1..28: mol_type = other DNA
cgggccccaagtcacaggcagcactggg

SEQ ID NO: 28801 - DNA, 28 bp, synthetic construct
  source 1..28: mol_type = other DNA
gggccccaagtcacaggcagcactgggg

SEQ ID NO: 28802 - DNA, 28 bp, synthetic construct
  source 1..28: mol_type = other DNA
ggccccaagtcacaggcagcactggggg

SEQ ID NO: 28803 - DNA, 28 bp, synthetic construct
  source 1..28: mol_type = other DNA
tacccccagtgctgcctgtgacttgggg

SEQ ID NO: 28804 - DNA, 28 bp, synthetic construct
  source 1..28: mol_type = other DNA
ttacccccagtgctgcctgtgacttggg

SEQ ID NO: 28805 - DNA, 28 bp, synthetic construct
  source 1..28: mol_type = other DNA
cttacccccagtgctgcctgtgacttgg

SEQ ID NO: 28806 - DNA, 28 bp, synthetic construct
  source 1..28: mol_type = other DNA
caagtcacaggcagcactgggggtaagg

SEQ ID NO: 28807 - DNA, 28 bp, synthetic construct
  source 1..28: mol_type = other DNA
aagtcacaggcagcactgggggtaaggg

SEQ ID NO: 28808 - DNA, 28 bp, synthetic construct
  source 1..28: mol_type = other DNA
gtatgactcagaccccacagcttcctgg

SEQ ID NO: 28809 - DNA, 28 bp, synthetic construct
  source 1..28: mol_type = other DNA
tatgactcagaccccacagcttcctggg

SEQ ID NO: 28810 - DNA, 28 bp, synthetic construct
  source 1..28: mol_type = other DNA
atgactcagaccccacagcttcctgggg

SEQ ID NO: 28811 - DNA, 28 bp, synthetic construct
  source 1..28: mol_type = other DNA
tttttcggggccccaggaagctgtgggg

SEQ ID NO: 28812 - DNA, 28 bp, synthetic construct
  source 1..28: mol_type = other DNA
ttttttcggggccccaggaagctgtggg

SEQ ID NO: 28813 - DNA, 28 bp, synthetic construct
  source 1..28: mol_type = other DNA
gttttttcggggccccaggaagctgtgg

SEQ ID NO: 28814 - DNA, 28 bp, synthetic construct
  source 1..28: mol_type = other DNA
cagcttcctggggccccgaaaaaactgg

SEQ ID NO: 28815 - DNA, 28 bp, synthetic construct
  source 1..28: mol_type = other DNA
cttcctggggccccgaaaaaactggtgg

SEQ ID NO: 28816 - DNA, 28 bp, synthetic construct
  source 1..28: mol_type = other DNA
ttcctggggccccgaaaaaactggtggg

SEQ ID NO: 28817 - DNA, 28 bp, synthetic construct
  source 1..28: mol_type = other DNA
tcctggggccccgaaaaaactggtgggg

SEQ ID NO: 28818 - DNA, 28 bp, synthetic construct
  source 1..28: mol_type = other DNA
cctggggccccgaaaaaactggtggggg

SEQ ID NO: 28819 - DNA, 28 bp, synthetic construct
  source 1..28: mol_type = other DNA
ctggatacccccaccagttttttcgggg

SEQ ID NO: 28820 - DNA, 28 bp, synthetic construct
  source 1..28: mol_type = other DNA
cccgaaaaaactggtgggggtatccagg

SEQ ID NO: 28821 - DNA, 28 bp, synthetic construct
  source 1..28: mol_type = other DNA
ccgaaaaaactggtgggggtatccaggg

SEQ ID NO: 28822 - DNA, 28 bp, synthetic construct
  source 1..28: mol_type = other DNA
cgaaaaaactggtgggggtatccagggg

SEQ ID NO: 28823 - DNA, 28 bp, synthetic construct
  source 1..28: mol_type = other DNA
aaaactggtgggggtatccaggggcagg

SEQ ID NO: 28824 - DNA, 28 bp, synthetic construct
  source 1..28: mol_type = other DNA
catgctgaaggttgatgcctgcccctgg

SEQ ID NO: 28825 - DNA, 28 bp, synthetic construct
  source 1..28: mol_type = other DNA
gggtatggcatggcactcatgctgaagg

SEQ ID NO: 28826 - DNA, 28 bp, synthetic construct
  source 1..28: mol_type = other DNA
cagcatgagtgccatgccatacccatgg

SEQ ID NO: 28827 - DNA, 28 bp, synthetic construct
  source 1..28: mol_type = other DNA
ccatgccatacccatggaacacccaagg

SEQ ID NO: 28828 - DNA, 28 bp, synthetic construct
  source 1..28: mol_type = other DNA
gccatacccatggaacacccaaggctgg

SEQ ID NO: 28829 - DNA, 28 bp, synthetic construct
  source 1..28: mol_type = other DNA
ccatacccatggaacacccaaggctggg

SEQ ID NO: 28830 - DNA, 28 bp, synthetic construct
  source 1..28: mol_type = other DNA
tgtctcccagccttgggtgttccatggg

SEQ ID NO: 28831 - DNA, 28 bp, synthetic construct
  source 1..28: mol_type = other DNA
ttgtctcccagccttgggtgttccatgg

SEQ ID NO: 28832 - DNA, 28 bp, synthetic construct
  source 1..28: mol_type = other DNA
aacacccaaggctgggagacaaacgtgg

SEQ ID NO: 28833 - DNA, 28 bp, synthetic construct
  source 1..28: mol_type = other DNA
gtaaccacgtttgtctcccagccttggg

SEQ ID NO: 28834 - DNA, 28 bp, synthetic construct
  source 1..28: mol_type = other DNA
tgtaaccacgtttgtctcccagccttgg

SEQ ID NO: 28835 - DNA, 28 bp, synthetic construct
  source 1..28: mol_type = other DNA
cgtgtagaacactgcacactcccagcgg

SEQ ID NO: 28836 - DNA, 28 bp, synthetic construct
  source 1..28: mol_type = other DNA
gcacactcccagcggcagcttccagagg

SEQ ID NO: 28837 - DNA, 28 bp, synthetic construct
  source 1..28: mol_type = other DNA
cacactcccagcggcagcttccagaggg

SEQ ID NO: 28838 - DNA, 28 bp, synthetic construct
  source 1..28: mol_type = other DNA
acactcccagcggcagcttccagagggg

SEQ ID NO: 28839 - DNA, 28 bp, synthetic construct
  source 1..28: mol_type = other DNA
tcatgcccctctggaagctgccgctggg

SEQ ID NO: 28840 - DNA, 28 bp, synthetic construct
  source 1..28: mol_type = other DNA
atcatgcccctctggaagctgccgctgg

SEQ ID NO: 28841 - DNA, 28 bp, synthetic construct
  source 1..28: mol_type = other DNA
atggaagcacgtgatcatgcccctctgg

SEQ ID NO: 28842 - DNA, 28 bp, synthetic construct
  source 1..28: mol_type = other DNA
aatgtgatcagggactggcacttcatgg

SEQ ID NO: 28843 - DNA, 28 bp, synthetic construct
  source 1..28: mol_type = other DNA
ccagtccctgatcacattattttcccgg

SEQ ID NO: 28844 - DNA, 28 bp, synthetic construct
  source 1..28: mol_type = other DNA
cagtccctgatcacattattttcccggg

SEQ ID NO: 28845 - DNA, 28 bp, synthetic construct
  source 1..28: mol_type = other DNA
gtgtcccgggaaaataatgtgatcaggg

SEQ ID NO: 28846 - DNA, 28 bp, synthetic construct
  source 1..28: mol_type = other DNA
tgtgtcccgggaaaataatgtgatcagg

SEQ ID NO: 28847 - DNA, 28 bp, synthetic construct
  source 1..28: mol_type = other DNA
cacattattttcccgggacacagccagg

SEQ ID NO: 28848 - DNA, 28 bp, synthetic construct
  source 1..28: mol_type = other DNA
aaggctgctgtcctggctgtgtcccggg

SEQ ID NO: 28849 - DNA, 28 bp, synthetic construct
  source 1..28: mol_type = other DNA
caaggctgctgtcctggctgtgtcccgg

SEQ ID NO: 28850 - DNA, 28 bp, synthetic construct
  source 1..28: mol_type = other DNA
cgggacacagccaggacagcagccttgg

SEQ ID NO: 28851 - DNA, 28 bp, synthetic construct
  source 1..28: mol_type = other DNA
cacagccaggacagcagccttggtcagg

SEQ ID NO: 28852 - DNA, 28 bp, synthetic construct
  source 1..28: mol_type = other DNA
acagccaggacagcagccttggtcaggg

SEQ ID NO: 28853 - DNA, 28 bp, synthetic construct
  source 1..28: mol_type = other DNA
cagccaggacagcagccttggtcagggg

SEQ ID NO: 28854 - DNA, 28 bp, synthetic construct
  source 1..28: mol_type = other DNA
tttcccctgaccaaggctgctgtcctgg

SEQ ID NO: 28855 - DNA, 28 bp, synthetic construct
  source 1..28: mol_type = other DNA
aggacagcagccttggtcaggggaaagg

SEQ ID NO: 28856 - DNA, 28 bp, synthetic construct
  source 1..28: mol_type = other DNA
ggacagcagccttggtcaggggaaaggg

SEQ ID NO: 28857 - DNA, 28 bp, synthetic construct
  source 1..28: mol_type = other DNA
cagccttggtcaggggaaagggaacagg

SEQ ID NO: 28858 - DNA, 28 bp, synthetic construct
  source 1..28: mol_type = other DNA
agccttggtcaggggaaagggaacaggg

SEQ ID NO: 28859 - DNA, 28 bp, synthetic construct
  source 1..28: mol_type = other DNA
gaccctgttccctttcccctgaccaagg

SEQ ID NO: 28860 - DNA, 28 bp, synthetic construct
  source 1..28: mol_type = other DNA
ggtcaggggaaagggaacagggtccagg

SEQ ID NO: 28861 - DNA, 28 bp, synthetic construct
  source 1..28: mol_type = other DNA
tccaggattcaagcgttgctagtcttgg

SEQ ID NO: 28862 - DNA, 28 bp, synthetic construct
  source 1..28: mol_type = other DNA
ccaggattcaagcgttgctagtcttggg

SEQ ID NO: 28863 - DNA, 28 bp, synthetic construct
  source 1..28: mol_type = other DNA
gtcttgggaaagccttaaccttctctgg

SEQ ID NO: 28864 - DNA, 28 bp, synthetic construct
  source 1..28: mol_type = other DNA
tcttgggaaagccttaaccttctctggg

SEQ ID NO: 28865 - DNA, 28 bp, synthetic construct
  source 1..28: mol_type = other DNA
ggaaactgaggcccagagaaggttaagg

SEQ ID NO: 28866 - DNA, 28 bp, synthetic construct
  source 1..28: mol_type = other DNA
agatgaggaaactgaggcccagagaagg

SEQ ID NO: 28867 - DNA, 28 bp, synthetic construct
  source 1..28: mol_type = other DNA
tcttaattttcagatgaggaaactgagg

SEQ ID NO: 28868 - DNA, 28 bp, synthetic construct
  source 1..28: mol_type = other DNA
tctaacaactcttaattttcagatgagg

SEQ ID NO: 28869 - DNA, 28 bp, synthetic construct
  source 1..28: mol_type = other DNA
taagagttgttagaaagattaagtgagg

SEQ ID NO: 28870 - DNA, 28 bp, synthetic construct
  source 1..28: mol_type = other DNA
agttgttagaaagattaagtgaggccgg

SEQ ID NO: 28871 - DNA, 28 bp, synthetic construct
  source 1..28: mol_type = other DNA
gttgttagaaagattaagtgaggccggg

SEQ ID NO: 28872 - DNA, 28 bp, synthetic construct
  source 1..28: mol_type = other DNA
gttagaaagattaagtgaggccgggcgg

SEQ ID NO: 28873 - DNA, 28 bp, synthetic construct
  source 1..28: mol_type = other DNA
ttagaaagattaagtgaggccgggcggg

SEQ ID NO: 28874 - DNA, 28 bp, synthetic construct
  source 1..28: mol_type = other DNA
tagaaagattaagtgaggccgggcgggg

SEQ ID NO: 28875 - DNA, 28 bp, synthetic construct
  source 1..28: mol_type = other DNA
aaagattaagtgaggccgggcggggcgg

SEQ ID NO: 28876 - DNA, 28 bp, synthetic construct
  source 1..28: mol_type = other DNA
gatcacaggtgtgagccgccccgcccgg

SEQ ID NO: 28877 - DNA, 28 bp, synthetic construct
  source 1..28: mol_type = other DNA
ctcacacctgtgatcccagcactttagg

SEQ ID NO: 28878 - DNA, 28 bp, synthetic construct
  source 1..28: mol_type = other DNA
acacctgtgatcccagcactttaggagg

SEQ ID NO: 28879 - DNA, 28 bp, synthetic construct
  source 1..28: mol_type = other DNA
cagcctcctaaagtgctgggatcacagg

SEQ ID NO: 28880 - DNA, 28 bp, synthetic construct
  source 1..28: mol_type = other DNA
atcccagcactttaggaggctgagacgg

SEQ ID NO: 28881 - DNA, 28 bp, synthetic construct
  source 1..28: mol_type = other DNA
tcccagcactttaggaggctgagacggg

SEQ ID NO: 28882 - DNA, 28 bp, synthetic construct
  source 1..28: mol_type = other DNA
gcccgtctcagcctcctaaagtgctggg

SEQ ID NO: 28883 - DNA, 28 bp, synthetic construct
  source 1..28: mol_type = other DNA
cgcccgtctcagcctcctaaagtgctgg

SEQ ID NO: 28884 - DNA, 28 bp, synthetic construct
  source 1..28: mol_type = other DNA
cagcactttaggaggctgagacgggcgg

SEQ ID NO: 28885 - DNA, 28 bp, synthetic construct
  source 1..28: mol_type = other DNA
gaggctgagacgggcggatcacttgagg

SEQ ID NO: 28886 - DNA, 28 bp, synthetic construct
  source 1..28: mol_type = other DNA
tgagacgggcggatcacttgaggtcagg

SEQ ID NO: 28887 - DNA, 28 bp, synthetic construct
  source 1..28: mol_type = other DNA
tgaggtcaggagtttgagaccagcctgg

SEQ ID NO: 28888 - DNA, 28 bp, synthetic construct
  source 1..28: mol_type = other DNA
gagtttgagaccagcctggccaacatgg

SEQ ID NO: 28889 - DNA, 28 bp, synthetic construct
  source 1..28: mol_type = other DNA
gacagtttcaccatgttggccaggctgg

SEQ ID NO: 28890 - DNA, 28 bp, synthetic construct
  source 1..28: mol_type = other DNA
tagagacagtttcaccatgttggccagg

SEQ ID NO: 28891 - DNA, 28 bp, synthetic construct
  source 1..28: mol_type = other DNA
ttgagtagagacagtttcaccatgttgg

SEQ ID NO: 28892 - DNA, 28 bp, synthetic construct
  source 1..28: mol_type = other DNA
ctactcaaaatacaaaaaaattagccgg

SEQ ID NO: 28893 - DNA, 28 bp, synthetic construct
  source 1..28: mol_type = other DNA
tactcaaaatacaaaaaaattagccggg

SEQ ID NO: 28894 - DNA, 28 bp, synthetic construct
  source 1..28: mol_type = other DNA
actcaaaatacaaaaaaattagccgggg

SEQ ID NO: 28895 - DNA, 28 bp, synthetic construct
  source 1..28: mol_type = other DNA
aaaatacaaaaaaattagccggggatgg

SEQ ID NO: 28896 - DNA, 28 bp, synthetic construct
  source 1..28: mol_type = other DNA
atacaaaaaaattagccggggatggtgg

SEQ ID NO: 28897 - DNA, 28 bp, synthetic construct
  source 1..28: mol_type = other DNA
gattacaggcactcgccaccatccccgg

SEQ ID NO: 28898 - DNA, 28 bp, synthetic construct
  source 1..28: mol_type = other DNA
gcgagtgcctgtaatcccagctactcgg

SEQ ID NO: 28899 - DNA, 28 bp, synthetic construct
  source 1..28: mol_type = other DNA
cgagtgcctgtaatcccagctactcggg

SEQ ID NO: 28900 - DNA, 28 bp, synthetic construct
  source 1..28: mol_type = other DNA
gtgcctgtaatcccagctactcgggagg

SEQ ID NO: 28901 - DNA, 28 bp, synthetic construct
  source 1..28: mol_type = other DNA
cagcctcccgagtagctgggattacagg

SEQ ID NO: 28902 - DNA, 28 bp, synthetic construct
  source 1..28: mol_type = other DNA
gtaatcccagctactcgggaggctgagg

SEQ ID NO: 28903 - DNA, 28 bp, synthetic construct
  source 1..28: mol_type = other DNA
tcccagctactcgggaggctgaggtagg

SEQ ID NO: 28904 - DNA, 28 bp, synthetic construct
  source 1..28: mol_type = other DNA
tcctacctcagcctcccgagtagctggg

SEQ ID NO: 28905 - DNA, 28 bp, synthetic construct
  source 1..28: mol_type = other DNA
ctcctacctcagcctcccgagtagctgg

SEQ ID NO: 28906 - DNA, 28 bp, synthetic construct
  source 1..28: mol_type = other DNA
ctgaggtaggagaatcgcttgaacctgg

SEQ ID NO: 28907 - DNA, 28 bp, synthetic construct
  source 1..28: mol_type = other DNA
tgaggtaggagaatcgcttgaacctggg

SEQ ID NO: 28908 - DNA, 28 bp, synthetic construct
  source 1..28: mol_type = other DNA
ggtaggagaatcgcttgaacctgggagg

SEQ ID NO: 28909 - DNA, 28 bp, synthetic construct
  source 1..28: mol_type = other DNA
ctcggctcacggcaacttgcctcccagg

SEQ ID NO: 28910 - DNA, 28 bp, synthetic construct
  source 1..28: mol_type = other DNA
agtgcagtggcacgatctcggctcacgg

SEQ ID NO: 28911 - DNA, 28 bp, synthetic construct
  source 1..28: mol_type = other DNA
aggctggagtgcagtggcacgatctcgg

SEQ ID NO: 28912 - DNA, 28 bp, synthetic construct
  source 1..28: mol_type = other DNA
gagatcgtgccactgcactccagcctgg

SEQ ID NO: 28913 - DNA, 28 bp, synthetic construct
  source 1..28: mol_type = other DNA
agatcgtgccactgcactccagcctggg

SEQ ID NO: 28914 - DNA, 28 bp, synthetic construct
  source 1..28: mol_type = other DNA
ctctgttacccaggctggagtgcagtgg

SEQ ID NO: 28915 - DNA, 28 bp, synthetic construct
  source 1..28: mol_type = other DNA
cagagtctcactctgttacccaggctgg

SEQ ID NO: 28916 - DNA, 28 bp, synthetic construct
  source 1..28: mol_type = other DNA
gagacagagtctcactctgttacccagg

SEQ ID NO: 28917 - DNA, 28 bp, synthetic construct
  source 1..28: mol_type = other DNA
aaaaaaaaaaagattaaatgagatacgg

SEQ ID NO: 28918 - DNA, 28 bp, synthetic construct
  source 1..28: mol_type = other DNA
acacgtgcacacaaatgtcctacagtgg

SEQ ID NO: 28919 - DNA, 28 bp, synthetic construct
  source 1..28: mol_type = other DNA
gtatgaaggctgagctttccactgtagg

SEQ ID NO: 28920 - DNA, 28 bp, synthetic construct
  source 1..28: mol_type = other DNA
gagtgcttctggggatggagtatgaagg

SEQ ID NO: 28921 - DNA, 28 bp, synthetic construct
  source 1..28: mol_type = other DNA
catactccatccccagaagcactcctgg

SEQ ID NO: 28922 - DNA, 28 bp, synthetic construct
  source 1..28: mol_type = other DNA
gagtttccaggagtgcttctggggatgg

SEQ ID NO: 28923 - DNA, 28 bp, synthetic construct
  source 1..28: mol_type = other DNA
ggatgagtttccaggagtgcttctgggg

SEQ ID NO: 28924 - DNA, 28 bp, synthetic construct
  source 1..28: mol_type = other DNA
tggatgagtttccaggagtgcttctggg

SEQ ID NO: 28925 - DNA, 28 bp, synthetic construct
  source 1..28: mol_type = other DNA
atggatgagtttccaggagtgcttctgg

SEQ ID NO: 28926 - DNA, 28 bp, synthetic construct
  source 1..28: mol_type = other DNA
gcatgtgcaggatggatgagtttccagg

SEQ ID NO: 28927 - DNA, 28 bp, synthetic construct
  source 1..28: mol_type = other DNA
gaggcatttgtgtgcatgtgcaggatgg

SEQ ID NO: 28928 - DNA, 28 bp, synthetic construct
  source 1..28: mol_type = other DNA
gttggaggcatttgtgtgcatgtgcagg

SEQ ID NO: 28929 - DNA, 28 bp, synthetic construct
  source 1..28: mol_type = other DNA
acatattttgtatgcacattgttggagg

SEQ ID NO: 28930 - DNA, 28 bp, synthetic construct
  source 1..28: mol_type = other DNA
tgaacatattttgtatgcacattgttgg

SEQ ID NO: 28931 - DNA, 28 bp, synthetic construct
  source 1..28: mol_type = other DNA
atatgttcaacagaaatagtatagtagg

SEQ ID NO: 28932 - DNA, 28 bp, synthetic construct
  source 1..28: mol_type = other DNA
aacagaaatagtatagtaggaactctgg

SEQ ID NO: 28933 - DNA, 28 bp, synthetic construct
  source 1..28: mol_type = other DNA
aaagtcagatatgaactcaggcatttgg

SEQ ID NO: 28934 - DNA, 28 bp, synthetic construct
  source 1..28: mol_type = other DNA
gagttgcaaagtcagatatgaactcagg

SEQ ID NO: 28935 - DNA, 28 bp, synthetic construct
  source 1..28: mol_type = other DNA
gtgtgacctcaagctccaagtacctcgg

SEQ ID NO: 28936 - DNA, 28 bp, synthetic construct
  source 1..28: mol_type = other DNA
aggaaaccgaggtacttggagcttgagg

SEQ ID NO: 28937 - DNA, 28 bp, synthetic construct
  source 1..28: mol_type = other DNA
ttatactttaggaaaccgaggtacttgg

SEQ ID NO: 28938 - DNA, 28 bp, synthetic construct
  source 1..28: mol_type = other DNA
tacctcggtttcctaaagtataaaatgg

SEQ ID NO: 28939 - DNA, 28 bp, synthetic construct
  source 1..28: mol_type = other DNA
ctccattttatactttaggaaaccgagg

SEQ ID NO: 28940 - DNA, 28 bp, synthetic construct
  source 1..28: mol_type = other DNA
tgttattatctccattttatactttagg

SEQ ID NO: 28941 - DNA, 28 bp, synthetic construct
  source 1..28: mol_type = other DNA
cgggtaagccggccggcccggagcgggg

SEQ ID NO: 28942 - DNA, 28 bp, synthetic construct
  source 1..28: mol_type = other DNA
tcgggtaagccggccggcccggagcggg

SEQ ID NO: 28943 - DNA, 28 bp, synthetic construct
  source 1..28: mol_type = other DNA
ctcgggtaagccggccggcccggagcgg

SEQ ID NO: 28944 - DNA, 28 bp, synthetic construct
  source 1..28: mol_type = other DNA
cgctccgggccggccggcttacccgagg

SEQ ID NO: 28945 - DNA, 28 bp, synthetic construct
  source 1..28: mol_type = other DNA
ccgggccggccggcttacccgaggacgg

SEQ ID NO: 28946 - DNA, 28 bp, synthetic construct
  source 1..28: mol_type = other DNA
cgggccggccggcttacccgaggacggg

SEQ ID NO: 28947 - DNA, 28 bp, synthetic construct
  source 1..28: mol_type = other DNA
gggccggccggcttacccgaggacgggg

SEQ ID NO: 28948 - DNA, 28 bp, synthetic construct
  source 1..28: mol_type = other DNA
gctccccgtcctcgggtaagccggccgg

SEQ ID NO: 28949 - DNA, 28 bp, synthetic construct
  source 1..28: mol_type = other DNA
ccggcttacccgaggacggggagcttgg

SEQ ID NO: 28950 - DNA, 28 bp, synthetic construct
  source 1..28: mol_type = other DNA
cggcttacccgaggacggggagcttggg

SEQ ID NO: 28951 - DNA, 28 bp, synthetic construct
  source 1..28: mol_type = other DNA
ggcttacccgaggacggggagcttgggg

SEQ ID NO: 28952 - DNA, 28 bp, synthetic construct
  source 1..28: mol_type = other DNA
ctgtgtccccaagctccccgtcctcggg

SEQ ID NO: 28953 - DNA, 28 bp, synthetic construct
  source 1..28: mol_type = other DNA
gctgtgtccccaagctccccgtcctcgg

SEQ ID NO: 28954 - DNA, 28 bp, synthetic construct
  source 1..28: mol_type = other DNA
gattcggggctggacgcagcaagcgggg

SEQ ID NO: 28955 - DNA, 28 bp, synthetic construct
  source 1..28: mol_type = other DNA
ggattcggggctggacgcagcaagcggg

SEQ ID NO: 28956 - DNA, 28 bp, synthetic construct
  source 1..28: mol_type = other DNA
tggattcggggctggacgcagcaagcgg

SEQ ID NO: 28957 - DNA, 28 bp, synthetic construct
  source 1..28: mol_type = other DNA
gcttgctgcgtccagccccgaatccagg

SEQ ID NO: 28958 - DNA, 28 bp, synthetic construct
  source 1..28: mol_type = other DNA
cttgctgcgtccagccccgaatccaggg

SEQ ID NO: 28959 - DNA, 28 bp, synthetic construct
  source 1..28: mol_type = other DNA
ctgcgtccagccccgaatccagggacgg

SEQ ID NO: 28960 - DNA, 28 bp, synthetic construct
  source 1..28: mol_type = other DNA
tgcgtccagccccgaatccagggacggg

SEQ ID NO: 28961 - DNA, 28 bp, synthetic construct
  source 1..28: mol_type = other DNA
gcgtccagccccgaatccagggacgggg

SEQ ID NO: 28962 - DNA, 28 bp, synthetic construct
  source 1..28: mol_type = other DNA
gctgccccgtccctggattcggggctgg

SEQ ID NO: 28963 - DNA, 28 bp, synthetic construct
  source 1..28: mol_type = other DNA
agccccgaatccagggacggggcagcgg

SEQ ID NO: 28964 - DNA, 28 bp, synthetic construct
  source 1..28: mol_type = other DNA
ggccgctgccccgtccctggattcgggg

SEQ ID NO: 28965 - DNA, 28 bp, synthetic construct
  source 1..28: mol_type = other DNA
gggccgctgccccgtccctggattcggg

SEQ ID NO: 28966 - DNA, 28 bp, synthetic construct
  source 1..28: mol_type = other DNA
cgggccgctgccccgtccctggattcgg

SEQ ID NO: 28967 - DNA, 28 bp, synthetic construct
  source 1..28: mol_type = other DNA
cgaatccagggacggggcagcggcccgg

SEQ ID NO: 28968 - DNA, 28 bp, synthetic construct
  source 1..28: mol_type = other DNA
gaatccagggacggggcagcggcccggg

SEQ ID NO: 28969 - DNA, 28 bp, synthetic construct
  source 1..28: mol_type = other DNA
cttgcccgggccgctgccccgtccctgg

SEQ ID NO: 28970 - DNA, 28 bp, synthetic construct
  source 1..28: mol_type = other DNA
cagggacggggcagcggcccgggcaagg

SEQ ID NO: 28971 - DNA, 28 bp, synthetic construct
  source 1..28: mol_type = other DNA
cggggcagcggcccgggcaaggctccgg

SEQ ID NO: 28972 - DNA, 28 bp, synthetic construct
  source 1..28: mol_type = other DNA
gctacggggggccggagccttgcccggg

SEQ ID NO: 28973 - DNA, 28 bp, synthetic construct
  source 1..28: mol_type = other DNA
tgctacggggggccggagccttgcccgg

SEQ ID NO: 28974 - DNA, 28 bp, synthetic construct
  source 1..28: mol_type = other DNA
ggctccggccccccgtagcactcctagg

SEQ ID NO: 28975 - DNA, 28 bp, synthetic construct
  source 1..28: mol_type = other DNA
gctccggccccccgtagcactcctaggg

SEQ ID NO: 28976 - DNA, 28 bp, synthetic construct
  source 1..28: mol_type = other DNA
gagccctaggagtgctacggggggccgg

SEQ ID NO: 28977 - DNA, 28 bp, synthetic construct
  source 1..28: mol_type = other DNA
ccccccgtagcactcctagggctcctgg

SEQ ID NO: 28978 - DNA, 28 bp, synthetic construct
  source 1..28: mol_type = other DNA
tccaggagccctaggagtgctacggggg

SEQ ID NO: 28979 - DNA, 28 bp, synthetic construct
  source 1..28: mol_type = other DNA
gtccaggagccctaggagtgctacgggg

SEQ ID NO: 28980 - DNA, 28 bp, synthetic construct
  source 1..28: mol_type = other DNA
cgtccaggagccctaggagtgctacggg

SEQ ID NO: 28981 - DNA, 28 bp, synthetic construct
  source 1..28: mol_type = other DNA
ccgtagcactcctagggctcctggacgg

SEQ ID NO: 28982 - DNA, 28 bp, synthetic construct
  source 1..28: mol_type = other DNA
cgtagcactcctagggctcctggacggg

SEQ ID NO: 28983 - DNA, 28 bp, synthetic construct
  source 1..28: mol_type = other DNA
gtagcactcctagggctcctggacgggg

SEQ ID NO: 28984 - DNA, 28 bp, synthetic construct
  source 1..28: mol_type = other DNA
tagcactcctagggctcctggacggggg

SEQ ID NO: 28985 - DNA, 28 bp, synthetic construct
  source 1..28: mol_type = other DNA
actcctagggctcctggacgggggcagg

SEQ ID NO: 28986 - DNA, 28 bp, synthetic construct
  source 1..28: mol_type = other DNA
ctcctagggctcctggacgggggcaggg

SEQ ID NO: 28987 - DNA, 28 bp, synthetic construct
  source 1..28: mol_type = other DNA
tgccctgcccccgtccaggagccctagg

SEQ ID NO: 28988 - DNA, 28 bp, synthetic construct
  source 1..28: mol_type = other DNA
ggctcctggacgggggcagggcacccgg

SEQ ID NO: 28989 - DNA, 28 bp, synthetic construct
  source 1..28: mol_type = other DNA
gctcctggacgggggcagggcacccggg

SEQ ID NO: 28990 - DNA, 28 bp, synthetic construct
  source 1..28: mol_type = other DNA
cggcccgggtgccctgcccccgtccagg

SEQ ID NO: 28991 - DNA, 28 bp, synthetic construct
  source 1..28: mol_type = other DNA
ggacgggggcagggcacccgggccgagg

SEQ ID NO: 28992 - DNA, 28 bp, synthetic construct
  source 1..28: mol_type = other DNA
gggcagggcacccgggccgaggacgagg

SEQ ID NO: 28993 - DNA, 28 bp, synthetic construct
  source 1..28: mol_type = other DNA
acccgggccgaggacgaggaagtgccgg

SEQ ID NO: 28994 - DNA, 28 bp, synthetic construct
  source 1..28: mol_type = other DNA
cccgggccgaggacgaggaagtgccggg

SEQ ID NO: 28995 - DNA, 28 bp, synthetic construct
  source 1..28: mol_type = other DNA
ccgggccgaggacgaggaagtgccgggg

SEQ ID NO: 28996 - DNA, 28 bp, synthetic construct
  source 1..28: mol_type = other DNA
cgggccgaggacgaggaagtgccggggg

SEQ ID NO: 28997 - DNA, 28 bp, synthetic construct
  source 1..28: mol_type = other DNA
caggcccccggcacttcctcgtcctcgg

SEQ ID NO: 28998 - DNA, 28 bp, synthetic construct
  source 1..28: mol_type = other DNA
cgaggacgaggaagtgccgggggcctgg

SEQ ID NO: 28999 - DNA, 28 bp, synthetic construct
  source 1..28: mol_type = other DNA
gacgaggaagtgccgggggcctggccgg

SEQ ID NO: 29000 - DNA, 28 bp, synthetic construct
  source 1..28: mol_type = other DNA
acgaggaagtgccgggggcctggccggg

SEQ ID NO: 29001 - DNA, 28 bp, synthetic construct
  source 1..28: mol_type = other DNA
ggtgagtgactagatgggggccggtggg

SEQ ID NO: 29002 - DNA, 28 bp, synthetic construct
  source 1..28: mol_type = other DNA
aggtgagtgactagatgggggccggtgg

SEQ ID NO: 29003 - DNA, 28 bp, synthetic construct
  source 1..28: mol_type = other DNA
accggcccccatctagtcactcacctgg

SEQ ID NO: 29004 - DNA, 28 bp, synthetic construct
  source 1..28: mol_type = other DNA
ccggcccccatctagtcactcacctggg

SEQ ID NO: 29005 - DNA, 28 bp, synthetic construct
  source 1..28: mol_type = other DNA
cggcccccatctagtcactcacctgggg

SEQ ID NO: 29006 - DNA, 28 bp, synthetic construct
  source 1..28: mol_type = other DNA
cttccccaggtgagtgactagatggggg

SEQ ID NO: 29007 - DNA, 28 bp, synthetic construct
  source 1..28: mol_type = other DNA
ccccatctagtcactcacctggggaagg

SEQ ID NO: 29008 - DNA, 28 bp, synthetic construct
  source 1..28: mol_type = other DNA
cccatctagtcactcacctggggaaggg

SEQ ID NO: 29009 - DNA, 28 bp, synthetic construct
  source 1..28: mol_type = other DNA
gcccttccccaggtgagtgactagatgg

SEQ ID NO: 29010 - DNA, 28 bp, synthetic construct
  source 1..28: mol_type = other DNA
tctagtcactcacctggggaagggcagg

SEQ ID NO: 29011 - DNA, 28 bp, synthetic construct
  source 1..28: mol_type = other DNA
acctggggaagggcaggagaatacgagg

SEQ ID NO: 29012 - DNA, 28 bp, synthetic construct
  source 1..28: mol_type = other DNA
cctggggaagggcaggagaatacgaggg

SEQ ID NO: 29013 - DNA, 28 bp, synthetic construct
  source 1..28: mol_type = other DNA
aggagaatacgagggtgtgtgcaccagg

SEQ ID NO: 29014 - DNA, 28 bp, synthetic construct
  source 1..28: mol_type = other DNA
ggagaatacgagggtgtgtgcaccaggg

SEQ ID NO: 29015 - DNA, 28 bp, synthetic construct
  source 1..28: mol_type = other DNA
gagaatacgagggtgtgtgcaccagggg

SEQ ID NO: 29016 - DNA, 28 bp, synthetic construct
  source 1..28: mol_type = other DNA
aatacgagggtgtgtgcaccaggggcgg

SEQ ID NO: 29017 - DNA, 28 bp, synthetic construct
  source 1..28: mol_type = other DNA
gcaccaggggcggctgtccctatgaagg

SEQ ID NO: 29018 - DNA, 28 bp, synthetic construct
  source 1..28: mol_type = other DNA
gagccttcatagggacagccgcccctgg

SEQ ID NO: 29019 - DNA, 28 bp, synthetic construct
  source 1..28: mol_type = other DNA
ggcggctgtccctatgaaggctcctcgg

SEQ ID NO: 29020 - DNA, 28 bp, synthetic construct
  source 1..28: mol_type = other DNA
cacagtgagccgaggagccttcataggg

SEQ ID NO: 29021 - DNA, 28 bp, synthetic construct
  source 1..28: mol_type = other DNA
gcacagtgagccgaggagccttcatagg

SEQ ID NO: 29022 - DNA, 28 bp, synthetic construct
  source 1..28: mol_type = other DNA
gctcctcggctcactgtgcttctgcagg

SEQ ID NO: 29023 - DNA, 28 bp, synthetic construct
  source 1..28: mol_type = other DNA
cttcctgcagaagcacagtgagccgagg

SEQ ID NO: 29024 - DNA, 28 bp, synthetic construct
  source 1..28: mol_type = other DNA
ctcggctcactgtgcttctgcaggaagg

SEQ ID NO: 29025 - DNA, 28 bp, synthetic construct
  source 1..28: mol_type = other DNA
ggctcactgtgcttctgcaggaaggagg

SEQ ID NO: 29026 - DNA, 28 bp, synthetic construct
  source 1..28: mol_type = other DNA
gctcactgtgcttctgcaggaaggaggg

SEQ ID NO: 29027 - DNA, 28 bp, synthetic construct
  source 1..28: mol_type = other DNA
actgtgcttctgcaggaaggagggctgg

SEQ ID NO: 29028 - DNA, 28 bp, synthetic construct
  source 1..28: mol_type = other DNA
ctgtgcttctgcaggaaggagggctggg

SEQ ID NO: 29029 - DNA, 28 bp, synthetic construct
  source 1..28: mol_type = other DNA
acaggtaggataggaacggggtgggagg

SEQ ID NO: 29030 - DNA, 28 bp, synthetic construct
  source 1..28: mol_type = other DNA
gcaacaggtaggataggaacggggtggg

SEQ ID NO: 29031 - DNA, 28 bp, synthetic construct
  source 1..28: mol_type = other DNA
ggcaacaggtaggataggaacggggtgg

SEQ ID NO: 29032 - DNA, 28 bp, synthetic construct
  source 1..28: mol_type = other DNA
agtggcaacaggtaggataggaacgggg

SEQ ID NO: 29033 - DNA, 28 bp, synthetic construct
  source 1..28: mol_type = other DNA
aagtggcaacaggtaggataggaacggg

SEQ ID NO: 29034 - DNA, 28 bp, synthetic construct
  source 1..28: mol_type = other DNA
taagtggcaacaggtaggataggaacgg

SEQ ID NO: 29035 - DNA, 28 bp, synthetic construct
  source 1..28: mol_type = other DNA
gagagtaagtggcaacaggtaggatagg

SEQ ID NO: 29036 - DNA, 28 bp, synthetic construct
  source 1..28: mol_type = other DNA
cctacctgttgccacttactctctgagg

SEQ ID NO: 29037 - DNA, 28 bp, synthetic construct
  source 1..28: mol_type = other DNA
gaagcctcagagagtaagtggcaacagg

SEQ ID NO: 29038 - DNA, 28 bp, synthetic construct
  source 1..28: mol_type = other DNA
ggatggagaagcctcagagagtaagtgg

SEQ ID NO: 29039 - DNA, 28 bp, synthetic construct
  source 1..28: mol_type = other DNA
gaggcttctccatccatagtgaagaagg

SEQ ID NO: 29040 - DNA, 28 bp, synthetic construct
  source 1..28: mol_type = other DNA
aggcttctccatccatagtgaagaaggg

SEQ ID NO: 29041 - DNA, 28 bp, synthetic construct
  source 1..28: mol_type = other DNA
ggcttctccatccatagtgaagaagggg

SEQ ID NO: 29042 - DNA, 28 bp, synthetic construct
  source 1..28: mol_type = other DNA
gagtgggccccttcttcactatggatgg

SEQ ID NO: 29043 - DNA, 28 bp, synthetic construct
  source 1..28: mol_type = other DNA
gaaggagtgggccccttcttcactatgg

SEQ ID NO: 29044 - DNA, 28 bp, synthetic construct
  source 1..28: mol_type = other DNA
gtgaagaaggggcccactccttccttgg

SEQ ID NO: 29045 - DNA, 28 bp, synthetic construct
  source 1..28: mol_type = other DNA
actcggcatgcaccaaggaaggagtggg

SEQ ID NO: 29046 - DNA, 28 bp, synthetic construct
  source 1..28: mol_type = other DNA
gactcggcatgcaccaaggaaggagtgg

SEQ ID NO: 29047 - DNA, 28 bp, synthetic construct
  source 1..28: mol_type = other DNA
aatgtgactcggcatgcaccaaggaagg

SEQ ID NO: 29048 - DNA, 28 bp, synthetic construct
  source 1..28: mol_type = other DNA
tccttggtgcatgccgagtcacatttgg

SEQ ID NO: 29049 - DNA, 28 bp, synthetic construct
  source 1..28: mol_type = other DNA
tccaaatgtgactcggcatgcaccaagg

SEQ ID NO: 29050 - DNA, 28 bp, synthetic construct
  source 1..28: mol_type = other DNA
ccgagtcacatttggatgtcaagtaagg

SEQ ID NO: 29051 - DNA, 28 bp, synthetic construct
  source 1..28: mol_type = other DNA
gtaaggccttagaaaccgcagcccaagg

SEQ ID NO: 29052 - DNA, 28 bp, synthetic construct
  source 1..28: mol_type = other DNA
agaattccttgggctgcggtttctaagg

SEQ ID NO: 29053 - DNA, 28 bp, synthetic construct
  source 1..28: mol_type = other DNA
ggtcagtgcagaattccttgggctgcgg

SEQ ID NO: 29054 - DNA, 28 bp, synthetic construct
  source 1..28: mol_type = other DNA
cccaaggaattctgcactgaccagctgg

SEQ ID NO: 29055 - DNA, 28 bp, synthetic construct
  source 1..28: mol_type = other DNA
tccagctggtcagtgcagaattccttgg

SEQ ID NO: 29056 - DNA, 28 bp, synthetic construct
  source 1..28: mol_type = other DNA
aggtgacttgttcaggatctccagctgg

SEQ ID NO: 29057 - DNA, 28 bp, synthetic construct
  source 1..28: mol_type = other DNA
ctcaggatgatgaggtgacttgttcagg

SEQ ID NO: 29058 - DNA, 28 bp, synthetic construct
  source 1..28: mol_type = other DNA
gagatcactagggctcaggatgatgagg

SEQ ID NO: 29059 - DNA, 28 bp, synthetic construct
  source 1..28: mol_type = other DNA
attaagcaggagatcactagggctcagg

SEQ ID NO: 29060 - DNA, 28 bp, synthetic construct
  source 1..28: mol_type = other DNA
ggactcattaagcaggagatcactaggg

SEQ ID NO: 29061 - DNA, 28 bp, synthetic construct
  source 1..28: mol_type = other DNA
aggactcattaagcaggagatcactagg

SEQ ID NO: 29062 - DNA, 28 bp, synthetic construct
  source 1..28: mol_type = other DNA
tcaggcaaagcaggactcattaagcagg

SEQ ID NO: 29063 - DNA, 28 bp, synthetic construct
  source 1..28: mol_type = other DNA
ttaaatggcaggagtcaggcaaagcagg

SEQ ID NO: 29064 - DNA, 28 bp, synthetic construct
  source 1..28: mol_type = other DNA
gctttgcctgactcctgccatttaatgg

SEQ ID NO: 29065 - DNA, 28 bp, synthetic construct
  source 1..28: mol_type = other DNA
taattaccattaaatggcaggagtcagg

SEQ ID NO: 29066 - DNA, 28 bp, synthetic construct
  source 1..28: mol_type = other DNA
tttattttaattaccattaaatggcagg

SEQ ID NO: 29067 - DNA, 28 bp, synthetic construct
  source 1..28: mol_type = other DNA
tcattttattttaattaccattaaatgg

SEQ ID NO: 29068 - DNA, 28 bp, synthetic construct
  source 1..28: mol_type = other DNA
tttaatggtaattaaaataaaatgatgg

SEQ ID NO: 29069 - DNA, 28 bp, synthetic construct
  source 1..28: mol_type = other DNA
ttaatggtaattaaaataaaatgatggg

SEQ ID NO: 29070 - DNA, 28 bp, synthetic construct
  source 1..28: mol_type = other DNA
tggtaattaaaataaaatgatgggccgg

SEQ ID NO: 29071 - DNA, 28 bp, synthetic construct
  source 1..28: mol_type = other DNA
aaaataaaatgatgggccggcaccgtgg

SEQ ID NO: 29072 - DNA, 28 bp, synthetic construct
  source 1..28: mol_type = other DNA
gattaataggcgtgagccacggtgccgg

SEQ ID NO: 29073 - DNA, 28 bp, synthetic construct
  source 1..28: mol_type = other DNA
caccgtggctcacgcctattaatcttgg

SEQ ID NO: 29074 - DNA, 28 bp, synthetic construct
  source 1..28: mol_type = other DNA
tgccaagattaataggcgtgagccacgg

SEQ ID NO: 29075 - DNA, 28 bp, synthetic construct
  source 1..28: mol_type = other DNA
cgcctattaatcttggcactatgtgagg

SEQ ID NO: 29076 - DNA, 28 bp, synthetic construct
  source 1..28: mol_type = other DNA
ggcctcacatagtgccaagattaatagg

SEQ ID NO: 29077 - DNA, 28 bp, synthetic construct
  source 1..28: mol_type = other DNA
taatcttggcactatgtgaggcctgagg

SEQ ID NO: 29078 - DNA, 28 bp, synthetic construct
  source 1..28: mol_type = other DNA
cttggcactatgtgaggcctgaggcagg

SEQ ID NO: 29079 - DNA, 28 bp, synthetic construct
  source 1..28: mol_type = other DNA
tgaggcctgaggcaggcttaagcctagg

SEQ ID NO: 29080 - DNA, 28 bp, synthetic construct
  source 1..28: mol_type = other DNA
aaactcctaggcttaagcctgcctcagg

SEQ ID NO: 29081 - DNA, 28 bp, synthetic construct
  source 1..28: mol_type = other DNA
ttgcacaggctggtctcaaactcctagg

SEQ ID NO: 29082 - DNA, 28 bp, synthetic construct
  source 1..28: mol_type = other DNA
gagtttgagaccagcctgtgcaacatgg

SEQ ID NO: 29083 - DNA, 28 bp, synthetic construct
  source 1..28: mol_type = other DNA
agtgtttttaccatgttgcacaggctgg

SEQ ID NO: 29084 - DNA, 28 bp, synthetic construct
  source 1..28: mol_type = other DNA
agacagtgtttttaccatgttgcacagg

SEQ ID NO: 29085 - DNA, 28 bp, synthetic construct
  source 1..28: mol_type = other DNA
ctccacaaaaaatacaaaaactagctgg

SEQ ID NO: 29086 - DNA, 28 bp, synthetic construct
  source 1..28: mol_type = other DNA
tccacaaaaaatacaaaaactagctggg

SEQ ID NO: 29087 - DNA, 28 bp, synthetic construct
  source 1..28: mol_type = other DNA
acccagctagtttttgtattttttgtgg

SEQ ID NO: 29088 - DNA, 28 bp, synthetic construct
  source 1..28: mol_type = other DNA
aaaaaatacaaaaactagctgggtgtgg

SEQ ID NO: 29089 - DNA, 28 bp, synthetic construct
  source 1..28: mol_type = other DNA
aaatacaaaaactagctgggtgtggtgg

SEQ ID NO: 29090 - DNA, 28 bp, synthetic construct
  source 1..28: mol_type = other DNA
gcacttgcctgtagtcccagctactcgg

SEQ ID NO: 29091 - DNA, 28 bp, synthetic construct
  source 1..28: mol_type = other DNA
cacttgcctgtagtcccagctactcggg

SEQ ID NO: 29092 - DNA, 28 bp, synthetic construct
  source 1..28: mol_type = other DNA
ttgcctgtagtcccagctactcgggagg

SEQ ID NO: 29093 - DNA, 28 bp, synthetic construct
  source 1..28: mol_type = other DNA
cagcctcccgagtagctgggactacagg

SEQ ID NO: 29094 - DNA, 28 bp, synthetic construct
  source 1..28: mol_type = other DNA
gtagtcccagctactcgggaggctgagg

SEQ ID NO: 29095 - DNA, 28 bp, synthetic construct
  source 1..28: mol_type = other DNA
gtcccagctactcgggaggctgaggtgg

SEQ ID NO: 29096 - DNA, 28 bp, synthetic construct
  source 1..28: mol_type = other DNA
tcccagctactcgggaggctgaggtggg

SEQ ID NO: 29097 - DNA, 28 bp, synthetic construct
  source 1..28: mol_type = other DNA
tcccacctcagcctcccgagtagctggg

SEQ ID NO: 29098 - DNA, 28 bp, synthetic construct
  source 1..28: mol_type = other DNA
ctcccacctcagcctcccgagtagctgg

SEQ ID NO: 29099 - DNA, 28 bp, synthetic construct
  source 1..28: mol_type = other DNA
tgaggtgggagaattgcttgagcccagg

SEQ ID NO: 29100 - DNA, 28 bp, synthetic construct
  source 1..28: mol_type = other DNA
ggtgggagaattgcttgagcccaggagg

SEQ ID NO: 29101 - DNA, 28 bp, synthetic construct
  source 1..28: mol_type = other DNA
agaattgcttgagcccaggaggttgagg

SEQ ID NO: 29102 - DNA, 28 bp, synthetic construct
  source 1..28: mol_type = other DNA
tggttcactgcagcctcaacctcctggg

SEQ ID NO: 29103 - DNA, 28 bp, synthetic construct
  source 1..28: mol_type = other DNA
atggttcactgcagcctcaacctcctgg

SEQ ID NO: 29104 - DNA, 28 bp, synthetic construct
  source 1..28: mol_type = other DNA
aggttgaggctgcagtgaaccattatgg

SEQ ID NO: 29105 - DNA, 28 bp, synthetic construct
  source 1..28: mol_type = other DNA
aggctggagtgcagtggcgccataatgg

SEQ ID NO: 29106 - DNA, 28 bp, synthetic construct
  source 1..28: mol_type = other DNA
attatggcgccactgcactccagcctgg

SEQ ID NO: 29107 - DNA, 28 bp, synthetic construct
  source 1..28: mol_type = other DNA
ttatggcgccactgcactccagcctggg

SEQ ID NO: 29108 - DNA, 28 bp, synthetic construct
  source 1..28: mol_type = other DNA
ctctgttgcccaggctggagtgcagtgg

SEQ ID NO: 29109 - DNA, 28 bp, synthetic construct
  source 1..28: mol_type = other DNA
cagggtctcactctgttgcccaggctgg

SEQ ID NO: 29110 - DNA, 28 bp, synthetic construct
  source 1..28: mol_type = other DNA
gagacagggtctcactctgttgcccagg

SEQ ID NO: 29111 - DNA, 28 bp, synthetic construct
  source 1..28: mol_type = other DNA
taaatttattatcatttttgagacaggg

SEQ ID NO: 29112 - DNA, 28 bp, synthetic construct
  source 1..28: mol_type = other DNA
ctaaatttattatcatttttgagacagg

SEQ ID NO: 29113 - DNA, 28 bp, synthetic construct
  source 1..28: mol_type = other DNA
ttgtaaagcagtcagtagtttacaaagg

SEQ ID NO: 29114 - DNA, 28 bp, synthetic construct
  source 1..28: mol_type = other DNA
gttccttatcccctgaaaatatgcctgg

SEQ ID NO: 29115 - DNA, 28 bp, synthetic construct
  source 1..28: mol_type = other DNA
ttccttatcccctgaaaatatgcctggg

SEQ ID NO: 29116 - DNA, 28 bp, synthetic construct
  source 1..28: mol_type = other DNA
tccttatcccctgaaaatatgcctgggg

SEQ ID NO: 29117 - DNA, 28 bp, synthetic construct
  source 1..28: mol_type = other DNA
tccccaggcatattttcaggggataagg

SEQ ID NO: 29118 - DNA, 28 bp, synthetic construct
  source 1..28: mol_type = other DNA
ttatcccctgaaaatatgcctggggagg

SEQ ID NO: 29119 - DNA, 28 bp, synthetic construct
  source 1..28: mol_type = other DNA
tatcccctgaaaatatgcctggggaggg

SEQ ID NO: 29120 - DNA, 28 bp, synthetic construct
  source 1..28: mol_type = other DNA
atcccctgaaaatatgcctggggagggg

SEQ ID NO: 29121 - DNA, 28 bp, synthetic construct
  source 1..28: mol_type = other DNA
atcccctccccaggcatattttcagggg

SEQ ID NO: 29122 - DNA, 28 bp, synthetic construct
  source 1..28: mol_type = other DNA
catcccctccccaggcatattttcaggg

SEQ ID NO: 29123 - DNA, 28 bp, synthetic construct
  source 1..28: mol_type = other DNA
tcatcccctccccaggcatattttcagg

SEQ ID NO: 29124 - DNA, 28 bp, synthetic construct
  source 1..28: mol_type = other DNA
aaatatgcctggggaggggatgaagagg

SEQ ID NO: 29125 - DNA, 28 bp, synthetic construct
  source 1..28: mol_type = other DNA
aatatgcctggggaggggatgaagaggg

SEQ ID NO: 29126 - DNA, 28 bp, synthetic construct
  source 1..28: mol_type = other DNA
aaacggccctcttcatcccctccccagg

SEQ ID NO: 29127 - DNA, 28 bp, synthetic construct
  source 1..28: mol_type = other DNA
tggggaggggatgaagagggccgtttgg

SEQ ID NO: 29128 - DNA, 28 bp, synthetic construct
  source 1..28: mol_type = other DNA
ggggatgaagagggccgtttggatgagg

SEQ ID NO: 29129 - DNA, 28 bp, synthetic construct
  source 1..28: mol_type = other DNA
tgaagagggccgtttggatgaggtgtgg

SEQ ID NO: 29130 - DNA, 28 bp, synthetic construct
  source 1..28: mol_type = other DNA
gaagaaaggccacacctcatccaaacgg

SEQ ID NO: 29131 - DNA, 28 bp, synthetic construct
  source 1..28: mol_type = other DNA
aggtgtggcctttcttcatcattcctgg

SEQ ID NO: 29132 - DNA, 28 bp, synthetic construct
  source 1..28: mol_type = other DNA
ctctggaaccaggaatgatgaagaaagg

SEQ ID NO: 29133 - DNA, 28 bp, synthetic construct
  source 1..28: mol_type = other DNA
ataagaatgaggaaactctggaaccagg

SEQ ID NO: 29134 - DNA, 28 bp, synthetic construct
  source 1..28: mol_type = other DNA
tggttccagagtttcctcattcttatgg

SEQ ID NO: 29135 - DNA, 28 bp, synthetic construct
  source 1..28: mol_type = other DNA
tgttaccataagaatgaggaaactctgg

SEQ ID NO: 29136 - DNA, 28 bp, synthetic construct
  source 1..28: mol_type = other DNA
ttcctcattcttatggtaacatttatgg

SEQ ID NO: 29137 - DNA, 28 bp, synthetic construct
  source 1..28: mol_type = other DNA
gtccataaatgttaccataagaatgagg

SEQ ID NO: 29138 - DNA, 28 bp, synthetic construct
  source 1..28: mol_type = other DNA
ttatggtaacatttatggaccactgagg

SEQ ID NO: 29139 - DNA, 28 bp, synthetic construct
  source 1..28: mol_type = other DNA
ttatggaccactgaggatacaagagtgg

SEQ ID NO: 29140 - DNA, 28 bp, synthetic construct
  source 1..28: mol_type = other DNA
gattagtccactcttgtatcctcagtgg

SEQ ID NO: 29141 - DNA, 28 bp, synthetic construct
  source 1..28: mol_type = other DNA
tgtgaactctgagaaggcaggaagcggg

SEQ ID NO: 29142 - DNA, 28 bp, synthetic construct
  source 1..28: mol_type = other DNA
ctgtgaactctgagaaggcaggaagcgg

SEQ ID NO: 29143 - DNA, 28 bp, synthetic construct
  source 1..28: mol_type = other DNA
cagagtctgtgaactctgagaaggcagg

SEQ ID NO: 29144 - DNA, 28 bp, synthetic construct
  source 1..28: mol_type = other DNA
gccttctcagagttcacagactctgagg

SEQ ID NO: 29145 - DNA, 28 bp, synthetic construct
  source 1..28: mol_type = other DNA
tcctcagagtctgtgaactctgagaagg

SEQ ID NO: 29146 - DNA, 28 bp, synthetic construct
  source 1..28: mol_type = other DNA
agttcacagactctgaggagccatatgg

SEQ ID NO: 29147 - DNA, 28 bp, synthetic construct
  source 1..28: mol_type = other DNA
gttcacagactctgaggagccatatggg

SEQ ID NO: 29148 - DNA, 28 bp, synthetic construct
  source 1..28: mol_type = other DNA
ttcacagactctgaggagccatatgggg

SEQ ID NO: 29149 - DNA, 28 bp, synthetic construct
  source 1..28: mol_type = other DNA
taatttatatttaaatagccccatatgg

SEQ ID NO: 29150 - DNA, 28 bp, synthetic construct
  source 1..28: mol_type = other DNA
actcgaaatgcagcttgtgctactgagg

SEQ ID NO: 29151 - DNA, 28 bp, synthetic construct
  source 1..28: mol_type = other DNA
tgtagtctaatgtagtaggtgcatgtgg

SEQ ID NO: 29152 - DNA, 28 bp, synthetic construct
  source 1..28: mol_type = other DNA
atacatgcatgtagtctaatgtagtagg

SEQ ID NO: 29153 - DNA, 28 bp, synthetic construct
  source 1..28: mol_type = other DNA
tttccattattatagaaagttctattgg

SEQ ID NO: 29154 - DNA, 28 bp, synthetic construct
  source 1..28: mol_type = other DNA
tatccaatagaactttctataataatgg

SEQ ID NO: 29155 - DNA, 28 bp, synthetic construct
  source 1..28: mol_type = other DNA
aaagttctattggatagcactgctctgg

SEQ ID NO: 29156 - DNA, 28 bp, synthetic construct
  source 1..28: mol_type = other DNA
aagttctattggatagcactgctctggg

SEQ ID NO: 29157 - DNA, 28 bp, synthetic construct
  source 1..28: mol_type = other DNA
agttctattggatagcactgctctgggg

SEQ ID NO: 29158 - DNA, 28 bp, synthetic construct
  source 1..28: mol_type = other DNA
gttctattggatagcactgctctggggg

SEQ ID NO: 29159 - DNA, 28 bp, synthetic construct
  source 1..28: mol_type = other DNA
tggatagcactgctctgggggctacagg

SEQ ID NO: 29160 - DNA, 28 bp, synthetic construct
  source 1..28: mol_type = other DNA
ctgctctgggggctacaggtaaatgagg

SEQ ID NO: 29161 - DNA, 28 bp, synthetic construct
  source 1..28: mol_type = other DNA
ctctgggggctacaggtaaatgaggagg

SEQ ID NO: 29162 - DNA, 28 bp, synthetic construct
  source 1..28: mol_type = other DNA
tgaggaggagattacaataaagtacagg

SEQ ID NO: 29163 - DNA, 28 bp, synthetic construct
  source 1..28: mol_type = other DNA
aataaagtacaggaaagatgtgttttgg

SEQ ID NO: 29164 - DNA, 28 bp, synthetic construct
  source 1..28: mol_type = other DNA
aagtacaggaaagatgtgttttggcagg

SEQ ID NO: 29165 - DNA, 28 bp, synthetic construct
  source 1..28: mol_type = other DNA
agatgtgttttggcaggagaaatgcagg

SEQ ID NO: 29166 - DNA, 28 bp, synthetic construct
  source 1..28: mol_type = other DNA
gatgtgttttggcaggagaaatgcaggg

SEQ ID NO: 29167 - DNA, 28 bp, synthetic construct
  source 1..28: mol_type = other DNA
atgtgttttggcaggagaaatgcagggg

SEQ ID NO: 29168 - DNA, 28 bp, synthetic construct
  source 1..28: mol_type = other DNA
tgtgttttggcaggagaaatgcaggggg

SEQ ID NO: 29169 - DNA, 28 bp, synthetic construct
  source 1..28: mol_type = other DNA
ttggcaggagaaatgcagggggctttgg

SEQ ID NO: 29170 - DNA, 28 bp, synthetic construct
  source 1..28: mol_type = other DNA
tggcaggagaaatgcagggggctttggg

SEQ ID NO: 29171 - DNA, 28 bp, synthetic construct
  source 1..28: mol_type = other DNA
agaaatgcagggggctttgggagcctgg

SEQ ID NO: 29172 - DNA, 28 bp, synthetic construct
  source 1..28: mol_type = other DNA
ttgggagcctggacaaaagagtatctgg

SEQ ID NO: 29173 - DNA, 28 bp, synthetic construct
  source 1..28: mol_type = other DNA
agcctggacaaaagagtatctggtcagg

SEQ ID NO: 29174 - DNA, 28 bp, synthetic construct
  source 1..28: mol_type = other DNA
atcctgaccagatactcttttgtccagg

SEQ ID NO: 29175 - DNA, 28 bp, synthetic construct
  source 1..28: mol_type = other DNA
gacaaaagagtatctggtcaggatatgg

SEQ ID NO: 29176 - DNA, 28 bp, synthetic construct
  source 1..28: mol_type = other DNA
acaaaagagtatctggtcaggatatggg

SEQ ID NO: 29177 - DNA, 28 bp, synthetic construct
  source 1..28: mol_type = other DNA
caaaagagtatctggtcaggatatgggg

SEQ ID NO: 29178 - DNA, 28 bp, synthetic construct
  source 1..28: mol_type = other DNA
agtatctggtcaggatatggggatctgg

SEQ ID NO: 29179 - DNA, 28 bp, synthetic construct
  source 1..28: mol_type = other DNA
gtatctggtcaggatatggggatctggg

SEQ ID NO: 29180 - DNA, 28 bp, synthetic construct
  source 1..28: mol_type = other DNA
gatatggggatctgggaagtcttcctgg

SEQ ID NO: 29181 - DNA, 28 bp, synthetic construct
  source 1..28: mol_type = other DNA
atggggatctgggaagtcttcctggagg

SEQ ID NO: 29182 - DNA, 28 bp, synthetic construct
  source 1..28: mol_type = other DNA
tctcagtttaggtgtcacttcctccagg

SEQ ID NO: 29183 - DNA, 28 bp, synthetic construct
  source 1..28: mol_type = other DNA
cttggctactttcaggtctcagtttagg

SEQ ID NO: 29184 - DNA, 28 bp, synthetic construct
  source 1..28: mol_type = other DNA
cttatcttctttcttggctactttcagg

SEQ ID NO: 29185 - DNA, 28 bp, synthetic construct
  source 1..28: mol_type = other DNA
ctgaaagtagccaagaaagaagataagg

SEQ ID NO: 29186 - DNA, 28 bp, synthetic construct
  source 1..28: mol_type = other DNA
gaacactcttccttatcttctttcttgg

SEQ ID NO: 29187 - DNA, 28 bp, synthetic construct
  source 1..28: mol_type = other DNA
agataaggaagagtgttctccacaaagg

SEQ ID NO: 29188 - DNA, 28 bp, synthetic construct
  source 1..28: mol_type = other DNA
gataaggaagagtgttctccacaaaggg

SEQ ID NO: 29189 - DNA, 28 bp, synthetic construct
  source 1..28: mol_type = other DNA
ctctttgaatattctattccctttgtgg

SEQ ID NO: 29190 - DNA, 28 bp, synthetic construct
  source 1..28: mol_type = other DNA
tggtctactcagactgaacagttcatgg

SEQ ID NO: 29191 - DNA, 28 bp, synthetic construct
  source 1..28: mol_type = other DNA
tgaactgttcagtctgagtagaccaagg

SEQ ID NO: 29192 - DNA, 28 bp, synthetic construct
  source 1..28: mol_type = other DNA
gaactgttcagtctgagtagaccaaggg

SEQ ID NO: 29193 - DNA, 28 bp, synthetic construct
  source 1..28: mol_type = other DNA
cagtctgagtagaccaagggatttgagg

SEQ ID NO: 29194 - DNA, 28 bp, synthetic construct
  source 1..28: mol_type = other DNA
gtagaccaagggatttgaggcagactgg

SEQ ID NO: 29195 - DNA, 28 bp, synthetic construct
  source 1..28: mol_type = other DNA
tagaccaagggatttgaggcagactggg

SEQ ID NO: 29196 - DNA, 28 bp, synthetic construct
  source 1..28: mol_type = other DNA
agaccaagggatttgaggcagactgggg

SEQ ID NO: 29197 - DNA, 28 bp, synthetic construct
  source 1..28: mol_type = other DNA
gaccaagggatttgaggcagactggggg

SEQ ID NO: 29198 - DNA, 28 bp, synthetic construct
  source 1..28: mol_type = other DNA
ttcccccagtctgcctcaaatcccttgg

SEQ ID NO: 29199 - DNA, 28 bp, synthetic construct
  source 1..28: mol_type = other DNA
tgaggcagactgggggaagtgacagagg

SEQ ID NO: 29200 - DNA, 28 bp, synthetic construct
  source 1..28: mol_type = other DNA
ctgggggaagtgacagaggtagacctgg

SEQ ID NO: 29201 - DNA, 28 bp, synthetic construct
  source 1..28: mol_type = other DNA
cagaggtagacctggagaaataaacagg

SEQ ID NO: 29202 - DNA, 28 bp, synthetic construct
  source 1..28: mol_type = other DNA
tagacctggagaaataaacaggtccagg

SEQ ID NO: 29203 - DNA, 28 bp, synthetic construct
  source 1..28: mol_type = other DNA
gtgacctggacctgtttatttctccagg

SEQ ID NO: 29204 - DNA, 28 bp, synthetic construct
  source 1..28: mol_type = other DNA
gagaaataaacaggtccaggtcacaagg

SEQ ID NO: 29205 - DNA, 28 bp, synthetic construct
  source 1..28: mol_type = other DNA
agaaataaacaggtccaggtcacaaggg

SEQ ID NO: 29206 - DNA, 28 bp, synthetic construct
  source 1..28: mol_type = other DNA
gaaataaacaggtccaggtcacaagggg

SEQ ID NO: 29207 - DNA, 28 bp, synthetic construct
  source 1..28: mol_type = other DNA
aggctgcatgtggccccttgtgacctgg

SEQ ID NO: 29208 - DNA, 28 bp, synthetic construct
  source 1..28: mol_type = other DNA
acaaggggccacatgcagcctctgcagg

SEQ ID NO: 29209 - DNA, 28 bp, synthetic construct
  source 1..28: mol_type = other DNA
aggggccacatgcagcctctgcaggagg

SEQ ID NO: 29210 - DNA, 28 bp, synthetic construct
  source 1..28: mol_type = other DNA
ccacatgcagcctctgcaggaggagagg

SEQ ID NO: 29211 - DNA, 28 bp, synthetic construct
  source 1..28: mol_type = other DNA
tcttattgctcctctcctcctgcagagg

SEQ ID NO: 29212 - DNA, 28 bp, synthetic construct
  source 1..28: mol_type = other DNA
tctgcaggaggagaggagcaataagagg

SEQ ID NO: 29213 - DNA, 28 bp, synthetic construct
  source 1..28: mol_type = other DNA
gcaggaggagaggagcaataagaggtgg

SEQ ID NO: 29214 - DNA, 28 bp, synthetic construct
  source 1..28: mol_type = other DNA
caggaggagaggagcaataagaggtggg

SEQ ID NO: 29215 - DNA, 28 bp, synthetic construct
  source 1..28: mol_type = other DNA
aggaggagaggagcaataagaggtgggg

SEQ ID NO: 29216 - DNA, 28 bp, synthetic construct
  source 1..28: mol_type = other DNA
ggaggagaggagcaataagaggtggggg

SEQ ID NO: 29217 - DNA, 28 bp, synthetic construct
  source 1..28: mol_type = other DNA
ggagaggagcaataagaggtgggggcgg

SEQ ID NO: 29218 - DNA, 28 bp, synthetic construct
  source 1..28: mol_type = other DNA
gagcaataagaggtgggggcggagaagg

SEQ ID NO: 29219 - DNA, 28 bp, synthetic construct
  source 1..28: mol_type = other DNA
agcaataagaggtgggggcggagaaggg

SEQ ID NO: 29220 - DNA, 28 bp, synthetic construct
  source 1..28: mol_type = other DNA
acagatgcagttggatgggattcaatgg

SEQ ID NO: 29221 - DNA, 28 bp, synthetic construct
  source 1..28: mol_type = other DNA
ctgaagggcacagatgcagttggatggg

SEQ ID NO: 29222 - DNA, 28 bp, synthetic construct
  source 1..28: mol_type = other DNA
tctgaagggcacagatgcagttggatgg

SEQ ID NO: 29223 - DNA, 28 bp, synthetic construct
  source 1..28: mol_type = other DNA
ctgatctgaagggcacagatgcagttgg

SEQ ID NO: 29224 - DNA, 28 bp, synthetic construct
  source 1..28: mol_type = other DNA
caactgcatctgtgcccttcagatcagg

SEQ ID NO: 29225 - DNA, 28 bp, synthetic construct
  source 1..28: mol_type = other DNA
ctgtgcccttcagatcaggattacacgg

SEQ ID NO: 29226 - DNA, 28 bp, synthetic construct
  source 1..28: mol_type = other DNA
tgtgcccttcagatcaggattacacggg

SEQ ID NO: 29227 - DNA, 28 bp, synthetic construct
  source 1..28: mol_type = other DNA
gtgcccttcagatcaggattacacgggg

SEQ ID NO: 29228 - DNA, 28 bp, synthetic construct
  source 1..28: mol_type = other DNA
catccccgtgtaatcctgatctgaaggg

SEQ ID NO: 29229 - DNA, 28 bp, synthetic construct
  source 1..28: mol_type = other DNA
gcatccccgtgtaatcctgatctgaagg

SEQ ID NO: 29230 - DNA, 28 bp, synthetic construct
  source 1..28: mol_type = other DNA
ggggatgctaaatctcctagcccaatgg

SEQ ID NO: 29231 - DNA, 28 bp, synthetic construct
  source 1..28: mol_type = other DNA
gtctgtaaagtgaggccattgggctagg

SEQ ID NO: 29232 - DNA, 28 bp, synthetic construct
  source 1..28: mol_type = other DNA
gcccaatggcctcactttacagacaagg

SEQ ID NO: 29233 - DNA, 28 bp, synthetic construct
  source 1..28: mol_type = other DNA
tccttgtctgtaaagtgaggccattggg

SEQ ID NO: 29234 - DNA, 28 bp, synthetic construct
  source 1..28: mol_type = other DNA
ttccttgtctgtaaagtgaggccattgg

SEQ ID NO: 29235 - DNA, 28 bp, synthetic construct
  source 1..28: mol_type = other DNA
tggcctcactttacagacaaggaagtgg

SEQ ID NO: 29236 - DNA, 28 bp, synthetic construct
  source 1..28: mol_type = other DNA
cctcactttacagacaaggaagtggagg

SEQ ID NO: 29237 - DNA, 28 bp, synthetic construct
  source 1..28: mol_type = other DNA
acagacaaggaagtggaggccagacagg

SEQ ID NO: 29238 - DNA, 28 bp, synthetic construct
  source 1..28: mol_type = other DNA
cagacaaggaagtggaggccagacaggg

SEQ ID NO: 29239 - DNA, 28 bp, synthetic construct
  source 1..28: mol_type = other DNA
agacaaggaagtggaggccagacagggg

SEQ ID NO: 29240 - DNA, 28 bp, synthetic construct
  source 1..28: mol_type = other DNA
cacttggaaatttatttcccctgtctgg

SEQ ID NO: 29241 - DNA, 28 bp, synthetic construct
  source 1..28: mol_type = other DNA
aataaatttccaagtgagtaaatagagg

SEQ ID NO: 29242 - DNA, 28 bp, synthetic construct
  source 1..28: mol_type = other DNA
ataaatttccaagtgagtaaatagaggg

SEQ ID NO: 29243 - DNA, 28 bp, synthetic construct
  source 1..28: mol_type = other DNA
caggaagtccctctatttactcacttgg

SEQ ID NO: 29244 - DNA, 28 bp, synthetic construct
  source 1..28: mol_type = other DNA
gggaaagagcactggactaggagtcagg

SEQ ID NO: 29245 - DNA, 28 bp, synthetic construct
  source 1..28: mol_type = other DNA
gtggtgtgggaaagagcactggactagg

SEQ ID NO: 29246 - DNA, 28 bp, synthetic construct
  source 1..28: mol_type = other DNA
ctgagtgtggtgtgggaaagagcactgg

SEQ ID NO: 29247 - RNA, 20 nt, synthetic construct
  source 1..20: mol_type = other RNA
ttagcatcaaggcatgccat

SEQ ID NO: 29248 - RNA, 20 nt, synthetic construct
  source 1..20: mol_type = other RNA
aggatcgacttgtggaacaa

SEQ ID NO: 29249 - RNA, 20 nt, synthetic construct
  source 1..20: mol_type = other RNA
ccgctttccagtgaccgacg

SEQ ID NO: 29250 - RNA, 20 nt, synthetic construct
  source 1..20: mol_type = other RNA
ttgctgaatattgtccacca

SEQ ID NO: 29251 - RNA, 20 nt, synthetic construct
  source 1..20: mol_type = other RNA
cagtgagtagtgccaaacca

SEQ ID NO: 29252 - RNA, 20 nt, synthetic construct
  source 1..20: mol_type = other RNA
acatcgactgctggacaatg

SEQ ID NO: 29253 - RNA, 20 nt, synthetic construct
  source 1..20: mol_type = other RNA
cccatccttcaaggatcgag

SEQ ID NO: 29254 - RNA, 20 nt, synthetic construct
  source 1..20: mol_type = other RNA
gcagatgaccaccagcgtcg

SEQ ID NO: 29255 - RNA, 20 nt, synthetic construct
  source 1..20: mol_type = other RNA
ccagacccctgtcatgacag

SEQ ID NO: 29256 - RNA, 20 nt, synthetic construct
  source 1..20: mol_type = other RNA
caccaaactcctgagcatca

SEQ ID NO: 29257 - RNA, 20 nt, synthetic construct
  source 1..20: mol_type = other RNA
gaaaatgaatggctcccaca

SEQ ID NO: 29258 - RNA, 20 nt, synthetic construct
  source 1..20: mol_type = other RNA
gatggcttggtccatcacgt

SEQ ID NO: 29259 - RNA, 20 nt, synthetic construct
  source 1..20: mol_type = other RNA
cttgtggcgctgaaaacgaa

SEQ ID NO: 29260 - RNA, 20 nt, synthetic construct
  source 1..20: mol_type = other RNA
tcaactggtgtcgagaagtc

SEQ ID NO: 29261 - RNA, 20 nt, synthetic construct
  source 1..20: mol_type = other RNA
gtcgtgatggtgtgaacacc

SEQ ID NO: 29262 - RNA, 20 nt, synthetic construct
  source 1..20: mol_type = other RNA
caccaccccgcgggactaga

SEQ ID NO: 29263 - RNA, 20 nt, synthetic construct
  source 1..20: mol_type = other RNA
gggcccccagtagaatccgc

SEQ ID NO: 29264 - RNA, 19 nt, synthetic construct
  source 1..19: mol_type = other RNA
gacgcctgcggattctact

SEQ ID NO: 29265 - RNA, 20 nt, synthetic construct
  source 1..20: mol_type = other RNA
ttccgcaaaatagagcccca

SEQ ID NO: 29266 - RNA, 20 nt, synthetic construct
  source 1..20: mol_type = other RNA
ttagcatcaaggcatgccat

SEQ ID NO: 29267 - RNA, 20 nt, synthetic construct
  source 1..20: mol_type = other RNA
ccgctttccagtgaccgacg

SEQ ID NO: 29268 - RNA, 20 nt, synthetic construct
  source 1..20: mol_type = other RNA
ttgctgaatattgtccacca

SEQ ID NO: 29269 - RNA, 20 nt, synthetic construct
  source 1..20: mol_type = other RNA
cagtgagtagtgccaaacca

SEQ ID NO: 29270 - RNA, 20 nt, synthetic construct
  source 1..20: mol_type = other RNA
acatcgactgctggacaatg

SEQ ID NO: 29271 - RNA, 20 nt, synthetic construct
  source 1..20: mol_type = other RNA
tcagattgtatgtagttacc

SEQ ID NO: 29272 - RNA, 20 nt, synthetic construct
  source 1..20: mol_type = other RNA
ttgcacatcacttacgagag

SEQ ID NO: 29273 - RNA, 20 nt, synthetic construct
  source 1..20: mol_type = other RNA
gatccgcctcgagccgcagg

SEQ ID NO: 29274 - RNA, 20 nt, synthetic construct
  source 1..20: mol_type = other RNA
ggttggtgatcacagccaag

SEQ ID NO: 29275 - RNA, 20 nt, synthetic construct
  source 1..20: mol_type = other RNA
ccagccgtactatgccacga

SEQ ID NO: 29276 - RNA, 20 nt, synthetic construct
  source 1..20: mol_type = other RNA
ccagggtggacgctacacag

SEQ ID NO: 29277 - RNA, 20 nt, synthetic construct
  source 1..20: mol_type = other RNA
ataaaacttacactggatgg

SEQ ID NO: 29278 - RNA, 20 nt, synthetic construct
  source 1..20: mol_type = other RNA
gatgagcaatggcaacaaag

SEQ ID NO: 29279 - RNA, 20 nt, synthetic construct
  source 1..20: mol_type = other RNA
gctttgctgtcctcccgagg

SEQ ID NO: 29280 - RNA, 20 nt, synthetic construct
  source 1..20: mol_type = other RNA
gcacatcaagctgcattccg

SEQ ID NO: 29281 - RNA, 20 nt, synthetic construct
  source 1..20: mol_type = other RNA
cggaatgcagcttgatgtgc

SEQ ID NO: 29282 - RNA, 20 nt, synthetic construct
  source 1..20: mol_type = other RNA
ggccacctgaggacgcactc

SEQ ID NO: 29283 - RNA, 20 nt, synthetic construct
  source 1..20: mol_type = other RNA
acctgaggacgcactccggt

SEQ ID NO: 29284 - RNA, 20 nt, synthetic construct
  source 1..20: mol_type = other RNA
ggacaccgagagcaacaacg

SEQ ID NO: 29285 - RNA, 20 nt, synthetic construct
  source 1..20: mol_type = other RNA
tgtgcgacgagaactcgtac

SEQ ID NO: 29286 - RNA, 20 nt, synthetic construct
  source 1..20: mol_type = other RNA
ttctcgtcgcacataacgcg

SEQ ID NO: 29287 - RNA, 20 nt, synthetic construct
  source 1..20: mol_type = other RNA
tctcgtcgcacataacgcga

SEQ ID NO: 29288 - RNA, 20 nt, synthetic construct
  source 1..20: mol_type = other RNA
ctcgtcgcacataacgcgag

SEQ ID NO: 29289 - RNA, 20 nt, synthetic construct
  source 1..20: mol_type = other RNA
ggtgagggaatctcagccag

SEQ ID NO: 29290 - RNA, 20 nt, synthetic construct
  source 1..20: mol_type = other RNA
cgagctacatgcatctaggg

SEQ ID NO: 29291 - RNA, 20 nt, synthetic construct
  source 1..20: mol_type = other RNA
gaagacagtctcctcctacg

SEQ ID NO: 29292 - RNA, 20 nt, synthetic construct
  source 1..20: mol_type = other RNA
gagtgcgactgcagagcccg

SEQ ID NO: 29293 - RNA, 20 nt, synthetic construct
  source 1..20: mol_type = other RNA
aaacaatctctcattttgtg

SEQ ID NO: 29294 - RNA, 20 nt, synthetic construct
  source 1..20: mol_type = other RNA
gaagacttgtgtaatcacag

SEQ ID NO: 29295 - RNA, 20 nt, synthetic construct
  source 1..20: mol_type = other RNA
gcctgttgactccaattcag

SEQ ID NO: 29296 - RNA, 20 nt, synthetic construct
  source 1..20: mol_type = other RNA
ttagcatcaaggcatgccat

SEQ ID NO: 29297 - RNA, 20 nt, synthetic construct
  source 1..20: mol_type = other RNA
catccaaaactgatgacctg

SEQ ID NO: 29298 - RNA, 20 nt, synthetic construct
  source 1..20: mol_type = other RNA
tgcagcagcagtcgtacaag

SEQ ID NO: 29299 - RNA, 20 nt, synthetic construct
  source 1..20: mol_type = other RNA
gtctaattcagccacagcag

SEQ ID NO: 29300 - RNA, 20 nt, synthetic construct
  source 1..20: mol_type = other RNA
ggatgagatgatgaaaatag

SEQ ID NO: 29301 - RNA, 20 nt, synthetic construct
  source 1..20: mol_type = other RNA
gagatgatgaaaatagtggg

SEQ ID NO: 29302 - RNA, 20 nt, synthetic construct
  source 1..20: mol_type = other RNA
agatgatgaaaatagtggga

SEQ ID NO: 29303 - RNA, 20 nt, synthetic construct
  source 1..20: mol_type = other RNA
attaaaacctattcttgatg

SEQ ID NO: 29304 - RNA, 20 nt, synthetic construct
  source 1..20: mol_type = other RNA
cgatcctattaaattgaaag

SEQ ID NO: 29305 - RNA, 20 nt, synthetic construct
  source 1..20: mol_type = other RNA
agatatcacacattacagtg

SEQ ID NO: 29306 - RNA, 20 nt, synthetic construct
  source 1..20: mol_type = other RNA
ctgcagaatactgaacatga

SEQ ID NO: 29307 - RNA, 20 nt, synthetic construct
  source 1..20: mol_type = other RNA
ggtcgcaaatgaaaagtatg

SEQ ID NO: 29308 - RNA, 20 nt, synthetic construct
  source 1..20: mol_type = other RNA
tacaaactttgggaagctgg

SEQ ID NO: 29309 - RNA, 20 nt, synthetic construct
  source 1..20: mol_type = other RNA
aaagcataaacacaactacc

SEQ ID NO: 29310 - RNA, 20 nt, synthetic construct
  source 1..20: mol_type = other RNA
atttccgttcagatacacag

SEQ ID NO: 29311 - RNA, 20 nt, synthetic construct
  source 1..20: mol_type = other RNA
aaagaaacttacgcagtaca

SEQ ID NO: 29312 - RNA, 20 nt, synthetic construct
  source 1..20: mol_type = other RNA
tctgcagcttaagtaaactg

SEQ ID NO: 29313 - RNA, 20 nt, synthetic construct
  source 1..20: mol_type = other RNA
ggaggcagatgacattgaag

SEQ ID NO: 29314 - RNA, 20 nt, synthetic construct
  source 1..20: mol_type = other RNA
tgtaatgactgatggaccaa

SEQ ID NO: 29315 - RNA, 20 nt, synthetic construct
  source 1..20: mol_type = other RNA
gccagaagcccagattaggg

SEQ ID NO: 29316 - RNA, 20 nt, synthetic construct
  source 1..20: mol_type = other RNA
ggcctgaaaccacttccggg

SEQ ID NO: 29317 - RNA, 20 nt, synthetic construct
  source 1..20: mol_type = other RNA
acaaatgaaagccttctggg

SEQ ID NO: 29318 - RNA, 20 nt, synthetic construct
  source 1..20: mol_type = other RNA
ctgagctgtttacaggactg

SEQ ID NO: 29319 - RNA, 20 nt, synthetic construct
  source 1..20: mol_type = other RNA
gctaaaagcattcaaagatg

SEQ ID NO: 29320 - RNA, 20 nt, synthetic construct
  source 1..20: mol_type = other RNA
tgatcgtgagcgcatgaatg

SEQ ID NO: 29321 - RNA, 20 nt, synthetic construct
  source 1..20: mol_type = other RNA
gtattccctgcagaccgaca

SEQ ID NO: 29322 - RNA, 20 nt, synthetic construct
  source 1..20: mol_type = other RNA
gaagcaggtgactgacctgg

SEQ ID NO: 29323 - RNA, 20 nt, synthetic construct
  source 1..20: mol_type = other RNA
gacggcaggtaaggtcccag

SEQ ID NO: 29324 - RNA, 20 nt, synthetic construct
  source 1..20: mol_type = other RNA
gatgagcaatggcaacaaag

SEQ ID NO: 29325 - RNA, 20 nt, synthetic construct
  source 1..20: mol_type = other RNA
ctcggcacacacactcagcg